United States Patent Application Publication US 2008/0114160 A1 - sequence listing, part 76

SEQ ID NO: 28534 - DNA, 10755 bp, Oryza sativa
  unsure (1)..(10755): unsure at all n locations
ataccatatacctaatagtagttgactaaatctcggcaggatccaccacataccatgtcttatacggaaactgacctcgagggagttccggataaggaaagacaaccagagttctacatgaaaacgacaaggactactcggattgtatccatattagtttccctagttctacttagacaaggcgacacctataggtataaatacaagccccctaggaggacagcgggacacccaccatggggtgatcaacacagacaatcaacgacctcaatcaacacccaacacgttacacgggacaacatacaagcctacatacgccaagacaagacgccggatattgacttcagggataagcacggctattctcttacggtgtctcaagatactgtcaggagagacgaaggcgctatctctgatcttgccgggcacggattcgaggaggaagattaccctgttgtcgactacgagtcagaccttcagaccgccatgtcgacaacagttagataggctaccccacatattgtactggtattattatggtgaataaagagcaacaccggctccggccaacaggatgtagggctattacctgaccgctcagggacccgaacctgtataaaaatcctcgtctccatctcttttaccttagtctggcgtatatcttagcaccaacgatccccatattgtccaaataccgtagtcgagacatcaaacgtcgacaaaatctagcaattttcattcttgaaacaattgtttagttttatgaaatcatactgttatattcctaggacacgcgaaagttagggtttgattgactcattaccgagggcatgttggaaagagttgtgtggctgttgtgcttattcttgcacatgaaactgaacggatcatcactagcacatgattagttaaatatcagctattataaatttttaaaaatgtatttatttgatctttttttaaaaaaacttctatatagaaaatttttatacaaaacatcacaagtagcagttcggaaaatgtgtaaatgaaaatcgagtaagttgtcgtttggagttgttggaaataacagcctaagagtgtgcgaaggcacaagcctctggaatacatatctaaagttggtcataataattctttgtatataagcaattcttctttatcactgggtataaatcaaccgcggctctgataaacaaacgttttgaataatgtctaaatacaaagatgatatgcatatcttggtgagcaccaaacaatgctcgacatcatgagaaccttatcccttggaaaaaagggtgctgtgctatctttttcttattaagtatgggcgtgaagcatcagaaggggtttcattggttaggcggttgagcaccgcaaccttcttggctcttttccacggagagtgagacacatgcaaatggagaaagcgactgagagtcgatcgatccgttaatatgaacactgctctggctctcgatggagtctcctcgatctcctggagccgacaattcaagagccagcccaactgtgatggaggagggaagaatcatctccgccaggtctagccaaacacaccaattaagtgattaacctgacagattagcttgatcggatccagtgtgcagacgcgtgctgcgcctcctcttgcctaggtctagttcttttctttttaacttcaaacttcacatttctcgtattttattaacacgattttcaaactattaaatagtatattttttaaaaaaaatattagattgtttgaaaaaaattaaataaatcattaattgctacttaattaattatatgctaatgagttttatcttttgcgtgtgctgaaaatctttctctaacttgagagactcagcttagaataattagatatcactgctcgatcaatggtttgggttagcagtaaaattatcatggcaaaatccatactgtaggtgagagtgtgagaccatgcatgaaacctccttgcaaatggaaaagaatatagaaaagaaagtagatattcgatgttcatgtacacatagaccagtggttagtaaaacactgccacataggtgtttaacggttcataggaataacacaatgattttcggtatcgatgtaaatcggaagccttgaaatagcttttatacgaggatctcaattaattagaaatgctcaaatacatgcatatttgttagatcctgcgaaatttatctgaagttatcactcgttctaattaattaaggcctccttgaaacctataaatattccatatatgattcatgtgcaaaacaaagttgcattcttacaaaaccttacaaaattaagccctttgattcaaaggaaaatcatagaaattttagagaattttatttttataggattttctatataaaattatttgaatcaaaggaataaaccctatgaatcctaccaaattcatatggaatgtctcattccaatgtaagttttgaaggaaatttaacaagaggtagaacctcatgaaaagttttatttgagtctttatctctcctcaaatttctatgcttttgtgtgtgtctattgttagaaatttggtcataattcggcatattttaatccaaaatattaagataatacatatgacatttgtaatttgagtagatctagtgaaattgctagatgtgtacaacatgagcatgcttaatatagaataagtatcaacatagacaagagaacgcaataatattgcgacctacagttataggaaacgaagaacgaacggtaatagtgaaacgttatacaccgagaatggccatccgctggagtttgagacagtattgcctccgttggtgttgacgggaggctcctcctccttgtcaccagtgttgttgttgtcgccggttgtcgacatgttggtgaagatgatgcagagcagtcgcgcttgaagcgctacccaaaaacatgatcgcccgcctacccgtgcaggttctcaagcggacggagtttcggaggcacctgctcgttccgatcacctgtgtgcacgggatgaacagaaccggggaaacagagagacatcacaggaacataaggagagtatcaccaagaaacaatagcagaaggaagacacaatctttgagagcctctgttttgctttatatatagagagagatctccattaccatacaaataaatctcatttattgtgaaggttaccacaaaataaatctcatttgttgtgaaggttaccacacaatgaatctttcatttgttgtgaaggttacaacaaataaatctctcatttgttctggatgttacaacacaatgaatctcttatttattgtggaggttacaacacaaataatttcatttgttaatggtgactttattctcgtctgttacaaaacggaagagcagcaggcaggctcggctcggtcggccgcctcgtctcgctacgcccacggccgaggccgactcggcacgcgcgcatgcgtgtggcagtccaaccatcacctcaaccggtcaacaagaaatccccaatatcactctatttaagttgaggttcttccacctaaattttcaatgcagtattattgtctctaacattacttgtgggctattaagattttaatttaattaaattgggcctagcccatttattccaacatccattgctcctaatcaaaaggtcattccggtgttttattatgttttacaatcctatattttatacttatattttgtcaaaattctatatttttgttccttcttttttattcctacaattgaaaggggcatagtgtattctaaattcctctggaaaatactcaggacacttggcaagccaatcgagtcacggttgtccaagttaaaaaaaaaaaaagagccatggttggaagctgccgtagaagatcatttggtggcaaggaaagacaactgccgcgaagactacagacaagcctcgccgtgtcagtcaactccaccacactcatgtctccacgtttattattctgcaaacgattttccctccccaatttatattattccactcaaagagtacattagtaatttcgaacgaattggtctggtctagtttgaagactatatagtgtgaaaaatgtgttaccttaagaaaaaagaacttcactctagctaatcgataatacgatttatgtgtcgcgctcaaaaaaaaaaaaaagcccatcaatgccctcatgtacgcattgcatgcatatgctgttggaaatatggttatatatcggtatattttaatccaaaatattaagacaataattatggcatgaacaatgtggggtgatctagtgataaaatcaaacataaacaggagcacgcttaagatagaataagcatcatcatcatacatagaacgcaattgcattgcgactaacagagatatcaaaaaccgaaataacagtagagagttataccctgtgaatgtccctccgctggattgtgaagcagagctgcctccattggtattgtcgatcggtgcacctggtgcggcagctcttgctctggctcccggcgcgccatctccaggtgcagatgcggcagacatggttgatgcagacgtacggtcgacgacgaacagaggacgaggagcagtcatgcggaagcactccccaaaaacctgatcacccgcctacccggtgcagatctcaggcgaaggcgtggttccggaggccctgctcgttccgatctctcgtgcgcgcaagcgatcagaaccggggatgtagacagaagcagcacaggcagcggcggcggcacgcggaggaggaagaaccagcgtttggaaaataaccgagaggatctgatcgggttcccactttccttatgggcgcaggagagagatccgcccgtggaggaagaaccagcgtttggaaaataaccgagaggatatgattaggttccctctttccttatgggcgcaggagagagatccgcccgttaccgcagtaacgacgcgatcaatgggtattgaatcgggttccctctttccttatgggcgtaggagagagatccgcctgttgccgcagtaacgacgcgatcaatgggtattgaatcgccctctttccttatgggcgcaggagagagatccgtccgttgccgcagtaacgacgcgatcaatgggtattgaatcgcctacccgttgtcgcaacgccacgtctcgccctggccggctcggctcagcgtgcgcgcacgcgtgtggctttccgatccccacctcaaccggtcaacagggagcctccaataactccctatttaagttgagatactcctcgtttaattcccaaggtggtaatattattcttaacatttattatgggccttttgagatttaatagaaaaatcaggcctagcccatttattctaacatatgcctccatccacctgttacacaatgcacacttgaaaatattttttttcctacttatatagtttagccgaaaaacatagctatacataaatacaagagaattttctatttggcctccaaagttgatcgattttctcattttccccacgaaattgattgtccctctaatgccttgcattcgtaacttttgtcctccatggctccatcttttattttgtttgttttccatcaagtaggtgggtaaaaatgacagctttgcctcagcttgttttatgcatgtcagtagtttttatttttcttttgggtgggattatactttgttattatggaccaacggttattgaatatttctcacgaacctaaatgttattttgagtaatgaagcgttatgaaaaaccctttgaatttgataaataacttttgagaacgaagggggagccaatttcgtaaggacaataggggaaccgatcaactttggagcacagataaagaattttctcttcgtactacttgagtgaattgcagtttagaccacccttttatcgttgaagtttcactttagattatcccatatattaatcaatatttcttcactttgagctaggtaattttatttttattgcatatcaataatcttgagtacacctgtccctgtaggttgatgaactctatcacctatgcatgtacctttactaaaggagaggctagacatgattagagaagtgagttggagtggtccataatgcaaaagtataaagttacctaccccaaagtactccctctatccgtgaatataagggatttttttttacaagaatcaaggaagtagtaaaataacatgtgatgagacaaaaggtgatggataaaagaataaagtagtataaagttagtaggtgggagaataaattagtataaaagtaaatgatggagaaataaactagtatataagttggtacatagaaaatatagtactgtcttgggtcttaaaaccccttatgttgtaggacaaacttgatggagaaaattccttatattatagggtgaatagccgaagtggtccttcaagtttcatctgaggctcagtttaatccttgatgtttcaatctttccatattagtcctttaagtttttattttagtttaaacttatccttgaaccaacaactctcttgataaataacacttatacccccatcattcacatatataagagaaaaattgtatgcttgatttttttatagataatgtatagtaaattatgtaaaacgaaaataaattatgtactagcaagtgtatacgatagcaattgcttaagtttcatgtgcacatgtagaaataatgggaagtatatctacaatgttatttattcatcttggttttatcctttttatatatagttgtatataaattaagggcaaaagggacattttctaatagaaatattgactaaaaatagccatatggcatgttaagtgggcccaaggatgatgtcaagccaaaacaaatatttagaggagctatgtggacaaaataaaaagtgaaggaccaaattgagccttcgataaaacttggaggactaaattagctattcaccctatattataggatggatggagtagaaagattagtgtacaatatacaagctgaaaatttgataataaaagttgagtcaaaatggaattcactctagatactttgacgaagagtatctcattactgttgtttcaatgtgccaaattggaatgtgatgcatactccctccgtccaaaaaaagacaaaccctggtttccgtgcccaacgtttgatcgtccgtcttatttgaaaaaattatgaaaaaaattaaaaagacaagtcacgcataaaatattaatcatgttttatcatctaacaataataaaaatacgaattataaaaaaaattatataagacagacagttaaagttggacacggaaactcaggatttgctttttgttaagacggagggagtacatgcgtggccaagagttgttaaacccgctgaccacaattccagaagcatatgaaagctgaaattgtccatgcatgccagccgagctaaccatgcatgggttgacagctatcgcgttttatgtacggaaaggtcgtctcaatttaattggcatacggatcatccaacaaacgggagtcgaaatgaaggccccatacaaatattttataccctctcgtatcgaatgtttaaacacatatataaagtattaaatataggttaaaaaaataaccaattgcacatattacaactaattttgcgagacgaattttttgagcctaattgctccatgatttgataatgtggtgctacagtaaacatttactaatgatggattaattaggcttaacaaattcgtctcacttgtttaataacggattctgtaagtagttttttattagtacccgaaaaccctatgcgatatcctactacctctgtcccaaaataagtgcagccatgagtttccatgtccgactttgatcgtccgtcttatttgaaaatttttttattaatattttattgttattaaattataaaacatgaatagtactttatgtgtgacttatttttttagtttttcaaaaaaaaaaagacgaacgattaaagttggacacagaaacttatgactgcacttattgtggaacggagaaagtactactcaatgtgatatacacccccgaaatttaaagggtaaattggaaacatgccattgtaattttacaaagtttgagatatgccatcggtatctcaatgatatataggacccacatgagtcaatgacatgtgggtcaggatagtatatcttaaattttgtaaaatttataatggcatggttccaattttcccaaatttaatttaaaagctaaggtaaggagtaggcatcgtgagagatatggtacgtaggcccatctggcctttctaccaaatcgccaaccacgcaccttgattccgtatcacgcgacctccagcggttgacacctgtgccgcttctctgtcgcaggatcactggtcagatcggattcgacgacggggaaggagacactcgtcgcgggcagcagcacccgacagaagcacgcggggacgtctccccgtcggcgccagctgccttgcaaagccaaaactaaatgggggcatttgcaaatttgccaccgattttttcaatattgcaaggatgccactcgaatgatagttttaatggtatttttgtaattttctagtgacagttttataataacgattcaagatagtgataaatttacaattgccccaaactaaattaccccaccaacccgtaaaacggagcaatcactagtatatgattaactaaatattaattttttaaaaaaagtaaattaatatgattttttaaaaaactttctataatattttaaaaatacaccccgttcagccgtttgaaaaatgtgtgtgaaaaatgaataagatgagttgagaagtaagagtggtaagttgggaaaggagaaagatcggtgaataactccactattccatcttttcaaaaaatacattagattgaaaacccaatgtacatagccatagtgctcgactattccacgcagttagacgtaaaatgtgtcaatttcctgttcttgttcatattaaatgcctttaaacttagcatttctttcttaagaaaaaaaacttggcatttctttcatgttagaaactagcagcatttactaaggggtaaactcgtctaaaatgtccagcactatatggaacgatatacattttcgtccattctgtaaaacgctacaacaataggaaatatgattaatgaaatattcctggaaaaatcctttgtcttgacgaaataaagtgtgcattatatttttgttcatagattcatgtcaccgcttgtgtcgggaatactatgtgtatcactcaagtaaaacaaatgttttgtaggaaacatgaatcaaccgcatgtgttgggaatacatattttttcaaagaagatgaatggtcaatcatatcccgttatatattaaaaagttggagggagcaactattataaagttaaaaatatattttttttgatttttttaaacttgaatataacctttttcatatatcgtttagtagttaaaatatgctcacaataaatgaggaagtagcccaatgcaacagctcttcaagctctgttcgatgcggcgattggatttagttagttattagaacatgattaattaagtgtaaacaattatattttaaaacataaatatatttatgtttttctttagaaaatttatatagaaagtttttacgtgaaatacgcactgttagctgtgagcttacggtaaacaagagatgaatcgaacctaatctcagtttataacacgatcttaagtatcctaaggaagatatatggcctgtttatattagtgttaaaatcaacctttccaaaatggtcgtcaatgtttggtaggatatgctaaatgtattgccgccaagattctctagggattaccaatctcaatcttcacatctatatctttatcaattatactaaaaattttatatgattcaaaattacaccaatctgaacaggctcatacatactttggtatgtcagggcttgtttggttcaataccctatcaaaatattggtagtgccaaaacctaggcaagttttggtactaccaatttttttggtagggtagagttatatttggtttgagaccaatttagaaccaagcattgagtagaatatagaaaatatcaaattgggcattggcaatgccaatgatttggcttcaaaccaaaatcaccagatacactgttcaaactaccaaagtattggtagggcacgtttttggcactaatccaaaacagccctcattctccccgtgttggaaactaactttatggagaaacgcaatgtttctaaaagcacgatcaacagagggagcaaacaacaccatcaaattccagcacgaccgagcaagtgttgattccaaatatatttttggaattgtttggcacaaatccatttaaactgagagtaaagttgagtggagctcagccaaacagtttcagctccacataaactaggagcggagctgggtgaagcgttatcacaaaatgaactagagatatggagctgggttttggctgctccacaacttcactccagacccaactcctagagccaaattttggagttggagttctaccaaacatgacttttttttaaaaaaaaccctcaaatataaaaatactcgagtctactctacctccatccagtttttaatttaaaccagcgctactactgctccagccacttcattcaaggccgtcgtgtatagaaccagctgattcggcaaaacaatgantcatccgg

SEQ ID NO: 28535 - DNA, 655 bp, Oryza sativa
accactagtggaaaattgtttggatggcttcaacagttcaattttcgcttatggacaggtaaatgtggcttcagccacctttcatttttctgctctactgggggttctgtaaagcaaattgactaatacaatcaaatttctactttgtaagactggtagtgggaagacttacacgatgtgggggccactgtctgccttgtccgacgatacggtcagcaaagagagggggctgactcctcgtgtttttgaactactgttttcacgcatcaaagaggtacgtcatgatttgctatatagcttcctttttttctgattgcaaattaaaggtccatatgtactggtaatttgcaggagcaagctaaacactccaattaacaactagtataccattgctgctgctctttccttgaggcaagtgctatttaagccttttaaatcacaataattatgaatctctcttgtgatagaaattcagaattactttttaagatatgcagatctacattgaacaaattactgatttgttggaccccgtgcaaagaaaccttcaggggaaatggggtttcaaaattaattaaaatacttcctaggctgcttctgttctgatacgtctcgtacattttcagattaagagagatgtttgtacttcttctgt

SEQ ID NO: 28536 - DNA, 656 bp, Oryza sativa
tgccctccggacgtggtgagccaccaaagtctccatgcatttaaagggggaatgacagggatgtcccccgtgtcaggcgggggacggcgctgggccccacccaaggacgcacagccaccttgcttccggttgaaggcacgaatggcggtctaatcgaggcagggggggttcctctcccctggaggagtaggtatggacggtgcatgtggtatccccttgaactataaaaggaggacctcgcccaccgaaaaaagtgacgactctcagatagttttgagttcgagaggaagaacggctagggtcccctccagagctcaagacatcctgtaaaagttgatcataatcccatgcacaggagtagggtattacgctcgatagcggcccgaacctgtataatcctttgtcttccacacagccccgagagcgatttagtaggtaaacgccaagccgaagtaggcccttgatcatcgcgctgtatcccccggtcgaactcacaaaggggggggggggtctcacgaccacccgctagagagggaagctcctcgacagaacccatcactggaatggaaagcgaccttaaaaaaatggggcccagttgcaaccatagaaaattggttatagaaaccgaagaactaataataaccccaaacattcaa

SEQ ID NO: 28537 - DNA, 648 bp, Oryza sativa
tggtcaaattgcattccccacatcaaagatgatagtgatgaggagatggagatttatgccaatgatgttaaaagccctgtaatttagaaacaagtcctcatttcctcacggggatgttaaacaagtagatgcaagtcaaacttgccagcaagcatccagaagggccttcaagtcattgaaagccatcggaatagtgttacttggaggagatcatcattaggtcttaacactagacttatggacgctcatctttcagttccagtttgcaaagttgatgtggctattcaaaccgaccccgaagaatctgaaccaagacaaaacactatggctctaattcctagcaatcagcctgaagcaactacagatggaaacagagaaatctctgattgcataaatctacagttagtaacagttgatggatcaataccctctaatgatctaaagcaacaggaacaagtctttaaagtaggttactaacttactatgcagatgtgtgcaccatttatctgcaatatcagcatgacaacttatgcaagggtttgttttattcctataggctgtggagaaggtccttgctggagccatcagacgagagatgttacgtgatgaacagtgtgcaaagcaagctgctgaaattcaacagctaaa

SEQ ID NO: 28538 - DNA, 686 bp, Oryza sativa
ccatttttttaagatgactttccattccagtgatgggttctgtcgaggagcaaccctctctagcgggtggtcgtgagacccccccccccctttgtgagttcgaccgggggatacagcgcgatgatcaagggcctacttcggcttggcgtttaactactaaatcgctctcggggctgtgtggaagacaaaggattatacaggttcgggccgctatcgagcgtaataccctactcctgtgcatgggattatgatcaacttttacaggatgtcttgagctctggaggggaccctagccgttcttcctctcgaactcaaaactatctgagagtcgtcacttttttcggtgggcgagggcctccttttatagttcaaggggataccacatgcaccgtgcatacctactcctccaggggagaggaacccaccctgccttgattagaccgccattctggcctttaaccggaagcaaagtgggtgtgcggtctttggtggggcccatgggcgtcccccgcctgaaacggggacattcctggcattcccctttaaagcatggagactttggtggctcaccacgtccgggggcacccctggcagattactgacaggaccgggcggacctgccccatttcgcctgacacaaggcgggacgtggggcgctttgcgccctcccaaaacctgggaccggg

SEQ ID NO: 28539 - DNA, 21850 bp, Oryza sativa
ccccttattagtcgtgccaaatttcaaccaagcattatctgtgtctttaaggcccctaaaaatccgctgaatagctttccagtgttctttacaaggattagccatgtatctactaaccaaactcatagcatgagataaatctagacgggagcaaaccatggcatacatcaaagaaccaacaacactagaatatggaactctagacatgtattctacatcctcatcagtactagcacattgtaaagctgataatttaaaatgaggtgcaatatgagtactaacaggctttgtatcatgcatgttaaaacgctgaagaaccttcttaatgtagctttgctgactaagaaataaccaaccggaatttctgtctctagtgatttccatacctagaattttcttagcagcatcaagatccttcatatcaaactcactactcaactgtttcttcaatgtagtgatttgttccttgctcttggcagcaatcagcatatcatcaacatataacagcaagtatataggtgacacattaacaaatttaatatacacacagctatcaaattcagatctcttgaagccatgtgacaacataaatgaatcaaaccttttataccattgacgaggagactgtttcaaaccatacaaagatcttttcaacttgcaaacataatcctccttaccaggcactatgaacccttctggctggtccatgtatatctcctcctcaagctctccatgtaaaaatgctgtcttcacatctaactgctcaagctcaagatcatgcatagcaacaatactgaagaatgtgcgaattgaactatgctttacaactagagagaacacatcattataatcaacaccagcaatttgactaaaaccttttgctactaaacttgccttaaacctcggagggtcgctagaagataaaccctcctttctcttgaagatctatttacaatgaacaggcttcttctgttttggcaagtgcacaagctcccatgtgtcattcttctcaagagactgcatctcctcctgcatagctgagatccacttctcacggtctccagaaacaacaacttcagtgtatgtggctagctcaagagtattctccacctgttcagcacaaataaaagcataataaaccatatcacattcctcaataaggcggactggagctccacaactcctctttgttctgcgatgtgcaataggttcatcttgtggctgcaaaacaggaggtgagtgctgaacagtatcattaacatcattaccaacaatttcagttttctgatcatccacgtgctccacctgcacgctaacatattgctgctcctcatcaaaaccacctggtatgacatctgtgggcaagctgtcattaaacataacagattcattgaaaacaacactcctgctcatgaatgtcttattagtttcaggattccataacttatatccttttactcctgaaccataaccaagaaacagacacttaatagctctaggctctaattttccattattaacatgagcataagcagtgcatccaaaaactctcaactgtgaataattagcaggcataccagaccatacctcaatgggagttttcttattaagtgagatagaaggcgacctgttgatcaagtagcaggcggttttagcagcctctgcccaaaaacgtttgttcatgcgggcgttggacagcatacaacgagccttggagatgatggttctgttcatgcgctcagccacaccattctgctgtggagtgtacgggatggtgtgatgcataacgatgccttccttcctacaataatcatcaaaagcatccgaacaaaatccaccaccattgtcagtgcgaagtacttttacctccttttcagtttgcctttttatcatgactttccactctttaaaagcagcaaatgtatcatctttatgtttcaggaaataaggccacacttttctagagtaatcatcaataatggtaagcatataacgagcaccaccaagagatggcttacgggaaggcccccacaaatcagcatgtacataatcaagtatacctttggtgcgatgaactaaggtattgaattttaccctcttgtgcttaccaaaaacacagtgctcacagaacttcatgttaccttgagtgcagccatccagcaggttctttttcatcaattctgccataccaagttcactcatatgtccaagacgcatatgccacatgttagtcttactaggttcatctttagaaacaacagcagcagtaacataaccatgtaatgtacttcctctaaggacatataagtttgcagaattcatatcaccaatcatataaacgagagaacctttcgatacctttacaactccacctgacccggagtatttgtatcttttggcatcaagtgtgctgagagagataaaatttctcgccatccttggtatgtgtctcacatctttcagcgtgcgtgtcatgccatcgtgtgtcttgatctgaacggagccaatgcccacgatctcacgtgggttatcatctcccatgcgcacaacatctccattctgcacagacttgtaagaactaaaccaatctctgttaatgcagatatgaaacgaacatgtagtatcaagtatccattcatcatgactagaaacacaaacaacaaaaacgacaagacaatctcctgaatcagagttatcagcactggtaacaacagaggccttaccatcagatttccttttctccttattctgcagcttccaacattcttcaatgaagtgatttttctttttgcaatacttacagaactttttacctctagacttagaacggcctctactctggttcttgtcacgatcattgctgtcgttgtaggttctctgctcagatctgcctctgacctgcaatgcttcgcccttagaggacgatgcatcagactgaaccatacctttcatcttctccctgttttggagcgcctcatagacttccgctagggttagttcactacggcttaaaagtatggtgtcacgaaaatttgcatatgaactaggcagtgagcataacagtaaaagacctaaatcttcatcatcaaactgtacctccatcgacactaggtcggcaacgatctccttgaagaccgatatgtggttcaatatagaaccactctcctgcaacttgtgcgagaacaacttcatcttgatatgcatcttactgattagatctttagacatgcagatcgattccagtttgagccaaagttctgcagcagtgttttccggcaacacttcttgcaaaatatcattagatagatgaagttggatcagcgacagagccttacgatctttccgcttctcctcagcagttcattcagtcgatttcttctccccgaagctttccagcgcctcatcaagatcccaagtttgcaccagaacagcccgcatcttgacttgccacagcgagaatcacgtcttgtagtctagcagcggtacatcatacttcatcgacgccatcgcgaaaccctaatgtgagaacaagctctgataccacttgttaggaaacgataagcgaacaaacgataaagaacaatagatcaatcacagaagacacgagatttaacgtgaaaaaccctcccaaaacaggagagaaaaaaccacgggcgccagccaacaaaatatcttcactatatctggggtgaggttacatcaccgcacggcggcttacaagaggtatatatatggtggaaccctacgcttcggcccaagccttccggcgacgggcctccgctccgctacggcagaagctggcctttattaagtgcaaatgaatttggatcacaactcaacactagctaccaacacaacacttttcattcaactgcttcccttaacttggagtattattgtttttcccattttatgatttttgcaattttctagtgggaattttgcaataacaattcaaaacggtgggtaaatttgcaaacgccccacagatataatacataatgcaaaggcttctcgtaagaattggacattaccaatatccatttggtggttcagatgcctgaaatggatggctatgaagcaacaatgcgcatccgcaaggaagaaagccggtatggaatttgcactccaatcatcgcattgacctctcattccatggaggacgatcttcagaaggcaattcatgccgggatgaatctacacatgacaaatccaatagaaaggaggacaatagttgaagctgttcatggtgtctgcaaaagacaataaccggtgttgcacaacacatcatatatatgtggcaatgagaaggatgagacaaatcacatcagcctaattgatgcagtatgtaggatgtaattacagattttatctttaagtgaaccttaatctcgaagcaaacttgaatggcctgggtcggcgtcgaacacatgatgaccgataaacagtgccggctagaaaagaacaggaaaaagcggagaagagaggggaagggcactctggtaaatttgcagattgcctgcattgaatttggattcaatattttgaactcctcttaagctcgatccataaatttgaaaattcaactaattaaatgaatattgatttttcaaatttattttaaaaaggaacttccataattttacaagatttgtgtaagagtgaattgcgtttatggccatatttgattactaaaatttcacttttgagcaccctttagctcttaatttttttcactttggacgatgctattttgccattgtttatactttgggccaccaaaatacttctcgagcacatcaattaccttaagcacatcggcatccgtatatcaacaatcttcccaacttacgtgtaaactattatttactattattgtacattagtccaaaatacaataaaggtagttttacctagtccaaagcaaaaatatttgttaaagggtgattcaaagtaaaactttagtaataaaaggtagatcaaagtgcaattaattgtttgaataatttatttgatttctccttaaatatgcacacttcagtttataattaaatcgaagtttaattcttgtaattgaataatatttattgaactggaagtttaattttagtttccacttgacttgcattcttctcaattcatttgaggctctcaaactaaacttcaaattgttttggttcttttgcaatcaaacagtcaaaaaatagtggcatggtgcaaaatgttttaataagtttgaaattcaatgtgttttcattattacctttctttaagtttgaatggggtacgattaataatttaattgctcaatctaacaaaatgcagtattcacattccaatcaaatcttaggtacataatctagtcaaataaccaatctgcaatagataactaagctaactgaacataacctaacttcttagaggtaagaggttgccgctgttctcataaaaggaaaaaaaaagttcggtccaataggccgcctagctaccatgacaaccgttgttgttcgtgggcctgactggctcatatccatcatgctctacatgggccttttcctttttgtgatatagtgatatctctgtgcgaaatacaaatgtgaaatgtttagaactaattttacttgatttccagtttgacccaagaactattgtctattactactgctgtctaggacactttcacagtttcactagcataccatcaaccaatgcatgctgttttcatatgtgatatgttatgagctgttttctgatctttccgagcatgtttgtagcccaaaatcccttccaacagtcttgctaacctgacattcttaaatattcaccttcgacaggcaaactgaattaactgtatgatatgcaaagctgaaatgtggtgacgaacttctgatggtcgccatttaactctggagagttaaaaattgtattgcttacactacataccatggcaaccttttttttttcctccgacttaacgtcccatttaactcctcagacattgcaaggtcaaattaccattctcaccccccccccccaaaaaaaaaactctactaaacataaggtaaaatgggcaaaactgttgcaaactttcccaaattaaatttggaaatatactattttttttctcagaaatatcctgtatgcacttaccgtggtctcgcacgatgatgacgccgggacttgcgaggctgcagacccctgtcgctaatcagtgattaattatcctaattagcgattaattaaatacaattaattaattgttctaatcaaaatatttaatcactaattattattaattaatcgctaatcatttgatttctaaaatgttgtcgatgttttgccatgtgagaccgctcagtcgtcgttacgcgagaccaccagcgttgtcacgctctcgttattctcgtgcaacggttcagtgatattgacggcatatttgtgttaaaaaaaattacatccaggttttttttaagaaaaaaataatgaacaatatatttttatgtacagtctacatgtttcacaaaactgtactacatgataagcaaattttaactgaactgcagatacacgccggtcttatcccttgggtccccaaatggtccagcagaacactccatcagcaacctccaattaaaatgtgacatccaaattttgtttccatcttacacaagatgccaagtcatacagtagagtagaaagaagactacaaaagcaagaaatgcagaagaacatgccctgcgaattgcaaattggtaagctctctgcttgctcgatctctggttggccctacactgccacacttggccaaatttcagcgtatgatgagttgatgccaaacatgttcgtgcaattttgtgtgaaatgattgtctgtttgtctctgaacatagcaacaaaaagaggctcgcgcaagcgcattgatttgcttggagcctgcctctgcatgtgatctatcagtgttccagatctctgagcttaggattagccatgcctagaagcaaacattgttggcactattagtctggtatgtacaaatgtttatatctcattattactttttagaaaaaaaaatgtatggccctaagggcccagcccaacacaaataattcaattcctatgaagatcgaatctattcttgtcaaaaccacgcaattttcattactatgttttgaacgaggaatttacgcatttatcagaatgaaaaatcatcagtatcggtttggtttatttatacatatggagctaatgtgatttgctatataaacaggtacaataattaggctgtgttcggtatttggagttaggaattctccctaaacatacgaaacgaggtggtccattagtgcgtgattaattaaatattagctattttttttaaaaaaggatcaatatgatttttcaaagcaactttcttatagaaattttttttgcaaaaaaaatatataatatttagtagtttgggaagtgtgcgcgcaaaaaacgagatagatgggttgggaaagctagcaaacaaacttatgttcggatgccccttttcccaacccctctccctcgtttccacgcgcacgcttttcaaactgctaaacgacgcttttcaaactgctaaacggtgtgttttttacaaaaagtttttatatgaaagttgcttaaagaatcaaattaatctatttttttaaaaaatagcaaatacttaattaatcacgtgctaatgtaccgctccgttttccgtgcatactgcgcttgttctcatccggctgtagcgaacacacccttagccttacgaatacactgagctattccttggaggaaaataaaaacctatgagctggaaaagaaagcaaaaatgtacccacgaattacctactaaaaagaagaagcatcgcacaccgacgatcattgtttgcactggtccacatgtcagctgctgcacacacagagattttgcctaccaagagaagcaaaaatgctcgcacgacatgaagcattctggtggcagaattcccaaaaaatttcacaatttgaccctttgcaaaaaaaaattttacaaataaaccatcaccaaaacttatttcaaaaataacccttggcgctgaacttagacacctcagcgccaaatagcgtggcgctgaatatacgttggcacgctgacttagtctcccatccgcggtggcacggcattcagcgccagttgacatggcgctaaggtgtctatattcagcgccaggtgatttggcgctgaccaaaagagtcatttttaaaataagttttggcagcggtttatttgtaaaaattttttttgcaaagggtcaaattgtgaaaatttcagcagaattccggtacaaagtcgcggggaagttatcatgaccacacagactgtacgggggagctagcgtatggttgatgcccaatcttgagcaggacacacccatgcagagagagggagagagagagagagcggccgtactccctccgtaaaagaaaagaaagataaaccttaagttttcgtatctaatgttttattgtccgtcttatatgaatttttttataactagtattttcattgttgttagatgataaaacatgattaatactttatgcgtgacttgtctttttaatttttttcatatttttttcaaataaaacagacgatcaaacgtttgacacggaaacccgaatttggttttttttaacggagcgagtacgttgaaacgagacgccatgttttggaccagaaatcatcatcgatcgctgcgctccctccctccctctctccagctgattcctccgcaatacacggaggcgcccacgtttggcctctggctgcttcaacacagctacgcggaatggagtggaccatgagcagctgcagttcaagttctctccctatcccacagccagcatgattttgataaatgaatacaaccaggaacaacaaactaaaaactactactctagaaataggatgattttgataatccggtcttgattagtgtacggtacgtttaaatttaaaagttcagcgcttatttttattggagtataattaaagtgaattattcatcttttctcatcaatttatcctcaccagtttagacttttaggttaaattgatcattgtatgcaactaaatatgatatcagaattaaaggtctagagtttgaatcatgtctagtgtgcaattaaataaaaattgatgtccacttctattccacgctaaagacttgagggagcctcgcgtgagggggagtgttggaatataaagggaattggccgtatttcctcattagcttagttttttgggttgaaatgatcggtttatgcaattttgtcaatcagacttcaataaaactttaaggctgttgaatgtttttttcttatatataatataatagataccaagtcatattttttcaagaaagtaatggttaaaaaagaatgtgcaaaagagagtactatgttttttttaacgatccagtacaaaattatgctaattttattggtgcccacgaatattatgcacacaggtgtgtttatagtgagatcaaggatgcaccgctagtttttttttgtctcttatggcgtccacaatatggaattttttgtctcttatggcgtccacaatatggaaatacagagggtcttaaacctcccaagtagtctttatacattgtacaagctagtggtccttataggagtcttttggatgagctatccttatgattaaggcctggccatatgaaataaaaagcttatcattcatctctctctcgtggaactctcctctctccctcaccaatctgttgcttgccgccaccgggaaagagaggatggcatccgcggaggaggctgccaaagttccacccacgagcatcgtctccccagccaccaaaggaccaccttagagtgccaccgcagtccacagttgtggtcgtggattcgcgccagccgccaccgcagccacaacctccctaagaggttgtaatcaggggaaaaacataccaccaccaccacatgttagcaattccaaacatacccctagacaaaagaactagcaccaagccagccgccactatccgtgactgaatgccgctagtcttgcaaacgccctggcgaacactagctccaaaacagaagatcgtcaacgggctcccggtcatcctcacggagaaagcttggggagggagaggacaagagagaagaacacccacttgtccctcacgccaacctggtgacgacaactgacaaaacgccaaaaaccaaattgagagaagcctgtgacggcgggaagatgagatctcaaagacgatgccttcaaggagcatgatgctcaagacgccaccgtcatccgtccaggaggtatgatgctcaagacaccaccgtcatccgtccaaaggactaggttttctcccggagaatctcccaaggaggaagagggtgtcagcttgacagcgccccaaaggggtgaaacgctgctagatgccgacactgccagcctagagaactccaagcaaggcgttcgcctacagttcactctattcaacatatcatcaacaacctaacacaaagccacccaagcggtctccgatagcacgcagtcttgctgcgtcagctatcttgcgtcggtcaaccaccttcggcaccttcggttgtgccctgctagccccaccgtccagctcctcgtggcatcagcgaccgcctcactctgtagcctcctagtcatggcctcgcgcgccgtcggtgtgcgtgccactagcatcacgcaccgccggcctccacctcgcacaccattagcctactccttgcttgcttgttgcgctggccacccataggcgtcgcagcccaggccacgccctcgcacgctgcgccaccgccatcatgttgtctttcatgttgccacgccaccccttatcgcagtgcagccctggtttctactctcctcctcaccgccgcttaaacttgtcggctggggcaccagaacgatctggcagtgaggggactaggtctagccccaatgatgccaaatctagccaccgatgactgtcacttaaagctctccctccggtcttagccaccactggagaaaccgtttgtaatcccggttgggaacccctgtagtcccggttttccaaccggggctacgaatctgggactaaagatgcccatctttagttccgggtgaaataatcgggagtaaagttgtatctttagtcccagttgatgttaccaaccgggaataacgagagggtagcggcagttccggttggtccacttttcttttttttttgattgtttctttgctacttgccagagttaatccctgtattttctcccaaatcgagtgtcatgtatatccccaaatcaaaccccaaatcctcaaatcattgtaacatcctaaataattcacatcacaaatcctaagttacttttacacacaaatcaaatacatcacaaatcctaaaaaattacacaaaaatcaaatacatcacagattatacatctcagatccatgcaataaatcacaaattctaaacaaagagattatacatctcggtgaatcataaattatcaaaaaaaaagaaaggctggcgcgttgccacccgccacggccaccgcttgccacggccagcgcctgccgcctgcggccccgtgcacggccccgccgggtgttgccccactgcctgccaccgcgcgcgaccccgtcggctgccggatgggaggggaggagggggaggagaggggaggggaggaggatgaaggggaggaaggggaggaggaggaggaggagtaaggggacctgaggggtaggaggagaggggaatgatccgatcttatctaaatatctcggtgaggaggaaagtcttgtctgatacttaaccgatcagatatgggagagaaatatttactcccagttggtgttaccaatcgggattaaagatctaaataatctttacttcgggttggtactatcaaccaggaaaaaagtggtgatctttagtcccggttggtagttattaaccaggactaaagattctcggcccctgacaagcctctgacaaattttttaaccgagactaaaaacaatctttaatcccggttcttattagaaccgagactattgtgaaaattagtcgacccagcaaagattatttcttcaatagtggcagagccctaggccgacatgaccatgagaggaggaaaagagcccctccggtggccgctcagtggcggggtagaggggaggaggggaaaggggtggggacagtgctcgcctagtcgccacctgtactgccctgcggccgtgcgacatgagcatattactatttgagtattggaatttaaaatatccaagaaacacacagtaacatcccacatgattaacatgcatgcaaagatgatgtaccgatggccgtttgcaccaatatctctgaaaacatcattgatgctgcaccctggtcgcggagctatcagcctatcactacatagaccatccagttggaattgcgtacaagggacggcaaattggattatcaggcatgccaagtgcagatgctggttaaagtgtgctgaaaggggtgaaaaaatcgaatatctcaatcgatcagttggtgagtagggccgggcgccgttgctgacttgccgtgatacagaaatattcctgctttacttttttccgaagggaaagaaagccaagaatcaaatggccaaatgaaccagcttgctataacaccctatatctcgtttgaagcctataattgttatggtgttggcccatatatataatgcagttgtcatgcaatggtggtgatttagtacaacattggaaatttaagaggatgatcagggtctctgcttataaatcaaaggatgattatatgataatctaaagcgttaagtcaccattcaaaaatgattatatgaccactactagaaaaacgatttttcatggcgttggtctatgattttcgctggcagaaaaatgccaaaaccacaagcaaggtcgtaatgagggaggtggggggcaccgaccgccagcgaaaatagatcttcgctggcagccacgttataccagccgccagcaaagatatgttcattttcactggcggtcacttaggtgcgccaccaactaaaatagataatttttgctggcgcttgggttatatagtccggtagggaagatacaattatttttgctggcggcccacttaagtaaccgccagcaaaaaccgattttcgctggcggtagaaggaccaccatctattaaaaaaattccacacaccgcccatgctccttatccacccacctttccagaataaaaatatctccacctctcctcttccccctccagatctagatcctctccaacaccctcatctcttctcctcctcccctccatagatccacggcgttggcgtcctctcctcctaggcggcggcggtggcggctccgttagctgtgcacggcggcgacggaaggtggtcgtcagggggcgtggcgacagcgactgcaacaggatgtgggggcgcggcgacagcgacgggaggagctatcgtgggggcacaacgacgacaggggcgcggcaagcttcttcttctccccctccccctccccctcccaaagtcttgctggtggctgggctttctagatcggggcttggtacggcagaaggagctcggtggcggtgatgctcggcgacggggctcacacatccggtgttgcgtggtcggcgacggcgacgacgtcctccttcctctctactgttaatgatgtttttctctttttttttcatgttcaaaatgcttgtatgatgtgttcacttccatgttaattgaatctagtgaactctggatgaggatttgaatcgatgctcgaaaatttggatgtggatttgaatctgtacatgctgcgaaaatatgatatattttcttttttttttggcaaaaagagattttggggattaattttttttatggaaaatcattttgactggcggcccacataatgaagccgccagcgaagactattttttgctagcagagcacataaggcagccgccatcgaagactattttcgctagcggcccacatatggcagccgccagtgaagacgattttcgctagcggttgtctttagctggccgccagcgaaaagttatctcctcttgcagtttagtgccgtcagcgaagatgctacattttcactggcctttgctttgtggtggcgctaaatgtcgccagcgaagacccaaaatagccaccacgaaatatggtttttgtagtagtggacaatataaaccgttaaagcaccttttttttaagtgtgttacgttcgtcttaacaagttaccatgcataccaaaagtcatgcgttctctacaagggattaacaataatagaaaaaaatatatcctccagttgatgcatatgttttattaattactccctccatttcaggtagtaacaggggtggagctaaagtcattaggggttccaggaacccggtgaaaaaaatatgtaactaaactttacctattttcaccatgtgtgcaccatcctcaatataaatttaggcacccgtatcaacttaaactcgatataaagtagagtaaattaaacaagtggcaccccctccatttcgtttagctccgcccctgtgcactaaacatgaagatgtgatttgatatttttatgacaaactttttttgaggaaaactacggcgggtttgaacaccagtctgaactttattcatttggttaaaaaaaagaactttacaaagggggaggtacagagggacggggggaagaaactaaaaattagaggttaattacagaaagatttagcgcccaagagtgaagttgttgtttgcctacaacgtcgttacatcggtttgaccacaattcgatatcgttggcgcagcgacgaagaactatcgagttggtttcgtcaatggagttgaagatcttcttgttgcggcgctatttgtcccgcgcaatgattaaaaactacgattatcccgtgcaactttgtgtatgctagataaaagtataattggatttggtatatatatacaacttctatcatattttattcatagatacaaatgtcttttctatataatatttttatatgtacaacgatttcatgtataactcttagcttctgttttcatgtatatacaccatgccattgaatattctcgacattttggtttttcttatcgcattttcctttcgtatcatatactgcacttcagattctctttttgaaatcaatattcactccctgaaagaaccttcctgaaatatcagtcaaaagaagatgtgcaatgcaggaagtctgatgaattcttctctgcatccactacatgccaacgacacctcactgcctcatcagattcttcctaatctgaactgcttcttctaatcataaaagataaaaagaaaagatcacatgatatatggatcgagatcagggacacagaatcaatatgcatcatgcaatgcaagaatatacatctcaataattggacatgcaagccggcctagctgtagctaggagatccatccaatgcatccatgcaaatccagccgtttaccatgtcgcccctgccacgatctcggccgctaatttcgcgccggagacagtagagaatttcttggggctctaaaaccctgcctctctagaagcacagctaaatgttattcttattccaacgatgcacatagatgatccatatatataccacatatatatatgattaattagattatcaccaagatcagattcgtctttcgatgcttccatggtactatttgattcagaaatagcaatttgcaatacaaaatgtgtggctacgctggctgtacatgttagcctacatacgagaatctgaaagtacatacatgatcagaacataaacattaattactactgctgctaattaatttggttggacttagcagtactgaattttcacacctgtggtactgtgtgagaatagacccagagatcatctgttgtaatgtggatgaacaatatagctacaacctacaaggaaaataagtttacaacagtgtttgaatgcgctttgctgtagcaaattcagtgcagcaacaatgaccaattctaaggcacatcgaaaatattgaggccttcaatattagatctatactaacattcaatctcaatctttacagctaacaaagtgaaattaatgaacattgatcactaactaagtattaaccaaacctagcaactctcgtgagtctgcaggatgatgaagtttgtagatctgtcgtgtacacagtgtgtatactgtatatccagcatgacacgacgaagcagttacgtataattaagcgagatcgacaaaaaatgcagacatgacgcaataacgcatatcccaattaaatatacgcgcacacgcatcagttaaaattaatttaatgcccatcagaaagcaactgcatcatgtgcacactaattaagattcgaaattaatctgcatatatatcactaattgatatgaattgaaatttgagatcgactggcacgtgcgtgccaatgccaattaatggtcctttgcttaattatattagctgtgtacgtacgtacgcacgcactgtacgtataactgtgtattgcccatccagatttttaatttgtcgttcagttttgtgcgaatctcgtggtgtctgtatatgtttgtcgaggtgtcgacactactctgacaaataacagtgtttagcttcagcttgttcctggtccttcccgtgttgtgtgtttggattaattggtaaacagtgatacgcaattatgcattgcgattcaaatccaacggaaacagagtgtttagtggtacgcatcgaaggtagattgatccaaatgtaccgctaattgaaattcttggaagagttcaagggggtcgtagtcgtgcatgtcactgatgacaggcacaccgtacccaatgtttttgtaacttgttcacaaaaatacattggatgataacatagtttatattaaaatatgacgagtaatttgcttttcttgacgagtacatgttcatttgaacaacgattgatcaaaccattatttaaaaaaaccaaaaacaaatcatgaataaaacttttatatttatgttactagcggtttcaaagctaatgctagaaagtggactagcataaatttaattttggttactactgataagctaacaaacggacaaaggcagtggcgttcctagagtatactatctggggttctaggcaaggtttaatttctcgttttcggtgtttctatcgggcggtgccgatatagcgaaatttcagaaatttcaatccgaaatttctaaaatttgaatattaccaaaattcatgaaaaaataaaaaaattgaaaattttgatcaaaataatattgtatcggaggggtcagagaaatttcagtccgaaatgtcaaaccctggtcctaggatctcggctagaattttaatatttagttgttttaacctatatgaactatattattaggtaattaaaaattattgtattatatgtgttatgatatgtatagaatcgccggtaaattttgtcctaggttggccactagacaaaggctaagaactaccaaaataatttacatcagagatatggtagtacagtaaaatcattcaaatatgacatttctttgtaatatttaaaggtcgatacataaaacctctagtcaagagtagagcagctagggctgaagccctattcctaactcaaaataaaaataaatattgcaactgcactatagaattttaaaacttaaaacataaaaaataaaattatgtaaattatactaattgagcttttgtcttggaaacgtaacgtacgttctggttccgtcactgcgtgagcaaattaaatacagtgaatgcaataaggaggacaaaaaaaacgtgtccgtggcaacgtcacgtgtgtagagcaaaacatacatacatggccgttcttttccctttttcccgtaatcccgtgtagcacccgtgcacggctgcatcatcatgcatgcatatccggtggccgggtttgccatataattccccctcccctgcgcgcacgccgcgtggcccacggctcgacggatatcgcggcctcgatcggcagggccacgcgagcgcaacggtggcgcgaggagggcggcgtacgtcctcctcctcgcctcccgctccgccgccccctgcgtggtagcgcgaagcggacggataacgatcggtaaccgcgcgcgcgagcgccccgcggccgcccatgtgacccggccgacgacgtctcacgatcgatcgagtgagtagtagcgcgcgtgcgcgtgtgtgctgtaggcaaatactatcgctgaacggaacgaacgatagacaagaaaatctgagatatccatccaactcgggtacagcgaacacacggtcgatcgtttctctgcccgccctctttcccgtgtgtaggccacatgcagtagttggggttgggcgtccgtccaatcgtccatgcgtacacgtacgcccgggagaaatgcatatgcacagaagtgattgtacataaatggccatctcatcttgtcacacacatgtatatatacgattcttcttttgagaaacatgcattcttatagcctaggtgcttaattatgttgaaatcggactccattttccttaggagggggaggtgcttgtattagaaaagacagacgattaattctctcagcaactctgtattaattaattagcacacactactagaaagggattttactagacagccaaaagagattttcgtatgcgggtctttggctcgtctgcgcccagatgtatgcgaaaattattattttttcatgcaggtagcgcaaccgcatgtgaacgggacagtcaccttagccaaccgcacgagaaaatagtttcggcaaaaaaaaaacaaatccaaaaaagaaataggctaaaaccctagccattgaagtagtcctctctattagtgactcgctcccaccgccatcacagccgatcgttgtcgtcgttgccgccgttgcggggaggatcgccggatcaattgggggggggggggtggggggtgaggagggccgccgcaatttattaattatttgtttatttcaattgtagcaagtcacactttcttacttgatgggtctacatgtcatacacttattttttttaagctaaacattatcatatctgtggccaacaactttacgtggcatatgccaccctaatgacaaattgagttggggtaatatcaggcaagaaccaaacataccctaattaattaccgcgccgccccttgtgcgcaagtagtgcttgctacgattggaacaaatccttgtgcgcatggtgtttgtgctaccccactacagtatatgttagggttagctgcctgttgtgcgagtgtggccgctgccctgtccctgtccctgcgcgatcgatatgatgcagctatgcagctgcaggttgctcgatcgattcgatttcttcctttttctctgcatgctctgcacttccgcaggcccgggatgcatgcagtttcgctgcaaaccgatagagcagcatgggcgtgcacccacgtcgtatatatgtatattcatcattgtttgtttcttcatagatcgaccaattcatagccaaaggttcaatattaattgtgaaaagccaaaataatttcttttaaggggtggttcaaaatcaccgaaatttcagatcaatattttagcccctccccgaaaaattttaaatttgcaaagataggtgtggacaggggcgaatccaggataaatgattgtcggggtcattactaaccagggtctatgttttcaaccaaaacggattgaaaacaacgcaatttcgatgttccaacttgggacaaaagtagattttgagtgaaatttagaatagtttttcaagaattcaaatttgaaattgtaaaattaaaccaaattaataaaaaaacatcaaattttggtaaaaaaaagccatattgctatatttggaatctaattttaaatcgaattggtgaaccctgatacaatctgggtgtgttcagacctagctacgggatctgaacccttccctcccagcacgcaaaatagagtgagattaccatatgattaattaagcattattagcttataaaaaacttgaaagacaatagattaatatggtttttaaaacaatttcctatagaaattatttttctagggaatttgaaaagttacgagccgttggccttatgcatggtctcaaatctcaaaaactcaaagtatatgcatattcggctcacgtataatcataaatgctaggtaattttctatttgctgttgctagtatcgtttctagttgtcaattggaatttaacacaacaatcaataattaatgtcaccggggtctaatatttgttttcaccggggtcatagctggtaaaataaagaggatacgagaggttaaaataaaatcatcggggtctactgaccccggtaattgattgtaccttcgtccctgggtggggacgtacgtgcatgcgttttatccagctgtggggattttacagactcatgtatgatagtgttggggcaacgtatatatcaattaatcaatatatatggctaaacagattgagtgaacgatcgattgtttttaatttccgggttgacctaggtccatcttgtttataacccagaaacagtactccagctccaacaacaacctggccaaatctaattgatttttggatgcatgcatacagggaccgcacctaagatatttataattataatagctggtaattaatcgatggatggaaatcgaatccttgcattgcatcgtgttgaatgtggtgcactagtatgagtatgacactactttgcaaggtggcttcggtgtagctttgctttgggctatgaggtgtggatggttccaaaaagtaggccctgcacttctattcaaaaaaaaagtaggccctgcactgttttgatcggatccttttcctacaatattttttaaaaaaataaaaagccttgattggcattactttttatgagaaaagctaaaatgtgatcttaagaataattttagatatgtactttctgttatatatcttatccatcatgaaaataagactaaacaataaaacaaacaaagtggagaagcagaaggttataaacataatttaaaacaaagactaacatttgaaataatatagtacttttttttaaaaaaaataccacaccaaacagactcttattgcttgtagcgggcttctgcttgtttcagcgccagcttgtaaacctatgcattttaaaccttttgttgagactgatcggcaccatttctttcaaaccgactctagctagctagttgagtgtgtatgtaatggcatgctgcctacggtttcctgtaggggttatttgactatgagattttaaaaaaaacaattgttattaaagaaattatttttaataacacataatttccctctagatttggagccatcagtatctcccatatctccgattcaatattcccttttagtcttcaaaacacaagtttccttttaaaagaacatttttctagttcatttttcaagcagaaattcactacacactgtccacttccatcacaatgggcaacacaaataaaaaaaaagattgtagtatggaccgtttgccgttgcaactcatatcatgtagcctttttggcgccgaaaggctgcgttcactaagcggatagatcttctgtgaatcattctcttgtcagcagatagattgctgctgcggcctgcaaacgcctgaatgcatgcttattgcaggaaacataaag

SEQ ID NO: 28540 - DNA, 23975 bp, Oryza sativa
  unsure (1)..(23975): unsure at all n locations
tccatatgtcctatagaatataataacttttttatgttagaaacaaatattcaacaaatatatatgtggaattaaatagggaagattaattgcaattggctgagaagagaaaatatgtgaagaaactaaacaggagacggttgtgaacttgtgattaattggttaagatgaatgaatagatagaaaaattgctatatttattttaggacaaattttaatgttaaaagttcctatattattttaggatattttttttaatgttaagagttactaaaaaccgagcgaatatttctcttaagctaaagtgaagtaattttgtataagtggctaggtaacttatgctagtttttttccttctataattgtttgaagtgaaattaagctacatcagtgcattttgaggggaaaagcacatagctagagcaatcatgttgacacttgacagctcaggccctcaatgaaaactacagtagttgatgccgtttcatcccaacttgaaccactgtcactttatatctgtcttttgcttatgtccatagcacttcaactaactcattactcatgggaatcgtgttaattatcaaaagagcttgacccaccagtggaagtctcacataataatgtactttattcgacgagaataaatgggtttcatttacttccgatttttcattgagaaatacataaggtatgtaatcttctcacctgtatgtcggaaaaaattgaccttaacttgtcaaatacaataatcttctgtttcttctgcatattctccaatatctcaattgtgttccatatgggtcttcctagggatgtctaattagatgaggatataaatgaaaattttatatatatagttcaaatttaaactaaatcctacagttttagatccatctttactttcttcggaacaagccccaatgagaaaagaattattggtgagcatggtttacttataaaccttaaacaccccaaattcatgtgattgaatcaagacaaatttcagaataacccaaaagcgatttgcaaatttttccaattcaaacaaatgaagaatcatatccatgcatattttctagaaacgaaattctcatgcagctagctagctagctagctggaagaacaattaaatataaccatcaataagcagttagagtgacagcaacctctgtgcctgcaaacaaaacggttggaaattaacccaacttgcagatagcccactccatcagtgcatgggcagtgtgggtcatgccaactgaaaccaaacctacggcacatgcagttcagtgcacagcatatgggacaatgcatcttagagattgtagctagtataggatgtaaagaagaaaaacaaatctgaaaatggtagcagcttcagaattctcaccaattgggatgcacaaaatgtatggcttgtttgatgttgtaacagatcaaggcactgcagagcagtgactcaacacctacctaacacgcatgtttgttgctccttacagtgtcgttttcctgctggtccagcgcacgcacaaacctgtggctttatttttctttctacttcagtctattggtataaaccgaactaatcgaccatgccatacaagaaatgtgaagctctatttaaaatgtagaagtattaacatatggtgggtgtatttaaagtttgatttggtgtgaaattctaacgaatgacagactcgaaacatgtaacaagttctatgcgagaaatatgaagcttcattcgaaatgtaggagtattgacatgtagtgggtgtatttaaagtttgattagctgtgaaattcttagggatcacatactcgagacatgttacttggaactgttagaactggaacagtagttgattggataaacttggtttgcacatggtgacaacgagaaagtaaagggtaagaaacaataggatgaaatgatactcagccattgaccaacatgatatagattgacatcagattcagatgcaatgaagaggttgtactacatctcagccctggtaagtcaacaagatacagatacaacataaataatctaacttaaccttgtgcaggtcaacaaacctcacaaatgtcattatattgctggtaaaatattcacacatccagatgctctaatccataacactaatgaaaaggttctccttctagttaaagcatcgttaaatgaaaagtaaacaaccatgcttgttcaattcataacattaatggagtgaaagaatctgaagcataagtgaaacataaacagccatattcagtttaattgcaaataatgattactgaaatatgttgtttgaatatgtgaaaataatagaaccaaaagtaactaatgactagcaatgctctttgggtttatgaacttttgagtattaatatgtagtactccctccttgtgaaaatctgagacctatttctttttcatcaaaaccaagaagcaattaactcactcaccatgtggcaaaaccaatgaacatgtaatcaataagtactagaatagcttcttggtttccgatcaacaatttaatttagcacatagtgactacaaataggactcggatttttggagaaaccaaaaatgaaatatgtctcatattttttgaaggagggagtacatctcaacggagtatttttcgttccactggtcataaatatttaataccttatgcatgagaagattcagttaaagttttgaactttaaacgtcgattttttattataataattttatcatcttccagtggtatttttcaaggtgaccgtatgcatgctattttcttttaaacttagcattcgaaaaattttatatggtcaaaattttaaaaatttaaccaaatcttgttatatgatagaagaggagagtagctaaccagcgacaatgagaatgattaaggagaactgtggtatgatgagtaacactcaaccaatatgatatatcaagatcggatcaaaaaccagattcagatgcaatgaagttgaacatctcgattgatcggttctaggtaagtcaacaaggtagacatactatcatacacaatgtcgtttctcgttcagatgatgcacctcgtgcagggcaacaatctcactatgccgtccctggtaaaatattgatacatccagaaactctgatccatacatcctacagttaaaaaaaaaaactgaagcctgcatccagtgagagcagtaaacaatcatgttcattttgactccaagcgatgcctgaaatatgttgtatgaataagcgaaaattaagaataggagcaagagcaagttaccatagttgagctttttttttttcatctttctctaccactaaaacacactgaccaaaatagtttcctttttactcgaaaaactaaaatgtgacgccgaatttgcttggaattatccaaattaaagaactactgattcttaaaaataatacccctgctaccctagcaggagcaatctgtcaccatttttaattaatctaaacatagcactagaagacttaatctaattaaactatagctcgcgattttgtctgatcgatgcagagattagtaacttaattgcaccacggaatgcgggaaacgatcaatgtggccgtggaaatcaagggctttggggctcgaaatcagatggggattctgaggaaagtccatgcgattgctcttggaaaactgttaagaattgtttttgaggcgtctggagaacagtagtaaaacaaacggggacggctaattatgtcggtgaggtactgtcaacagtgaattatatattttctggggattagtcgcttcccgtcgagtacgtgtcactgtgtcagcctaattcacccgtttgactcattaattagaccgggttttttgtgattaattttcagttctgcatttttgctgctgctgatatattagatggaacggcaatggcaggtctgctatgttgcgttgtgcaactaaaactctcttttaactctcttttcttttaatatactaacgtgcaattcttttgcgcgtttgaaaaaaaatattttttttagataatggaatacatatcccggcctttacttaaaagagctacagccaattattataaagaagcgtttgaagaacatagtgtaattagatggaatctaattaaggtggtgtgcaatttcataatttcattggatatatatatttcttgcaattttaacggtgtcctactctctttgtccataacaatgaagcataattctgaacggaggttgatcaaatctttttaactttaaccatttataataaaaaataataacaaaaaaaataaagattgacagtataaaacgatgttacgtgaaacaaatcatcataataacatacatctctttctatttaaaataatttatctttaagatattatatatcaaagtagtatattgagcatcatatttatgtcatgaattgcttatattcgtggaggcacgcagcagataatatcacacaaaatggctgccgtaacggtcgtgcaagctgaaaagttatcactaaattagtggctttatggccctatttgtcagcttttgtagtggatttatttttttttcgctctaggtcatacgagtacatcctagagatctgctaacgcaccaattttctggttttgataattacttgtaccacaaatactccctccgtattttaatttatgacgcctttgacttttcgatcaacgtttgaccattcattttattcaaaatttttgtgcaaatatgaaaatatttatgtcatgcttaaagaatatttgatgatgaatcaagtcacaataaaataaatgttaattacataaattttttgaataagacgaagggtcaaacgtttgacaaaaaaatcaacagtatcatacattaaaatatggaggtagtatataatggggtcactaatcatcattaccattgcttcctttatgtgatgtactaatatgcatttcttttccatcattttatcactaccctccttttttagtggtagtggtacaccatcaccatccctctctaatccaatacatacaaaagcactaattaaatgactgctggtactacataacaacagaacaacgatcagattaactggacagattatcacatcaaccaaatccaaatcacccatcacaagttgcagttattgagccgttgagggagttaaaaaatagtgttaaccctgtcgcaaaacaaaaaataaaaagttgttatctcttggtgggcactgcagtgcatttgcagctgctttgtctgcttctaccaaccggaatctccaacccagagatgcagagcacgctccctggccctatccactacaccatcaccttttgttcagccaacaaatcaataattaactaacaattaacaacagtaattaaagagacgtgtagtcttcagagaaacaatattcagagacataaaattgttcacatgatcatttttagtcccggttctttttaagtaccagaactattgtggttttgggttgaccgaacaaagatagttttccagtagtgtgatgtagttcatttgaagaaataatttaggaacttcagagagactgaatttgtggatgtgcagaggtaggtataggaaggcgtcagttcgcatggcagtagttagtactcgattacacgatcggagatacgttagttgtgggcatgaatcggatcgtgtaggatggggatagggagggggatgaacaagataagatgagatggaagatggccaaaatctcaataatttccctcagcagcgcctatctggggcacatgttagtgttagtgctgcccctctcctgcactcttttttttattttttatttttttggttctaagatgcttctctccctgttctaatactattactaccacacacatggttcctccttccctttgactccaccatgctgcccctgcacaaactgaaaaaacatagagagaaaaccaaacattggaaaaaaatataatttatccataaatgtacatatatatgtttttcttccaacagtcatgatatagttttgcttgtcccctcaacggctagtagattattattgttgttattgttagcaagataatacaccacctgtcagtcatagctgtccccaggtccaggtgaacccaaaaaaaaaaaagaaaaaaaaaaccactaagcaagcaaggcatgtgtgccatgtcttttgctatgcttcccatcaaagccaccttaacaacaaacctcccacacctccattctccatgtaccctcccataccataccatactcctccatagcccatagcccatccacaaacaaatagagagagaaatatgttagagagagagagagagaggaattgtttattaaggggttcattagtggacataattagtaccaccttgtaagtagtaaaccatgtgccctactatataacaatcccctaagcagcactgcttttagttgtcccctcctcatttgcttcttcttcttcttcctcctctttgtttcacacttgtggtttgtggttgccaactttgtgagcgaccatggagatgaggagggtggcggtgctggggttggtgtggctggcggcggcggcgacggtggccatggcggatccgctgccgtcgtactacaacgcgatattcagcttcggcgactccttctccgacacgggcaacttcgtcatcatcaactccggcaagctccccaacatgcccaagttccctccgccgtacgcccgctgctccaacggccgcctcgtcatcgacttcctcggtacgtcgccggtttaccggccatgatcatcatcatcatcatcatctcctcgatcgaatgcgagtggtttgattcggttggatttgcagctgaggcgttcgggctgccgctgctgccgccgtcggcgaacaagggcaccaacttcagccagggcgccaacttcgccgtcatgggcgccaccgccctcgacctcaaatacttcaaggacaacaatgtctggagcatccctcctttcaacacctccatgaacgtccagctccagtggttcgacgaggtcaagcaaaccatctgctcctcccctcaaggtccgtccatctccaattctccgcatcgccattgccatcgccgccgtcgatctaattgaattcaagaacatgtaaataaatacagagtgcagggagttcttctccaaggcgctgttcgtgttcggcgagttcggaggcaacgactacagcttcgcgtggaaggcggagtggagcctggagaaggtgaagacgatggtgcccagcgtggtggcctccatggcggggggcatcgagcggctgctcgacgagggcgcgcgccacgtcgtcgtgccggggaacctccccgccggctgcatcccgatcacgctcaccatgtacgccaccgaggaccgcagcgagtacgacccccgcaccggctgcctcaagaagtacaacagcgtcgcgctctaccacaacgccatgctccgcatcgccctcgaccagctccagcgccgccaccccgactcccgcatcgtctatgccgactactacaccccctacatccagtttgcccgcacccctcacctctacggtaagtctatcttaacttctggctatgtatctggacatatctacgttcttttttttttcttttgccgtgcaactctgctttcctctgcaatgcgatgttcaagacagaaatggtagtttgagggttggtcagtatggggccgggggaccatgccaggcagcattgcaatacagcaagagctagcactggatgatggttgggggtactgtgtgtgcagggcggccagccactgacactaacctgacggttacatctcacaaaaccgtacccatcatctcacccacactcccacacagaccgtgtcgggttggtttggtggtgctcgttgctccgtgcgtgcgccacaacattccatttctattgtttttctgttcaaccatggcagccaaccaaacagcccccgtaatcttcttgacgtaccgacggcgaggattttctagagttacttcgctataacagtacggtgtcattttgctgtcttaaggtatcaacccttgggaggggagatggtcctgaactcatcattgtcgtcggcgagttagaggcagagcagagtagatacgccggtgtcagcggccagagcaacggtgtctgtgagttcacctaccaacacgtacgcgcagtggcacagctgttggcgtatctgctgcagtgaccgtccatggccaggtcaccttgttttggcttgatccggcaccattactggggacaaacatcttctctcatctcccacaattattcctcccaacatctgattaactctgcacaataatcaatcaaatccctcattggaagcaatcactaggttggtgtgtctgatcatcgccaggtgtatgaagtctgaacaaagaatctcagcagtagcaggatacatcagagcatcagagttgcagaacagagtctgcattgcatcttacaagctgttaatctcactcgacctgtggattcattcaagaaccgattgagagttgacatgagaaatgtgtttgatgatctttgatgcaggatacaagaggggcgcgctgagggcgtgctgcggcggcggtgggccgtacaactacaacatgagcgcgtcgtgcgggctccccggcgcgacgacgtgcgaggatcccgacgctcacgtcagctgggacggcatccacctcaccgaggcgccctaccgcttcatcgccaacacctggatcaggggcccctacgcccacccttccctcgccagcgttgtccgcgacgacatggtctattagattacaggtgatgatgacctccatgtttttttttcaatttttggatcaccagagatgaagaagaaggatatggcgtatggacttgccttgagtcgagttgggttggactganagagagagagagagagagagagagagagagagagagagagagagagagagagagagagagagagctaacgtgcattccattttgttgttggtgtatattggcataagtaaatcgattagatttttaaatttcttttttgttttattttgttttttaaaaaattgggcggttttggtgccatgtaatactgcctactacttggtcataaattaatggtggatggatgaactgtttggtgtaaagcttggcagattggagtagtttattgtcagaaaagggaaaaaaaacagaattgcttgtgatgatcatgatcatgttttataccttacgtttgagtgggagtagcatccaaactccaaaagagaagaaatcatcaccgatcagctcgaaaggcactacacgcatcacatatttggcttgtttataactgaacataggtaggacggtgagggccggagagataggaaaataataaacatggaaactcaggttacccgctttattgattacacttgacactttcctctcatgagcttagtgacaaagcacacacacatgctttggtagtttgattgcaattacctcaactaaagatcatatgcaattatgtattgcacaattttcttttttgccacaaattgacgagcaaaagcaataagcaaacccatatgtggttagaggagaggaccagagtgctgtagttgcagaaaaccaacaagctggctggcagaggccgcaaaagcacttttggcgaaaggcctaatgacttcttccactgcaagctagccagcatcattgtcgccttttggcatcgaatgcgatgaatcgtgcagaagaaaaccgatcgatccccaaccggatccatcctccatgactcgtttctcttcctagcggtacatcttccctgttgtcaccgatgagggcttttgttttgcgccctgttttccaaagtttttttttcaaacttccaacttttccatcacatcaaaactttcctacacacaatcttccaacttttccatcacatcgttccaatttcaaccaaacttccaattttaggtgaaataaacacagccttggtcaaaccaaaccaaaaaaaaaaaatcctactcatggccggtttcgatgtgttgattgatgatagctaaaattgaatttatggcagttgttaatgggcataaacgaataaattgaccatttgaaaattgaacaaaaatgttaacaaaagttatttccagaaaatgttgataaaataagattatgtagaaatcacatcatttgaaagattgaaaatcatgtccatgataatctatcatcttaagtactccctccgtttcaggttataagacgttttgactttggtcaaactgatttaagtttgaccaagtttatagaaaaaagtaataacatttttaacccaagacaaatttattatgaaaatatattcaattattaatttaactaggaaggtagcccgcgcatacgcgcgggcatgttgtttaatcttgtttgaacttttattacaaatgtttatgtgtggatgatatttttgaaatattttttgactctattttaaacgtatgctcgttaataactggtttcggcgtattacttgaaattgtatatcttcaaatttattagaaaaaaatatgtcaccataacgaagttagttcatatctatttgtattatgtgtgattcttttttaaaaatttttggagtttccaaactttatataacattttttattttatacgccatagactactttaagtagcattttaattttattatatattactgaaatatattgtctattaaaaatatagctagtgatactacttcatctaattaaagatgacttatattacttatattccctctgtcacataaatcgaaggagttgaattttatcccaaaacaatagaaaaatttatatgtaaccgggacaaagtgattttttttaaaataacaccacattaatctccaaagtaacgtatcatattttggcaaatatctataatatctatagtgtagtgcatgttagttcagtgtccagattgttttcaacacctattgtttctaatcatatgagacgccattggtaatttggagaatacatatgtacatttaaatcagcgttgtgtattcctcaagtgttctttacacctaaaatatgatgtgaaattattatcataacattaattattacatgtcggctccatatttgtgatgtattttgggctatagatatttagtagtttatttatttaaaggaatacaaccggatcacaaattggatatataattttaaaataatttaaaagataaaacgcttaaaagcattgattgggtatttcatatttacatttgcgtaaatttgaagattataatattttatccttaaattgtagaaaattcttttttaaggactgccattttttggctttatcataagtatattttctgttcttccagcaaatgatatgtaagcaatattgttcttttcaatcatatctatatacggagtactttttctggtcaacagttacatatttctcatgtatccgtatataggagaaatgtattattttttaaacaataaatctaatctaatggtgtaaaatgaaacaactaaattgtgttgttttcatttatgcaaatgtagatttaaattagcgttgtgtattcgtcgagacactctagaatatgatgtaaaataaaaaattatcatagcattaaatattatatatatcagcctcgtatgttaagatagaacgaataaaaatcattgatgggatatttcatatttataatataaatttagtttaactacgtatatttatgcaaatttgtagagtaatatatttatctttaaatagtagataatactattcataagaccatcgatcctttccgaatgatacacatttttttgttttattgtttttatagtaaggattttgaaaatagtatttcaatagaccaccgtgcatagatttttctttgttccgatggacagtaggtaagcttcatttctttttttcaagtcgtatgtacgtacggactacttatgtattttttagcttaacagttatataggtctcccgtatacctacatggggtattagtttttaaaataaaatacatctaatataatggtctaaaatattagattcaccaatttaaatgaaaatcgatggtgacatttacttaaatttatattgaggaatagattttatctttaaatagtagaaaggataatcaattttttaatggtcctacgtatgttttgttcgctttattgttttttatagtactaagtctgtgcgtaatttttttctttcgataaacagtaggtaagattcattgttttttagtcttacgaatgaacatacttgtgtttttgttttctttttccggtgaacaataagataaacggtaataagattcattgttttttaagtctcacgtacgtacatacctacggagtacttgtgtgtttttttttctttttccggtgaacaggaaggtattagtttcctcttaaataaaatacatctaatctaatctaatggtctaaattatcaggtccaccgatttaagtgaaaattgacggtgagattaggtattgccacgtggcggtatatgagcgtttgcagaagtgtcatgtggtggcttgagagcgtttataggaagtttaatagacttttagtatataatagatagatagatgacactaatttagtattataaatattaatatttttatctataaatttagtcaaacttaaaacagtttgactttgatcaaaatcaaaacaccgtctcaatccatatttatggatacataggccccattctttttttattaatttacagatttcacctcggtttctgtttacacgttttccaaacaaccgttgaatggtatatttcgttcgaaaactgctgatacagaagatgttttaaaatatcagataaattcatttttaggtttgaagtaattaaaacttttgatacagaggtggctaatagcttttcctattttgtgtgtacgtactaaatctttgtgtcatcggcaggtccaaacggggccatattcttgcttacgaaagcaagcaagcagcgtgcggttttccggccgagcggcaaggggatagccatgaaaaagaagaggagattgagttgagttggagctaggcgcccgagcttttagctatctgcctagctttgtttgtgctttgcttgattgccgcgcgcaggaggaggtagaggtagtagaagccgccagcgcgcgcgcgcgcgggggcgcatgtgcgcgcgtcgcgtcgcgtcgcgcgtcgctcggggacaaatcacgtggacggggtggggcgggcggctgcgacgtcgtgcgcggcgcggcgtggcgtggcgcggaggcttcgcgccgttcgttcgcggtctctgagttaaatgtgcgggtcgcggcacatcagatgctgcctgctctgctcgccgccgcccacacacaccggccgtcacggtgttgtccctcccagctcccagatgtggcctgaaatctgaacgtttgaatgtcttaatcgctcgaaacgagtaaataataaatgcgtgaacattcaattgtgggattttctaagggtagagattttctaagggagtatggcatggtttagttcccaactttttcttcaaactttcaactttttcatcacatcgaaactttcctgcatacaaatttctaacttttctgttatatcgtttcaatttcaatcaaactttcaattttgacatgaaattaaacacaccctatgtgtgtcctatgtgtggagaggtgtgtgtatttgtctttccatccaatcgtaacaaagaaacaaaacaatagggtcttttttttttgtctaagtaaaaagactagtgcaaacaaaacaaccacggatcaaaatgtacatttgtggcgtaaggttcattcttctatgctttttcaaagtagtgtgttgttgaaacttttcttttgcagtagtgttactttcagtgctttattttcttctctctcttaggatgaaaacaatcggaaacggtatttatttttctattattacagaaacggtactgatacggtcggagctctctatttttacaactttaatacgacacaaacaaaaattagaaaaaccaaattttactatcatagacacttagaaagaatatttttcattatcttttatgaaaacggtatatatacggtgagaaaatttatgtaccgttttttcatcccttctctctctccttttgcacagataataaaaagtaaattcctggcaaccactggttgtttgggctaatcggtgctttgttggtcaatgtaagatcaccattgctcttgctccaatttcgtcctgtagtgggctttttcaacgagcccaacccatagaacccggcctggatcacgaaagaatctaggcccatctaagcactagcaaactgcaaacagctgccagcgatcactcgagagcgctcatggcaggttgacgttcgctgcatcggcgacaaattaagcagctacccgacatgccgacacgaactaatctgcaattggaattttggaagaatactggcaccactgatggactcaaccaatgtagtttgtaaatcttcaattcttttttcgtaatttttagaaagatttacaatggattaagaagacaaacctagtgctcaagccctaattacctagactcgtctctgccctgactaccaccgcgtaaactaatcacaaagaatcagagctcgaaaagatgcagagaattgaagtccatgcaagagatgaaaggagaggacaccttctctattctcacgatatgaattcacattatttcccaatcatattcatgtacatcgcatacagattaggcactcttatgaaatttggagtacaactcagaacaaaagaatcgaccaaaacacagctaaaaacacaagagcaattgctactgaaaggctactgatcacagtgtctcttccatgacccaaaaacatactgaaaggcgctactgatcgcctcatctcatggcctcaaaactagggagtaatatattgctccagctctctccctctccagcttcgtcagcagccgcagcgacttgccggcgacggtcggtctcgggccgccgtcgttgctcttcgacttggtgggatgcggcggcggcggcggcgcggcagcgttggtgacggcggcggtgggcgtgatcaccttaacttggtccctggatacgcgcacggggcggaagggatcgtggggcgggaacccgacgttgtagacgacgtcgaggaagccgtcgtcctcgtcggcgtcggacacgacgacggcgccgagccggagcacgaggtggcggttgagccccgcgccgatcttgccgacccgggtgcgcacgctcaccggcgtgcccttcttgatgatcggctcgtcgacgccggcggcgccggccaggaatggtgaggatgcccgtgaaaacttcttggcgacacgcccagtgatcggcgcgaggtgatccgccggcgtcctcctgctctcgatgtcgcggagaagcctcttcatgccggccgattgcaccgtcatggatggcatggtgctggaattgtttgatcgagcgagagaaaatcaggtgagatgggatgagagtcgagacgaggaggcggcaaaattatataggcggttgttgaatatgaaacggagtctacacgcgcagtcggagtcggagatcgacgcgttcacaggcgcagtcggagtcggagatcgacgtgttttcatttcccgccatctttcaaaattttgtattcgtaatgttggacgtgtgtggcggaaattgggctgggcgggttgaggagaagaggcccaggctgacatttgtacagcagggtaactgggcttggtttgaaagaggaataagttcatccgaggtcccttaacttatcaacgaaccgattttcgtccttcaaccgaaaaaccagatacaacgggtccctcagctgtcaaaactaatgcacatgaggtccctcggcagttttggctgatgtggcacctatgttattaatttgacttagtcttcatctgatatggcatggacgtgacgcttatgtggcaatgtgacccgaaaaaataaaacctcatgggacccacatgttagtttcacacataaactaatcaaaaatggtggggcccacatggccccacatgtcattctcagccccctcttcctcctttatcccgatctccctctcttttctcttcactctctctgccctctcatctcccaatgcttgatgcctcactgtcgtcgccgtccatatgctcccgcaggccgtagctcattggcgtccggcccaaagagatgagagagcaaaatagacttatttctaaccatataagacatggcccaaagagttgagggactcaaaataaacttattccaaggacgagcacgatgcaatgatcgtgccttcggatcgacacggcatgacccgagtcttattgagtcatgtctgggccgtaggcgcagtggctgcacaaagcaccatatggcatgtcgactgggcgtgccttgatgtaatgccccgctttcagcgagacgttaaaaactagtttaataaaatcctaattgcgaaaattccgttctttgagtgagagtctaagtcgtgccatggatctcaattcatatcccttgttccctctcgtcgacatcaaaatcctccaccccaagatttcaattccgattcaacttccgaagtcaaataccgaattcaatcgcatcctttgaatcctcaccaaatacttgtccctgttttcgcaaatatcaaattctcattttgaatctctctcttgacatctccttgactccaccttgtgttcctagaccaaatatcaaagttaaatccaattccaaacttcttttccttccaaaccagttctcacagcagaagttcaaaatccgtccctctacttttgtgggccgaattccctccctcggcccatctcctctctcagcccgtttccccctccccttcccacgtgcgccgcacgtgagccgctcgggagagctccctccctccctctctctctttgttctctctccctctctttgatcttccggctgccgcgattcgattttcgccgccgcccgtggtatcccgcgcgctcccctgccgtggccgaccggaaggacatcggtgtcactccctctggtcatcgcctgcgccgacgaccgtcctgtccccgctccactccacactgcccaccgccgtcaccatggggttgctggcgtcacctcggcttccatgtcccgggctgcccgcgtgcgtccaaggccgaaagcccgagagaatgcgcctttctcacgcgctctcccttctccctctgctcgcccaaatcggcaaggagcaaagctcctttccttccccttttcgcttttcccctgaccacagccgccaccatcacctgccacccctttggccgctagcgccggaaccagccaccgctccttgaccgcccttgatgtcggttccctctcccaaaccgcctctcctcgtgcctataaagctcgagccatccttctctatctctcccattttcgctccccaccgccaccgcgccattgccacctgagcgtcaagtttgccgccgggtgccgccgctcgacaaacgcactccgtctccttgtcctccgtcgaccgaacaacggtcgtcgccgcctcatcgcgaccctgtccgtgccgccccggtgccgtgatcatgacccacgcccccgtgcgccaccgactcccactcaccaccggatcaccgccgccaaattcgtggccgttggtgaaccctcgtccccttccccttatcgcgttaaacgttgtcaccaccctcgctttctctcttctccatcgtcctaccaccctcgatgctgcgtgtgccatgcgtcgtcatcggcctttctctctctaaccaactcgtcgtcaccctcccggagttccttgcgccaactctttgcttccccaaccgtgccatctcggagctgtgccgccccgccgtcgcgactgccatgaccacaactccatccccatcgacgccgttccctgtcatcgtggcccgccgtggctctatttttgtcgccgctgttggtccccctcccttcgaacccgctcaccaccacctttctcgagcccctctcgacctcccccttgctgttgcgtggccgccaaccgcccctcttgctaccgcgccgtgccgccctttccgccgccgcgggagcatccccgaagaccattgggccccgtgccacttcgcctcgcgtcgcaatcgtgtaatggttcgtctaagcccgatcccgcactctcttttccctccttgcgctcggccacatcacccatttggcgagcctcgccgtcgtcgccggccgccgtcacacctctcctctcaaatccaagccgtggaatgagttccccttgacctcctctagctgccggtgatagacgcccttcccggctcgccgccgttcgccggcgcccctcggctgccgtgcgccgtccgatctgggcaagcccgggctccctctctcttgcgcttgcatggcagtccacatgggctcgaccaagtccgcgcctgccccgtcagcctccttctctccctccctcgcccgtgggctcggcccaccagccggcctcctcctcggcctatcaatacaatcaaagtccaattttactccctcctccaagtccagtgaccccaatcatgagctaaagtccataattgttccctccaaattgctcctccctcaccctttgattggccccacatgtcaatgagcgataaaagaatattcttttccatagaattcaataaatcatttctcctattccagaaattccatttaagcttccaaaattcatatctattgatccgtagctccgattgactccgttccacttccaataattccgtaaatttgagatctatataatggcactattaattagtctaaatagggtctttcttttggtcttgagcaaggcaagtcaccctttgaccaattgctcccttaattccaaaataattattattttgtttgcaacctgcattattagaaatacttaactcgcttggcctcggtctgcgtgccaaaccgatggacctacccagtagtcgcactaattcctgtaggccgttctaccctgattccttgtcgctccacctttgtggtacttcggtatccgtgctctctgagcgcgtataccaactattccacatacaccgttgtttgtcgataattgaggaaatgggttcgagaagccttgaaaacccgacatgtggtgtcagtgtgtttgaaaataaaataaattgtgaaaactcgcgatacaggggttgtgcctgtgtggcgttgtcccgtatttgcatataaggaccaattcatgtgggaaattcatccgagcatataacaagtgcgaccacacgggtagaatgagacgctcttggttgagtaaatagcaaaccagggaagccttgatgccaagagacaagtggattcaccggggtggtgtcgaggagaaccactgggcttcctggcacggtatggtctaggacctaacctgttgttggtttgggacccctctcgttggcatatggcgactctgtatcggttttcgaaatgccttgtcatgaaagccttaaggtctcccgacgtggctgatctccacgggctgggtgatccgagttagtaatgttgtgtgggtaaagtgtaccccatctgcagaggttaactaactgttcgagcagccgtgcccacggtcatgtgctgatttgaggtgtttcccgttgcgtagttttgtttgcatgtgctttctgaaaagttgttgtggatgggaatcgttaccagaatcaacctatgtggcagatggatgacctgaatggtcagaaacggatctatatgattcagatgtctacgggcattatagactaggcttcccgagtggaagcagattgttgtgctgctgggcaacatgactctgggagtccgagaaaatgaaaaggctctaggagccgattaataagagaaatggctctgggagccaagaagtaatgatacgacccgggaggtcagtacattaccatttgagttgttgaaaagcatctcttaagtcgaatcgagacgcaagtctcttttcgacccaaacctgaaaagaaataaatcacctaatgatttcaaataaaaaatttgcataacaaccttgcctctcttccaagctgaagttgaagaagaagtaaagtgaagattagggttacgtcttggttcccagccatcgcctgtggtgttgggtgttagtccattggttccactgctgctactgttgttggtgtttgcctcgtatgtcgtcggttctattctcgggctgtcctgagctataatctaagttaaggaaaataagtcctctatttattttaagaattacaattattcatatttgtcaccgtgggtaccagcgctattgtcgtgggattgctattgagatcgcggtttcgtaggaagcggttcgcgccgtttttcctacggcatgctcctgttaggtgccgttgtacggcggtgccggatcgggatgtgacacttgattgtacccggacggggtccatttggtcatctatacctcaatgttcagaccgcaagcaaattacccactcccattttgcttcagttacctcatgaatccgctgctgacggccgccgccgccgtcgtcttgtgcttcctcctccatggcgcggccgcctccggcgacccgttccctccacggttcaactccatcttcagcttcgggagctcctactccgacaccggcaacttcgtcctccagtccgccggcctcccgtccatccccttcaaccactccccctacggcgacaccttcttccgccgccccaccggccgcccctccgacggccgcctccccatcgacttcatcggtacgtgttctacgcagttgccgtcgccgtcgccgccgttgttgattaatttctcgttgctgtgtgattgatgctgttttggcaatggcgcgcggcagcggaggcgctagggctcccactcgtgccgccgttcctggcgaaggaggcgaacgacttcggcggcggcggcggcgccaacttcgccatcgtcggcggcacggcgctggacgtcgggttcttcatccggcgcaacaacgcgagcgtgccgccgttccagagctccctccgcgtgcagatcgggtggctccggagcctcctgaggcgcgccggcaacgccaccgcggcggagcgcctcgcgacggcgctgttcgtcgtcggcgagttcggcggcagcgactacaggtacctcctctccggcggcaagagcctcgagcaggccaagtccttcgtgccggaggtcgtgcgagccatctgccgaggcgtcgaggtaactaaaacagtaaaaacacaaacaccattgcccaatgtccattgcatttgctcgcatttgtcgccgccggcgccgacgaagacgacgagtgtgtctgtgtgtgtgcagaggctagtggaggaaggagcgaggtacgtggtggtgacggggacgccgccggcggggtgcatgccgatggagctgaccaagtacgcggcagccaacgcgtcgtcggcggcggcggcgtatgatcgtcggacggggtgcctccggcggctcaacgggctggctcagtaccacaactggctgctccgggaggctgtggagcgcatgcgcggcaagtatccgacgacgaagctcgtctacgccgacttctacaagccggtggcgagcctcgtccggcgaccggcaaagttcggtaagtcgccgcgccgagattttttttcctgctttaattacccagtttcatattgtaagtcgtttgactttttttctagtcaaacttctttaaatttgatcaaatttatagaaaaatatactaacatttttaatacaaaacaaacatattatcaaaatatattcaatattaaatttattaaacctaatttaatgttgtaaatattgctattttttctataaacttggtaaaatctaaataattttcactaagaaaaaagtcaaacaacttatagtatgaaacggatggagtattttctactagaaggaaaaacaaaaaggaaaattgtaattatttgtttcgagtacaaatcggatgcactgacatggttacacccacacacatggacatatcctagctagcacaaatctaaagagactgaaggcctaacataaagacgcgaatattagagaatgaccttatattagataattagaaggggtgagacttcgaatccaggtcgtctagtctaccatcttgtggaagtggccgaaagacccctgtacgtttctcattgaaggcctaacatcgtgtagcgggtacatactttgtcaagcccaaaataatttgaacctttaacaaaatttgaacaaatttgaccaaatcagaaaaaaaatatataatacttccctcgaaataatttcaaaattttcggtcaggaattttaaaccatggtcagccgtaccacctgaaacttgaattgggtcgttagattgcaccacaggtaatctgattagctgagctcggaaaacaaatcctaataggctcaaattttgatgaattgtaatttgatttatcttttatagatcgacatcgatcagccatcgtcgtagctatagctcataaatgcgagtgtgcgacagtagccatgtacacacgtaaagagatataagagcaggtacaatagcaggctataaactagctgcaaacatattttaaggagataaataaggagagagaagagtagcgggctacaaatttatagccagctgtagcacggactccaagacacagtgtgtatatgacaagtgggaccatatattaatggtgtagtatgtaactattgtatgaataagctattagattggctatagataaattggagctagtagttggctatactattaaacttgctctaatgcctgattagtgaagtcaaattggttgatgaaacctaaagcgatagaacaattaactgcgctagcttgagtacttgagcacttccaagagctttgcaacttacgaaattttagaatctttaggtacgttaagccatgaactatgtcgggaaggcaaagccgaagaagttacaagattattgtggcttgtggatcgagaaactagctataaagtctacaatcacagtatctttttatgaaaacaatctggcatgcagctgtaattttgttgggtgtcacacaaaataatctaccagccagcttgggtcaactctgctagcatataaaattacaaaacacttgtagaaacccaatgaaccctgttaggtttgttgacataagggctggtttggttttaggcctaaattagacttatcaatatttggcaaatttaatagtgtttagtatctatttggtttgaagccaaattttgacatgcctaagaaaataggccatttcaatagtgaacttaggctattttagcttcaatccaaacacaactttacctttccaaaattagtcatgccaaaacttaccaaaatttggcactgacaaaatttggtaagacctatttaggccacaaaccaaaccaaccctaattctcgctcatttcaatctaaaccaggttagtccttttggtcatatatatttaacgtctaaattaatatttctagtaaattcgtcaatcttaaaatattcttgccgtctttcagaaatgcttatagagatatggtatacatatgtgcgttcatatgggagagtgcatgtgcgttatcatcactaacgtttataatgtgtttcttaaaaaagattaaaatattattgaccaccgataacttctcagatagttagtaaaagaaaagaagaagtgattacatagatttttgtttcttgaaaagcacattctatatacttactagattttgaaaatcttataatataaacataaaagtcaaagtt

SEQ ID NO: 28541 - DNA, 1283 bp, Oryza sativa
ccggaatcgccccccgtgggcggtcccagtgcccgccgctggcttcttataccccctaggagggcggatccgcccttcctatggagggcacagccggatcaaccgcggtagtcggtctccgtgccccccgctcgccgccgagccccatagggcgccggatccggccttccccccgccggatccgccgccgttcccgctgtctcgccgcaggcggtcgccacagcggctccttgctgtggtcgcccgctccctcctagcggcagccgccgcgcctccttgcttccgccgctgctcccgccgtctcgccatcgcccgccgcctccttgatgtcgccgcccgttccctcatagctgccgccgccgccacgcctccttgaggccgccgccgtcgcttgcgtcgtctcgctgtcgcccaccgcctcctgccgcggcccaagtgaggggggagagagagagggaggactccacggcggtgaggaggggggagcggtgaggagggggagctgcggtgaggagggatggcggtggcgtcgccgctcgagggagtcgccggcgacggagggatggccgaggagtgagaaagtgagagactgagagagatagagagagacgagagatctacagagagagaggagataataagtgagaggagaggaagagaagataaggttaggtgtgaaattttgaacaggtagagagggaaggaagagggaccatttttacaagcgggccatttaaccgtccgcatgcaaaaattgattttttgcttgtggctttttagattttaaattaatttttatgtcactatattaactcatatgaaaaagtttgccaaaaacaaagttgtagaactcatcaagatctacaacttttgttttggtcatttttctatatgactttgtttgaacagtttgaaattgaatttcaaaatatgacaatttcaaataaaattttcaaataataaatgatttcaaatagaaatgtcattaacaacaaagtggtataacttatcaagatctataacttttgtattggtcatttttctatatgactttgtttcgacagtttgaatttgaatttaaaattatgataatttcaaacaatattttcaagtactaaatgatttcaaatgaaaaagtcataaataacaaagtggtataactcatcaatatctataacttttattttggttatttcttcatacgacaaagttatttgtaacactgttcacaagatgtacatctcttatatagttttataaactatagagagatatgtaaattt

SEQ ID NO: 28542 - DNA, 815 bp, Oryza sativa
  unsure (1)..(815): unsure at all n locations
agcgggcaaaccaacggtgtttttgagttcccctccaaatacgttcggacatggcacactcttttggtgtatttgctcaagtgcccgtcaatggccaggtccccttgttttggcttgatccggctccattactggggacaaactcttctctcatctcccccattatttcctcccaacatttgattaacctttgcccaataatcaatcaaatccctcattgaaagcaatcactaggttggtgtgtctgatcatcgccaggtgtatgaagtctgaccaaagaatctcagcagtagcaggatacatcagagcatcagagttgcagaacagagtctgcattgcatcttacaagctgttaatctcactcgacctgtggattcattcaagaaccgattgagagttgacatgagaaatgtgtttgatgatctttgatgcaggatacaagaggggcgcgctgagggcgtgcttcgtcggcggtggtccgtacaactacaacatgagcgcgtcgtgcgggctccccggcgcgacgacgtgcgaggatcccgacgctcacgtcagctgggacggcatccacctcaccgaggcgccctaccgcttcatcgccaacacctggatcaggggcccctacgcccaccctcccctcgccagcgttgtccgcgacgacatggtctattagattacaggtgatgatgacctccatgtttttttttcaatttttggatcaccagagatgaagaagaaggatatggcgtatggacttgccttgagtcgagttgggttggnctgagagagagagagagagagagagagagagagag

SEQ ID NO: 28543 - DNA, 502 bp, Oryza sativa
ttttcaggtacctcagagacacagctaatgcttgcttgaagtttggcaggactaataaggggcttattggatatgtggattctgattttgctgcagatttagataagagaaggtcactcacaggttatgtgtttaccattggtagttgtgctgtgagttggaaggcaacattgcggcatgttgttgcccagtctaccactgaagcagaatacatggctattgctgaagcatgtaaagaatcagtttggttgaaaggattgtttgctgagctttgtggagtttattcttgcattaacttgttttgtgacagtcaaagtgctatatgccttactaaagatcagatgtttcatgagaggacaaagcacattgatatcaagtaccattatgttcgcgatgtagtcgcgcaaggtaagctgaaggtatgcaagataagtactcatgataatcctgttgatatgatgacaaagcatgttcctgttgctaagtttgagctttgctcaag

SEQ ID NO: 28544 - DNA, 1673 bp, Oryza sativa
aaattcgtcaatcttaaaatattcttgccgtctttcagaaatgcttatagagatatggtatacatatgtgcgttcatatgggagagtgcatgtgcgttatcatcactaacgtttataatgtgtttcttaaaaaagattaaaatattattgaccaccgataacttctcagatagttagtaaaagaaaagaagaagtgattacatagatttttgtttcttgaaaagcacattctatatacttactagattttgaaaatcttataatataaacataaaagtcaaagttttaaaattttgactgaattttatcttaaacataatcggagggactaacttgtttcaaacatacttgccaaaatttttttgtccgacgatataaaatttacatatctctcgtcccatgtcaatacactccatatgtatagcaacgtaacaatgtaatatgtcattacacttcatatctaataatacgagtcttaagtgctcttgtattattttgaaaaatccattatcttagaaaaaagaaaaaggtaacttatctgacttggccttgcaggtttcacgcagcaaccactgaaagcttgctgcggcgggggcgggccgtacaactacaaccctggagcggcatgcggctcaccgggcgcgtcaacctgcggcgacccgtcggcctacgtcaactgggacggcatccatctcaccgaggccgcatacaagtacgtcgccggcggctggctcaacggcgtctacgcttacccgtccattcttagcctcttggcccaataaccaaggtagctagtgcggatgattttgtacgtcagtagtatgtacgtgcattttgtatgtcaatagtctgctattgagcttgactttgaaatgaccggataatttggacagcgagtatatctaaattcatagtaataaaatacatgatatattcttggacggagcgagtacgatgtaacaaggtaagagcacttgtttgaactatttgttaggtctaaatatataatatcttcagtcataaatattaagaaaaaattactagacaaaagtaaaaacaaaaaactgcctaaatattatgcaatatgcaccatgttagttaacggaaagctacaaaagctgcctatgtctgatcaaaactacatgtcttatgagacattttacctcacaacagcttggtgcttcaatttactgaaacaagacacgaaacaacaggttgtcttcttcataattcaaaacccaatcagctatttaaattaagctaaataagaaccatcggattcttgaataaatacgaatgataaataagaaagtgtttccttacatccgtcagtccatcacacgactatgtacatttgctactatcgcaatgctgcatgttactgcgataactgacaatacccacgtgctaccaccaaacctgaaggggttagcctgaagctgcatctgatacttccatttaattgtctcaacaaaatggccatgtaatggttggtgaattctggcagtgggaggtggatctggatctcagtcgttttggtcttttgaacccttgcttgaatcttgggggggggggggggggggcttatctattattcttaattatttccgtcattttatatctattgcattctttgtacttttacgtctttagtcattttcccttatgtttct

SEQ ID NO: 28545 - DNA, 5269 bp, Oryza sativa
tagcagatcatccatttctatctatccctttaacgacaactacttaaacctctgggcaattaatcatcatcatcatcaattaccaacttgtgtcttcttttcagaccaggcttttgatcagcaaaagagctttccatgtccccagattcggtgatatttatatcatcgattaccctttgctcagtattttcaacgttatctagctcaggctcaatgaagtcatccaaaagttctgtttcaccagcaccgccactgttattagacgaatttaatccatggtgcagattatccctgaaaagagaagttatttacagttgaatcagtgtatcaaataataaggtactcttactgttatttatattctagctacttagttttcactaggcataagtgcataatatgatatgggtaacaatagaggaacaaccaaatatgcagcacccttcaatattgaacagcttcagtttcctcagcttaatagttctgcttcacttaagtgcaagtttactggcaaacaatatttggggatgccatgtaaaaaaaaaaaaaaaaacagttcatgagaagcatagaaacattcaagaatctatcactggttaggggaaaccattcttccaactgatgtattttccaaagcatcagtctacaacttcgagaatccaccacttgtgatgcatgaaagaactaacaaatatattttatgtgcaaagacaaaagtagcaggatcaccataattcacagcagtctattctggtgaataagtttcacacagcctagagcccgtaaaataacatctgaatcattcctgttttttttatgaagcttatgatatgacactgataacactacagaagtagttcacacatttgctaacaagtatgaagagaacagatcagacagtttgaagaatttttgtgccaagatgaacgaacttacttagaactgatagtttcatcgtcttgacctatgtttttcaaaggctcttcatgttcttgtgtatttgctgcaaaacctgacttcaataacctcttctttttcccacttctgttaaaagcagaacaaatttacttagccaaatgtgtgggacagaagaaaagcaagaatttatagaatcagtaaggtttaacaattggcataagaagatttatatggtcattttattgatgagtgtaaagctgtatgagctcacctatgcatagagtctatgatctcatcaccagaataagtgtcttgcagggcttcttgtttttgagatatttccggtgaataattactggtgtttgtactgtctggtgactcctgatgtttctctatattcattgcattgtccggcgtcaacagcctcttcttttttccacttctgttaaaggaaggacttacatgatttagtttagttaaacatattattattaggaaataaagatggtaacacacagaattaatgagggataacacttcctttgtgtaaaaagcggaaggagctcacctgagcatagatcctatggtctcatcatcagaatccgggtctgccaaaccatcttgatgctgtgatgtactaggtgagaaacccacaagtggtaccttcttattttttgttctgcgaggaaaacactcaaaatatcaacatataaaggataacaaaaattaatttcatcttagtagtccatgacattttgatgcccagtacttgaagagggaaatgtaacctagattagttgcatactaagtattaatcatcatattctctgataactcaaggagacaaacttggcatacaggctatatcctgaatataaaggctgtacagcacatagtttgactacaaaattgattgatctgcaggaccatataaaaattactattgcatcactctgttttgcagaaacatttggtattttcagtgcaaattacccaaacagaaataaaatatacttctacctcacgatttaaatgtagcggcaatatttcagatcacattcatactttctgaaatacaggcttcttaacagtaaaatgatttcagattcatttatctcgtcaacaaagttacttcgttgaaagcaacttacagggtaactcacctgcttttaattgcttgtaatgtttcttcatcagatgattttccatcggtagtgttgtcctcatagctagcatgcgacacattttgccttttccttctgcgcctaaaaatgcaggttatgtttagtaacaagtaccaatgaagtgaaatgtgaaaccaagaaagcatgcatattatgtttgatagaaacgcttgtccagtaaaagaataagggtcagttgcacttatccatacaattggtaagcacaaaattgattatcgagcattttttagaaggaaccacacattaggaattaggctgacttgaacttgtataataatgtcaacagagttcatttgcttgtgcataactgtctactaaacatgtcaatagaagtcagataccattacaaagtgaatgtcacagctgatcatttataataggggcaattgcagatttaccactattttgaatcgttattgtaaaactgccactagaaaattgaaaaaataccactagaactatcattcgagtggcatccttacaaaattgaaaaaaaacgatggcaaatttgcaaatgcccctttataatactcaccgggtcgtttctggcttgggatcacagttgtgttcacctagcatctggtccgtctgtgtagccaattcttgagctgaaagaggtgcctctggaacttttgtcctcctcttcatggcattcctcaggcctagctgtgtgagctttcgataaacttgaacagaagaaatctttccactggggtctaaagcttcagcaatgagatgagtgcatttgcggtcatctttgtatctgcaatacgaaggaaataaaccccacatgatccctacctaaatgactaagccttacatactaatgaatacaaaattgtcctttttggggagggggtgttggtgcttcctcacacagattatgtggctacactagagactaagttttgttcaattgtatgattctatcattttttttgcttgatacaaattgaatacttacttttcataaagatctctcataagcttctcttgctcttcactaaaaatggaacgacctcgccttttgggggcttcagaattctgagaacctcttgatacagtgttcctatttttttcaatttgaattgaactgaggattaaagaagcaatcacaaattcaaatgtagaaccatgtataaagcaaacctatcattatcgtcagcttcactgtctgaaaatgacaatatcctgttacttttatttgtggcacccatgcttctcttagaaacatcttcatgttcgccagacgatgaatcatcatccctgcttgtatgcacataaatcatatcgtcactcatgtgtttcctagttgccgctatattaatggacataaacagaacaaacttacttatcagcattatatggttcatgtggtataaccaagtccacttcgtcatcaccaagagaatctgctatgtttattgaacctctccatcccttacttgaaccaatttcgccacccttgtttgtagcatcttttgtgatatcactcagaagagcatcagcatcaatgcaatggcactccttgcgtgttttccaaaagagtacatcaacaaatagcaatggttgtttcttcattaccctcagcatctttcttacaattttagaaagaaaatttacaatgttcgtatactcctttgaatttgatgatttctcgtcagctaatatatcatagaaggtagttagaagggacagctgcaaaagacagcacaatgttagatcccaaggaaatatagctccttacataaatatatatcagcgtatttttacctgatagagcattggtgccaattccaggtcttcgcaaaatctccgcagcatgcatattatgtagtgatttgttcgaaaggagttactcttgtaatgcttcaacaaccaacatatattttggacaacagaattgttcgcaagagtagatattagtcgggatacattgaaatcaacttcactagtagcagggggttgatcatcaagtgaagagtctgaagtcccatcctcttcatcaattagatttcctttcagttcaccattgtctgcacgagatggctcgccttcacaatgcgaggtgctatccagattaactgatgtgccagcaagttcatctggtgcatccatgccgttggagacaactttttcttgctctgtgagaggaggctctgctacagaatccacatttttcaaatctggaagtgattcaagtgcagatttagtcccatctgttgaatcaacattgctctgttccattttctctgcattgagatttgtgttctcaattttgttctttgaagccttcttttttcttccttttcttgtcctttttgcaacctatagcggtgatcaatagtcagctcatagagaaaagggaggggcaaaaaatctcagcataaaatttctcatcttcacttgaacaaataaaaattgatagaaaccatagttgcttaaaaggagatgcagacagatcatagtgtaacttggtggccaagaaagcaaggcatacccttaatgcaccacgtgcttgaagcttctccatgagctgtagcatgatatggattgttcctagtaaatctgcaagatcactgataaaacaatagatatgttcatcaactatttgtaaaaatgtattattagattgctatatagttgattaaaggaaaaaaaaaaagactcgtatgattgtctagaaaccaagtgcaacccaaaccatgcaatgccctttcacaagaacaagtgtttgcagaatgtagcagcttgcacacagtatcccatagtaattttggaccttttcctaatataaatatccaaaaagaatcacttgtacaaacctttttggttgcttatgagtatcaaatgatctgaataagttcagcagaaattgagtgagcccttgttctgtctgatcataaaacagcttatacagtaaaacacgagctgtttgagattctcttgaatcatcaggaagtactttaagcaccaaatataccatgtcaatctgcaaggtaaggttcttcagcacgtagattttgaatgtacataaagtcataactggacaagccattaagacagtagaactaactgaactaggcaggttcaagcctttctttctaaagtatataagattctctttttcaagttaataataaact

SEQ ID NO: 28546 - DNA, 11828 bp, Oryza sativa
ataatcttgtcaggaaaagtaaagccttcctccctcttgctgctacagcgccacaggtgctgtccatggtccacaccagtcatacgtgattgttttgggcctttattgcttgctctaggtaatattcatgattacgtgttgtttgaagttgaaaatactataaaataattaggatagtgttttacccttttttttacgctgagacatgaataaataccagctcatagagcaagtcatgttatttccagaactgttcttttaacaccgatagacaatacagtaccacaggtcaaaaccagtgagtcactgaccataaaaatgcagcacaaatggcccatgagtttaattcaatacctgagcatttgatgccttctcgtgttgaaaagctaagacaaagcgagcaactttgaagaatgtagtgatgtcagatttctggatagaatgatgctcctttacgatatcatcacagacagactgcatgaggactggcaagcactgtgttatcccaagctttacatgaaaatggaaaatagtagttctggttggcaaaaatgaaatggctaagtaactcactcaccattgtatcctccagataaaaattgttccaggaaatttcttatcatctccattgtgccctctctcggtgtgtagagaagctcattatcccaggcaatccttttctggggccctctttggacattacgtattttccttaggctatttgcagatgcggagttggggttccctttgcacaaggatttagatccgtcctgttagttcaagtgaaacaaagtaaacaaacagataattatctgcttatggtgcaggattcaatttgtagcatttgataacatatggtaccactgccgtgcatgtaaaaattccactgattgagtgatgctctgagtttcgttgcctgaacatcctctttttcctctcttcctcctccatcattaatctcaatgaatgtactgatgtatcgatatttccttcaacatgttcctatggaatatgactagagtaagcatgagtgtttcaattaagaactaaaggagtgtctcaggtgatctacataattaatgaaacttggggaaaggttcagagaaaataaatacctttgaacctgcagtagaagctctagcaatcaattctggatcccggcctaagaaaaggtaatgaaagatttccaaaagaagaaggttttcctgctggagataaccagatggctcatccatatgttgagtcagcactaatattagatccatcacattctcttgaaacatgagctctaaaaagctgtcagctagacagagcaactgggtagcttctccagatgccttctgacccaatgtgatttcttgaatagccaagatgttgcggaacaaagtaagcaccaactgaactagtttccagtcatcttctgtgaatgaagctctggttgccattgtaaagtaaatcataactactcaagttgcaagagcagagaaaatacagcaaactaaataactgaagaacagaaagaatatataagagaaataaataaagctcatttcaagtaggagaggatagacaggggtgacatgcagtaaattgactaattgtgtatcctggtaagtgtgctccactctttcagtaccaaagaatcatgagttactttatggctttatgctatgaaatatgtaagttagaagattatctcttcttgacagagtgggtttcctgatagaaaaggaataataccatctcttgttaataagaacagtaaaatataatttacctttccaaatggtccagtggatcttcaagaagagacacaatgacagccatagcaacattgcgcgtcagtgctgccttcagatcccaaagatactctatctgttgtgcaacattctctgatgacggctccacaggcattgtaaggaataccagcactttcacttcaaaacagaagggagagggaaaacatttaatctcatagtgctgcatcgaagtattaatccaaataaaggcatgatacttaattatttgaatgagaaaaaagcatataatgaggatatagctgaatgcaaactccatgtctgcaattataactttgaacaacaagataatactagagttttccatacacacaaccataacattctcacgagatgcaagcaggaagaaaggtggtatgcattcttatgccaattatcagtctctctagttaaatctaaaggatagacctaaagtatcattaaaagattcaattacggaagttgtaactagcaacaattgtgaaaaacggattgtcaaagtaggcaggtaggtgctgctgctgcttaggaaaaaaatagcatataatctagcagaacttagctgttccttatatgtaagaatagaagccatcaattatgtaggatacctaatattattagagatgttacagccatataaaaaatgcattgtattctcactttctcagcaacagacacaagatatatattgagtacaacacaaatgtaacaaaaaaaaacatgcattaacaattagtacctagccacgcaactgtgcagggaatttgcctagtttctgataaattggtaagcgaagttgaattggggacagaatcagtatccaaaacagcgtgtgagtcctgactcattcatacatttgcttccacacatcacattcgttatttcgcaaagttcaaaagtacaaattggtttcataaggaagaaacctatggactgaaaagaaagactctggatcatcagactatgatttaacaaatgggcacagaatgtgagcaatgtttgtttaatgatatcaattctaaacactactacactggcacgaagacaacgaggaacaatactttgtttgttgacatcatttcgtcaaatcaagacaaaaaaaaataagtgcacatataagctatccattttcaatcaacatatgtgacaaactccccgggagattgttcgaaccaaactcattatgtgacctttcggaaatgctggaagcgaaaacgaaaaaaaaaaaaagaaaaccagtttacctgccgtgatcaccaggttgcgatcagcctggtaattctcaatgatgggcaccagatctctagatgcgattttccacttgcaaacctgcttgaaaacctcccgccgctgcgggtcatcccgccgcaggaatctctgcagatccttcagattatctgaagaagaagaaaagaaaaacgcaaaaacagatttagcgaccactgcgtggcggaatcgaaatggagccggaaccaaagcagcttgcggggagaggcgcggaggcgatagataccgaggcagtgctcgcccttggcgtagcccacgacggcgccgccgtcgtcctcctcggcgccaccgaggccggcgcaggtgagcgagagcgccgccgagtccatggcggcgctagggtttaggcgaccgagcggtggtggggaaatcggatcttggaagggagttgggtgcggattgcggaggagaaccggggaatcgctcgaggggagggggaatggatggatcgctcggggtggggagagaacgggaagatgagatggcggcgcggggaagacgaagggattgggggatttttcccgccgatgcgcgccatttcgggaggattttcccgcgcttttttccactttgggcctttggcccatgggccggaaactgtgaaacattttgggctatgtccatactttacatctgaaaacccgagattgattatttcttcgtaataacatacggagcagtacttaattttttaaggcaaaatttgctataggacacttaaaaaatacgtaattagctgtgggacaccacaaagacgtgaatttgtctaaggacattataaaaatatagtaatttgctgcaggacactgaacacattaaaatataatatccattcaattgatgagagagaaatcacataaaatgacaagtttgcccttatcttcctttccctttcagtttgttccgagtttcgacgctcacttgtggcaagctctattggcttgcccatggtggacaggcgctcgcgcatagtcgacggtgtggtcatgtggcatgcctccggtaccggccttatccccaccccaatccccccgctgaccgcgtgcgcgcgtcgccgagacgttcctaggtggcggagctcccatggatttcggcgacaaaagccgagctaaaaagtagtcagagagtaaatgatactaatgaacaactagatgaccaaagattcaaaattatagtttcagagaacataagctaggcttccatagaactcttttatatagtactgatctgtgatcactagtcactacacacaccaagggaaggagagaaaaagaaagattagaagcagagacatattgctatgtcgaagaaggtaaaattaaaagcagcaagaaagcagaggaaggcggctggctaagcttggatccaaaagttcagagatttgctgcaagcccgcaagagcaaggggtgtcttccgccgctagcggcgttggccgcgagcttgatggacgacggcagcgggctgcgcaacaacgcgcgcggcggtgcggctgctccaggtgcctccctgcgacgtcatagtagatcatgccagaaaaatccagcgactggcaccgctcctccatcagtatctcctttctccacacaccgtccttcatgcggaagctcagctccggcctggcctttctccttctcgacaacgacgagatagccttcttgccgttgccgcctccgccgcctaggaaaggcacgatggcgcgcgacgagaaggacaccgcgatccccacccgtggccgcaagtgctaccgtcgcgccgcccgcccaggaaacccggggccgcgcccctcctagcctccacctgcccttctgcgtgctgcgcgtccgctctaggctccaaacagtcgccgtctggtaatggggtgatggattgggggaatcaatgaaggattgggtagaagaagataatggcaaaaatatcattttttatgatttctctctcatcagttgggtggatattatattttaatacgtttagtgtccagcagcaaattatcggaattttggaatgttcttgggcaaattcatgtctttataatgtcccatagctaattacgcattttttgagtgtcatgtagcaaattttgccattttttaatacacagttgacttttgatataacatttgaccactcacttattcccactaaatcctatagcttaacatgcaaagataccacatcatcatccactaataattattacatttaaacatcatgcaagcatgtatattatttataattttataatttattagattttatagctttttaaatgtaagcatgtagtataatatttcaatatgtctcttcatctttattttaaaatatcttatatatccatatagttaatcctaactcataatttagttaatatgctctatctcttctctcattaagtcatatcacatcatctatggtctaaattatctccctctctttcttctcttattaagtcatatcattttaattatttttagcccttagatgattaatctatgattcaaactatcttactccttttcttctctcataaagccgcatcaacttacttttacatttaaatcatcattcaatatactattcaaatttaaattattataaaccacattaacttacgtagatttatattatctagctatcttacatattacttttacttagtgctattatactaaactatcgcagcaacgcgcggggtttcacctagttaataaagaaaatatattacttaaatttttttaataagatgaatggtgaaacatgatgtaaaaagttcaaagcatcatgtataaatgaatggatatagtactaattggcttgtgttattttgcgatcatagttggtttcattttaatctaggaaaaagggttacattccaagttgttaagaaaatgcttgacattggaaaatttatccaataaagagtgtcttttcatattagggtcaccactagacctccatcctaaaagaatattgttttggttattttgttcagtaaagattgtatttctgttcatcattttttttccttattttaacccccgaaccaattgttctcctcctcctctttgttttcttctctcagattctctctcaacattaataaagatactaatcttttaactcctaaactttatctttaactgctccctcagtttaatattataggttgcattgactttttttagtcaaactaaattgattaaatttgaaaaaatagcaacatctaacacaacaaaatagtttcattaaatatattttggtgatacgtttgttttgtgttaaaaatattattacatttttctataaacttcatcaaacttgttaaaagatttgaatagtcaaaacaatgtatgacatggaacagagtgagtagaagatagtttcttacggatggagtacttccaccatcccatattgttaggtattttccatttgtaagccaaacatctacaaatttgaccgtgttaattggataatgtgttaatatctgtaacacaaaattagttttgttaaatccaccatctagtatatttttctagtatatttattttctattgaaaatattgttacaattttctaagtttggtcagactttacaaattttgatgtttgataaatctaagatgtaatgtaatatggaataaagtagtactattctttttttaataaatgatggtgttgactttataatagtatttggtgattcgtcttattaaaaattagtgtaaatatgctaaagtataagccatacataaagtttctttaatgataaaacatatcaaaacaaaataaataacatttttataatttttaaataaaataattagtgtcaaaaaggttaacggttttattattttaaaaaaacttttaaaatttaaaagtaaacacttcctaaacttatgtccaagatacgaaccttttggtcatgtcagctaggctaacatgcaaaaccatactgccacatcggtctcgctcatgtggcaacgttatttggtcacaccggtttggttagcgtggcaacattatttggtcacgtcattgttaacatcaaaatttgttatgtttttttagtgaattcggttaagaaaagaaaccgattggatatgaaaatttatatagataaggttgaatttaagtaggagtcctgaaaaccacagcaagacagttttatatttcttttagtatatctcttaaataggtagaactaattatttccttttcttgttatgaaatcttatctcatgttcaatatggacatgtacaaacccaagagtataaatatgtacacccatggtctctgtaatctctcatatcaatatataaattttggcgcatcgcctacttttaattttggcgagttcttagtttcaagcggagctgcattatttcattcgctgatgaggaactacgctatgccaactttgattgtaacaatttagttagaactttctcgatttagtccaatattctaattagttgctacaatcgctgcctatcttgatataccggctttaatttggctaaggattcatcggttcgacctcttggtccaatctgatatatccatcgcatttgtgtagatctatcggctaaatagttttttcttattatcgtcaatcttatatgtttcggttaggtctgatctattatattatattgctgctaattagtttaattctactaagtcgataggtctttatgcaacatttatcggagttcgtagtgatgagttatctacaatttctgagtgttacatcggctcatgtttaattcagtatactcactagttagatatctctttattaactttaatcttgtgctgtctcggtttgatccgatctatcgaggttgtttttaataaggaacgacttattagtgattatacattgcttagttcttagccgatggtagcataagttttgatatttatctattcaagtttacatcggacccatagtcgttgatctaaactttgttggcatcggttgcccttgctatatcacattgaattaactgacgcgccctgaacctcaaatttagaatctgcactggagttaaacagatatcctaggtctctgtgtgttggataaattttgagccggcaaccatccttgctagcgtggcaggataaaattatcacgcccgttacgggtagcatgtgagtgtttttttccataccagatgggtagacaagacaaagggttcaatttttttgaaaataagttttgaaatgttatttttaaaatttaaaattaaaagtttaaaaaataataaaaaaaaaagttaacatcatcgtctatcaaaagaagggatgttgcttatgtcactacagcctatcagaagaaaaagaaactcagttatcgtagtaaagtattccctacattctaaattgatctacatatagtttttttagtttattcctaaacgatctacatatttgtgttcatttattaggtttgttcgttatttgtgcattgaagtaaatggacattgatgcatgcatctatgcacacatgtatttaataacccacatgcaatatcttgatttgctattggttaggaaatagtggggatggtgcatgtattgagtttgttgctagaataaatatagtatgagagagttattagtttttcttggtctttgtgtacctatgaaatatgtagatcaatttagaatggagggattacgaagtagtaggagtgacactcttgtcaaagtaaacagtaaacagtaaacgccactgggagtcggtgacgccactcttgtcaaagtgcttaacactttaacagttggattagcaaagtacaagtagcgccaccgaatctagcatagcaaccatcccccttccttcccttccttgcttcttcctcctcccccctcccttttcatcctcaaccaccaccaccaccccgcgcgcgacgccatgctccgccgctagcccacaccctccccccacccaggcgctcggcgaaatgtcccaccgggcgccaatgccggggggctcctcctccctctccgacgccctcgccgccgccgcgctccgcgacaagcccgactcgctcccgccgggccgcctctcccccgtctcccccctcgtccactccaggctccccactcccacctcctcctccggctcctccggctccgctccgccgaggcccgcgcggcgtggtggtggtgactaccacggcgtcggcgaggggttcggcccgctcatctacacgtcgtgctcgtcgagcgcgggtggtggtggcggcggcgtcggcgcgagcacggccacctcggcgctcgccgccggcgcgttccccgcggggaacatctgcccctccggccgcctccccaccacgccgccggttccgcctccccgtgccgcccgccgcgacgtgcttggctccggcaccggcaactacggccacggaagcgtcgtccgcgcgcgatgtgccgctccagtctcctcctccgaggaccacgcgtcggcggtcaggatgtccgcggcggcgagcgcccaggcggaggaggttaggcgcgccgggaacgagcagtacaagaacgggtgcttcgaggaggcgctccggctgtacgaccgcgcgctcgcgctgtgccccgacagcgccgcgtgccgtgccaaccgcgccgcggcgctcatcgggctcacccgcctcggcgaggccgtcgaggagtgcaaggaggccatccggctcgatccgtcctacggccgcgcgcaccagcgcctcgcgtcgctgcaaataaggtgatcactgtaccgtgaaagttgctttcatgttgcgtgctggcaattcttcgtgttgcattgtcggtggaaacagtttatctcctgtgccaacgcataactgcctaaatcgattagttctaatcgaagttgaatcgcttaatattatatttttattgggtaatcaaagttaactgatcaatatggggagggaaattgtaatctaatctcacatttagtgtgtgaggacatttcttctgagtaatatatttcccccttcccaaaaaaaaaaaaaaactgatcaatatggatattgtgctgctgaaatttggttgtacttggtggcacgatttcgtggagtggagatctctgcttcttatagcttaatttggaacatttcgcatcggaatgattgaatgtttcgtggaatgtagtttcggattgcaaagaatgagaagaaagggaaatttaccttttatagtagtgactataaaagctaacctggtgacatacccgttgctattgtatttgctgatgcctatcactccatttttgtttttccagtgatagtgggtgttgggggtgggcaggatgtcatggtcattctattgctttagtccctacatttgtgatatttgcttcttatccatgtgcatttttggatattgtcttactaaatatttcaggcttgggcgcactgctgatgctcggaagcaaattggcatgggtggcctgcagccggacattgtagagttgcacaaattagaagcagtggataaacacttggggagattcgctgatgcgcgcaagattggcaactggaaaagcgcgctgagggaatgcaacgctgcaatcgcggcaggagcagactcttgtgcaatggtcaagtatcctccgttttatttgttattgcctagtcatgctctgcttgaagaatgttatttatatattgtaccaactgcagctctttgcttctagagcggaagctcttctccagatcaatcaacttgatgaggctgatttggcaatctctagagcatccaagcttgattgttcatcctcatgctcccaggacatgatgttctgtggatttcagtccaactcatatctctactatgtacatgcccaagttgacatagcttttggaaggtaatttggcaaacatagaagtccatattcctgcttgaatatagattacatctatcatatgatgtctggacattacttttattttcaacttatggtcaccgtggcaaatacaaatgcataacaaactagattgtaaaaatcattaagagaatttattctaaaaataattgttctttgcaggtttgatagtgcgatgtcatcaatggagaaagctaggaaaatagattctggaaacgttgaagtgatggccatgcataagagtgtgagaactgttgcccaagcacgaaccttagggaatgaactttttcattctggaaaatttgcagaagctttcctagcatacggcgaagggctcaagcatcaccctgcaaattcagtcctctactgcaatagggctgcttgcatgttcaagttagggcaatgggagaagtctattgaggactgcaatgaagcccttaagattcaacccaactattggaaggctctcctaaggcgtgcagcttcctatggcaaggtaatactttgctcaatcaagatgcttttatgcacatgatgattgatgctggaagacttatgttgtgcacactatttgcttctttggtgattagattgaacaatgggcagattccgtgaaagattatgaggttcttaggagggaacttcctggtgacactgaggtagcagaggggcatttccatgcccttgttgctcttaggtcatcacgaggtgaggatgtatccaatatgaagtttggaggagaggttgaagcacttgtaggagcagaacaattccagatggctacaaccttgccaggtctttgctctggtcatcatcgtatctttcttccatatcatcagcatcgaa

SEQ ID NO: 28547 - DNA, 3356 bp, Oryza sativa
  unsure (1)..(3356): unsure at all n locations
aaataaaaaagcttatgctccttgacttgatgcacattcagaggggctttttcttgagagaattttccatttcataatattaggcacaatattattgaagatcttcccatttcattgtttccatgtgcaccatgctgcaaaaccacaatccagaccatggaccaatgaagtcataggacagcaggtatgttagattttatagcaaactttaacaattaatagagtattacatttttgcaggtgtttctgttgttcatttcatggcacctttaaatcagcaatgctctgatatcgccccatttgtggatgcactgtgtaccagatatccatctgttaatttcctcaaggtaactagcatcttctaatgaattatgtgcttctgatttcttattatgatctctgtcaacgtgcttctttgattttgacataggtggatataactgagaaccccacagtgacacaattagaaaatgtcaagacagttccaaccttcaaaatttacaaggatgggacacgagtgatggagatgatctgccccagccatcagctgctggagtcctcactgagacaatacgaggtctagaccatgacttcaattatttaatattacctgcaagttcaacatccccaaaattgacacatgatagccacagctaagaaggcaatatttgtttgccctctgcgaaggcgagtgaatataagcgagtgatgtgaaaatttaccccatttcggccaaccacattcttctgtgcatttttaccatccccattgttatttatgtatcttatttattctttccatatataatgtatatgcttgcactgttcttctaaaacataaacaatgtcttacattcttgtatagaataggtgtaaattcttgttttcattaaactcgtatatttaagttactcagtttatattctgtgtatccacaaacctttagctgcgtctgtaagcttttgttgcagttcttttatacagatctgtatgtaaattatatgtaaccatattgcccataacctgatttgctcaatgaaagcataccaactttacgtttagggttcaacattttattgtcttgtgatttggcagatcagttttatcataatagatatagtttttagccgatgagtgggtggactgtcaatgatgctgacacgccaacatctggctggctggtactgtgtcatgttaagaccgacgattttggcccgtcctatcgtccaggtcggcgtgcattgttatcttgtcactgtccatccgtggagctatcactggatagtggtctggttttggattcgagtgcttgttagctgttgctttcttcccccacagtgggcaaataatgtgatgtgtacatgcgttgttatcatgtaactttccaggactctcaatgggcagccgactgggttttggatttttcatactatgttttctttcttttcagtgcaaataacatgaagttttcatgcaagtttatgtgccgtgttggtttgcttatacattatcttaaaaaacgtgtggtttgctcacaatgtggatggtaagcctgcttttctggtgagatttcatgctcctttggacagtcattgatgtcaagaacggcaagttatatgcattttcagaagcaaggtaggttgatgtcgaaggggctagctctagtgaatttcacatgggacagtccaattaccccaagatacagttttctgcctgacaagaaacagaggtcgagtcctgtaactctacaggaagatgatttgatgacacagtggctgttctttctgtttaatgttaactacagcaaagagttagtttgctctgttttatcttgatgctaactgctaatcatgtgaccttgcattaagggcaggtacaaccacgtttccttctttatgctggaactgctggtagtggccctcctaactgctgaaggtgaccaatcaacctgaaacctgcatgtgtatataccttttccctttacatttagaacgcaacatgacgtgggctcaattggacttataaacactggattaaaaacaggttagtgtaggccttctgttaccccattttatcagtaattcttttcttttttatatttttagattaaacaccagttttattaatctggaataggatccgacacaagtgcctgttcaatgaacgagtaagtagttcttgtttgatgacatgggggcatatccggagctgcaaattgctgctaatagcaggctggagctaacctgtccatgaactcatggttgtcatgggttcagtgcttgagctacaactacctgaaattacattaacaaaaaaaaaatgtctcgctctctctcaaaacacattctcaaaagacaaatgcttcattgttagattggcattcctacatacataacaacccaatatatccatctcagttagaattcagagcatatatccatctcaattggaattcagctccaaactaaccactactcatcgtcgtcatcttcctcaacgtcaatgccagtgaaatctatcttggcccattgctcatcaaacaatgcccgggacgcagctctttggacgaagaagtccattccaacctcgtaataccccttctccacctctttgcggacctgtttctggaactcctcgaacgagtcatccgctttcttcaagagatttgccgtctttatcacggacttgctgttcttctcgacccattcctccgagaggccatccaccttgacggggttgttggtcctcaggagagggtagtcctcggggctctcgtagtatgcctccctcttctgggcgagcacccagtcgacgtactcctgcggcatctgaatcatccgtggtggacgctcgccgccgtcgtctccatctgtcgccgccgcagcagcagcacacgcctgctctgcccccttgcctgcttcggaggtggccatcgccagagaaatcgatgctggccgtgtcgctcccccgcaacctaaatacacttgtgcgaaccctcgaagcagtcggactcggggttagaagaggcctcggacacggtcaaccttgtttcatgctggatgggcctagcccaacctgtgcaacaggattatgagcagttttttttttcttctcttattagaatgaggaataagttctcctgaggtacctcaacttaacaacgtgatttttttaaggtcccttagccacaaaaccataaatgtgtactcctaaactcacacaaaccgtgcaatcaaggttctataacagtatatatgggtggtttcgctaacgtggcatcctagttagcaatctgggaccacatgtaagtgttattatgtntgntgcgtaccgagctggtctaccntnggacgcaca

SEQ ID NO: 28548 - DNA, 12517 bp, Oryza sativa
acatatataatatttctgtcatatagatcattagtgggttaattcttttgggtggcagagaataaagaggatgatttagttaattcatcgatatgaccaatgttatgatcactgatctttattccctaatattgcgattatgcatctccatgtggaaaaacataacaatcatactagctactattcaccatcaattttggtccagccaagaacatgcaaagtctagctagctataaggccagtgatgaaccacaccactatgcctaacacgattgcatgcatgcctgaatacacgcatgcaattcagtgagaccaaaaaaaagaagatgatgtgaacttgcaactgactatgcgatggaaagatgtaaagagatatcaagatcacaccggcatctttcactctattttgttgtttatctccatgtccatggacactccatgtgtgatgcagaatatgctacatcttcggatatatatcatgatgatacataattggtttcatctgtcgtttcttcagagaagagaaaagaagaagaaagaaaaggaagaaaaatagctgtctactgcatgattgtttgattgatcaagtgaaggcgactccgattctgaatttctcatcaagtgtgcttttgcaagttggctacatgaaatggatggatggatcgatcgatgattgagtttgcagggaaggttcggcagtacagattggtcagagttgtttctgcagaaatggaagacttgttccgttatgcgccatgcactgcagatgttttggtttttctatgtcattgcagaattgttgagctgtcagatgagatataaactaaaacagtgacggaataagatactgtaccagcacttgcgcatgagaaaataacaatattagcttttgattggacttcctctgcatcacctccgcgaaaattgggcagggaatttcagaaggagaaagaacaagttctggacagagtaaatgaaattctagttcgaaagatatggctttataaattcctttttttaataatgaaacgagtagtagctagcaaacatttctatgaaaattgaaaagttataggttggaagctataaggtagagccgatttcatgctcacgtcgttttctctcatcttttcagaaaattaatgcatcgacatagtgtcatctacatgcactggccatagtttaggcttatccaaaatctgtagagagatcggccagaatgtattattcctcacaccgtttttgccatctatttccaaagcaatgatgtgaaattatgaatccttgcaagaatggagctggcagtcaccagcgatccctgaaaaaggtgaagtattaatatgcttgcttttttttagataatccattatataccattcagtttactctagttaaacaattcgctatcgactttgtctccctttataatatggactttgtttttttttctaaaacacaccattgggtggatatttttcacagaatacctaaaaatacccttcaatgcttacaagaggttacaattgattgacctactataagtttttaaaaaatatgatttttttatgtagcctacttacataaaatggaagtgtgtatatttcaagatttttattttatatgtattaatttaaaaaaaatatcattcgtattttatatgctaatagagtttttttatgtacatagtattcacatgctatataatttattttgatgcggcaatcttttatgtatgtgattcctccttcatagttatataaaaatagttttctaaaaaaatatgaaagataattttgaaatatacacacaaacttaaatattttgtaagaaggctaaggacacgaaactttcatatatttttttaaaaaaccttctagtaggtcaaacagttgtcaactcttgtatgaattgaaggacattttagaaatttcttaaaaattattcaccccaatggcatattgtaggaaaactaataataaatttagtagtacattatagaggaagacaaattcgatgataaattgttaaaatataataaagtgtcataactaatcagaggggaatctttttcggtttttgatagggtgccagaccgtaaaactatttgtagaaaaagtggactagtagttggtaccatcttggaccaaacaaataaaaatgtccagagatgccactgtcaggattaattacatatactagtaaaatgtcattaccatttcaaatattaatcaagaattaatcttcctattaaatgtcattaccatttcaaatattaatccagctaacaaactttgttcagttctgttcattacatactattgagtgtacaaactttgaactttaatttacctatgtattctactaaaaaaaatactccctccgtttcatattataagttgtttgattttttcttagttaaaattctttaggtttgaccaagtttataaaaaaattagtagtaacatttataaccctaaattagtttcattaaatttaacattgaatttattttgataatatgtttgttttatattaaaaatattagtatttcttttataaacttattaaacttgaagaagtttgactaagagaaaaatctatcgatttataatataaaacggggaagaactcccccatctataaaagttacacctatttcacatttaagtttttccaaataaattgtccctatttgtagtccttatgtattcaagacttaaataaagagataaattaatgttttattagaacccaaggagtcatctaaatactcatcggttgtatgcttgcattcacttcttgattttataaatcaaaggtgatttaatttcttcttgatcttggttaaaagtaatatgtgtaacttttgtgggtgaaggcagtatctctgtattattaatgcaaggtaagggcatgcatgcagtttcttactgcatttgtatatgctgcaacctcgaaataatatggacacagatggcccagaaaacaacacacatgcatggccggcgaacatcaaagtcgccaactactcaggtttgacccctgcattgcacagacaggctagctctcaacgctggcggctcgcacctcacctcttcacacattagcttttcccaaatccaagctgttctaggctagctagctctggctacttcttctcttcccatgaaattattaacgactttgacacatgcatgtgcgtactatatacctctaattaaacaattcataacattgtatatatatctgctcacatatatatggagattcgatcatgataacagtcgttttccagggacctattttaaactctccggagcatctcgattgttaaatgtgatttcaaatagttaattaataaaaaaatctggaaaattaggtaatgtgggttatagtgacatataagtatgcaaggttaaatacgatctatacgccttttttttatccaaattgcttgtgtttagtttgaatttgacctggcatgtttttacctgttagaggcacatgtgacaatatataatatgcctagtctagctagtttttttttaaaaaaaaatttacataaatgtttagagagactatatatacaaaaaaaacaagggcatatggacttgagggtttaaaatccacttcctttaccaccttttgggctcaaatatgctatgattatcgagcgtgcaccagtgaaaccaagtgtcgatggcgattctgtgtttgccttcatagctttgtttgcgcgcaattttttcagacattgactgtgcttatggtgggacgatgcacacaggactggacaaggagacatgcaaagtctttgacacataagtaattttggtgtcttggaatcttggatgctttgaaaggaacgaaaagcgcacgtatttgacattataagcggaatggtgatggatgttgtcgaggcggtgtctgaggagtactggatatggcaagttgctagtctagcgggtccactccctactatagagtaattgcggtgtttgatggggaaagtatagtttattgatagaatgccgcattactagaatctttttttccctatagtgaccacaccacaagttgccgatggccccttagccaagaatgactgacggttttgtatatctccccatcacaaatgctactgctttcgggatgtatgtcttcatagttgtagctctcacacctcatatgaaaaatgctgagctccaaaatcataattgtagcgtaacaatgtaaaatttttccttccatgtaaataaagtttggctagcgttcctccgccagaccggcggaaaaaagtttcgacattgactcttggatcgggcattagtgtcttgtcatgctatcataggatgcatggttctattgttgggatacgcgtaggctacgatagcattaatcaaaattttatatcgcataaaccaggaaccatgcaagtattagatcatagatcgttaccactcgacgcgctgcgcagcggaagaagatgctaagaaatcgaaggaactctcgcgaagtagcgtgcgtcgatatagaggaagtagtcgatcgcaccggctcgaccttctcctcctcgtgcgttctcctcgccgtactcccacgccgatcagcaccgcaaaccagcggcgcctctatcggtatccacacgaacagggacggaacgccacgcgcagatgtgctagcacccgcgcgcggctagggttttgctcgaggtgggatcggtgacggctagggtttctcacgtgatacaatacctccaccggtcatacccctcacgaatatataggatccatcactcgggcctccaaggcccgtaggactcctattcggatccctatatgaattaagctcatattgtatctccatccaatccccttattccggcccattaagcgtgcgaccctgtaggttcatgtatactcggctgtaatccgaaaaccccttttcggtccacgcgtcaacagcggcccctaacagaacgtattgacccaccgggcatacataaagatcatatcggctgaatctctagtgtatacttgtatgaacccctttgcctcacgatatcgattaagctcaaggctagatatgtgccatcctctaatagctcaatcattcacttgaacctgttgatagattatataacttgtgattgactcctcaatcacctttggcatggctatgcacttctataatctacaacatcgaggggcccagagatatctctccataggtggggtaaatctcatcttgattattcatatcctattacatgtttcatagcatacccgaaaactacttttataactacccaattacggagttagcatttagcagtccctaagtaagctactacacatgttgggaaccatgataatctcaagtctaaggattcaacactaacactaaataagatcactgatgacacaacacatatggttcttgcagtgtctcatgttggatctatccaacaacatgttcactaacatgtacccacattattaatttggtatctctataccatgatccatgagacatgatcatcaattaatacatgtgctgatcatctaaacatatttgttccacatatgatatttgatcagggatcctttagaaatagcaacacataacataaagagtctcataaaagaatcacacattcattaaccaataattagtttatctattttaaggagcaaagtcggataaatatgtaaacatagtgtgtgatataatcatctctatgattgcctctagggcatatcactaacatctgtgactacggacatgtatggtatagggttctaactcttaaatttactctaggagcgaagtctggagtgaaaatatagctagagtctatatatagttttttagcaatgatgaatgcattgtaatttgcaaagcagcagcacccatgcatcatatcgaaaacaaaaggaacagaaaagaaaacaacaataacagtatccatcacatccaaaacaaaaggaacagaaaataaacaaacaccgaaaactcaacagaaaaagctgtatgttactgccgtagctttatgacgataaagaatcacgcttacgtgagtgtgcagaggacgacgtcgtggttgcagtggtgatcagtgaagcaaagaagaatatggaaacgcagtagcccgccgcgacagcgacccaccaaccgacggctgccgagacgagacgaactagcgctaagcctataaaatcgcatcaacccacacgagctacctatccatcgtcctagctatctcacgtagtctccctctcccggtcttcgcgacgacgctagctttacacgttcgtgataatggcggcgctgctgctgctggcggcggcgatggtggtggtggtgttcgcgcacgcggcggcggcgcagcggtacaatgctatctacagcttcggcgactccatctccgacaccggcaacctctgcgtcggcggctgcccgtcgtggctcaccaccggccagcccccctacggcaagaccttcttcggccgccccaccggccgctgctccgacggccgcgtcgtcgtcgacttcctcggtaggacgacgtcctgatcgatcgatcgatcgagctagtagtggagaaaatgacatgtgaatttcatgcatatatgcagctgagcactttgggctgccgctgccgccggcgtcgaagggcggcggcgacttcaagaagggggcgaacatggcgatcatcggcgccacctccatggacgccgccttcttcaagtccatcggcctcagcgacaagatttggaacaatggccccctcgacacccagatccagtggttccgtcagctcctcccctccgtctgcggcaacggtaactaactaattattcaacatcttattatttaccacagtaactaccactgtaattaatgatccaattcattgattagtcgtctcaccaacaactaccagtatatatgtgcatgtggagtaattaattaattaattaattaacggacgaattgatggatcgatcggatcacgggtgtgtgtagattgcaggagctacctgtccaagtcgctgttcgtggtgggcgagttcggcggcaacgactacaacgcgccgctcttcgccggccgcgccatgacggaggtcagggactacgtgccacaggtcgtcagcaagatcatccgtggcctcgaggtaactaaccaactaacctgatcatttcacgctctccacctgatcaactcacgagagttggatcacggatgactccaaaatggaaaaaaaaacaaattgtccgccaaacagtctatttcctccttcctacagtatcagattaatttcacacaaactatttttttatatagaaattgccctataatatcaaatatatcttttttcaagttaatttgtaataattaaaactcaattgatcattcgctaatggctttcctgttttaaatgcccttacgtacttaatcttaatctttatctatcttaaattaagcctaaattactatattttaggatagataaagtactttttttatcgtaactcgtataggcaacaaaacaatcatgtaaattttgcgcgcgacttgtgaacagacattgatcaggatgggcgcggtggacgtggtggtgccaggggttctacccatcgggtgcttcccgatctacctgacgctctatggcacatccaacggtgcagactacgatcgcaatggttgcctcaagagctacaatagcctctcctcctaccacaacacgttgctcaagagaagcctctccaacctccagaggacgtacccacatgccagggtcatgtacgctgatttctactcgcaggtcactgctatggtccgctctccccaaaacttcggtgagttgatcatactatttctcatctcataaccgcactaaaacatactacctccgtttgataaaaaaaactgtatttttgattatgcacctggacagatcaatatgtgattttttagaacggcgcattatattagtaaatcttgacttacctgtcgttttcttgtttatttgagggtcatggacttatcaatgatatgaaacctatcgctattttttctgttaggcttgattttttttttttttgcaaaatggaatttaatccagccttgttatggttgataggagataaccgttttataaaattttacaagctatttcgtaggaactaggaagcataatatttagatcagcctataaattctattttgtatagtagttaacagatcagccctgaacattactgcccagagctgcaaggcaccatcgttgtccggtagcacacatcacccttttatgtgctaaaaatcaaaagcgtcccagaatccagttgccgtgacagagttgaagttttcagtggtcacggcatgtttagtgtaggttagctaggggtacatggcccacacgtcagatctaggtaaaggatatatccaaaggttgttagagataagtataaattaatacactgtacgtgcataacaacaagctttacatctccaaatagtccaattacttgttggattcttagctcacttgtcctgttagtgtggcaaatgatttgtgccttccctgtgtggaccattcatgacctctgtccatatactagctagtacagtataatttaggaattgataccttgtaatccaattggaatggcatctatcatactatatcaaatactccctccgttttaaaatgtttgacaccgttgactttttagcacgtgtttgaccgttcgtcttattaaaaaaatttgtgaaatatgtaaaactatatgtgtacatgaaagtatatttaacaatgaatcaaatgatatgaaaagaataaataattatttaaataagacgaatggttaaacacgtattaaaaagtcaacggtgtcaaatattttgaaatggagggagtattatgaaataataacaactggcatgatttatgtaatactagtgctaaagcatgcatgcatgtatcacagctagctagctcttctttgcatgcgacatcgtccaattgaaaacaaagataccctttggccaaaagctcatggccacaaattaaaacaaaacaaaggaacatgttcatatctttgcatgatcttgaaagttcaaaccctctcagccttgctctgcttgcaccactgcaaaagaacagagcacacattacaaagcaaaccgaaaaaacgacaaaaaaaaaaaacaacggcactatttgaaacatagaaatattattttatcaaagatagatttaaaaccgagcctctacatctaaactagatatacacagccaaataaataatgcaaaaatctgacactacatatttctgccattgtaaaactatttctagtgaaacatccgaaacacgtatatatgacatcaatttctaagataagtgaaaaattgtttacatctccggtatccaccgatcaatatatttatttggagagtgatattggttgctcaccttgttaatataatatggcagggctgaaatacgggctgaaggtgtgctgcggggcgggagggcaggggacgtacaactacaacaacaaagcgcggtgcggcatgtccgggtccagcgcctgcgccgacccggccaactacctcatctgggacggcatccaccttaccgaggccgcctaccgctccatcgccgatggctggctcaagggcccctactgcaaccctcccatcctccactgatttattaatcctacatgtataatatctgcagagagatgagatgtgacccaattaattgtgcactgtttgcttaattaggccgaagtgtgtgtttgtatttgtgtgtgggttaattaatatttgttcatggggtttacttaattagagtttggttgtgatttggagagggtgattttaagcctgatgatgtatttagttggggatcgaatcaaactgatccaagtgaataatgaagctcaaacaagggcttttccattttagtttcacaagttgttatgggctggctctcaatgaggtcctgaggggctttcgtttgcgtggccttgcaactgcaattccggcccctctagtcggaactttacgggccaaattttgtaacccttttgtagtagtagagccagaaatgctaaaaagaatttggtcgaaaggagccactataacactattgttagttttctttttcaaaatttcctgaatctatagtaaatccctccttcctcctaacaaagccactgcctcccatctttctctaagaaaaccgcatagaaccaaacaaccgtaaaaaaaccggcatagaaataaactaaaacaatatttttatcacccaatcccattacaacctacgggcatataactagttcggtctaaaatttaacgttatggagaaggctaagttaactaataaattattactggtagtccatttctggcatgggctaggaaatagcccatgctaaaagagtcatggaaacagaatggaggagaaagttcactttgactccttcaaaacattaggttggatcttattcgtatccttcaattcaatcataaaacaaggtataatgattcctctaactattgaaaccgacacaaaatgactaggtgatatttgacgtgacaatctattaatcatagaaatagagtggggcccatgtatcataccctctccttcctttctctccaacataactcctcttattggcagtagggtgatggcagggatgcagcagggtggccggtgcgcggaggttgaggagaggcaacatggcagtgatgggggcgacaacagggtagctcacaaatcggcgacaaaggggttgaggtggagcgtgctccggtggggagtggcggtggcagcgacggggagcggccgtgtgctcgcgcggcgcggcgacggcggtggggagcggcggtggcggcagcggggagcggctgcgtgcttgcgcggcgcggcggcgatagcagcggtggcggtggcggaaacctctttggcctcgccacggcctcctccttggagctcgtcgccaggaacgtgagccaccttcttctactgggtcgccttctcgtcgctgtcgtcatcgaccccccactccctccgcgccaactgcctcctcgtccgcctcctctcctgcgctgccctcatcggagctcgagctatggcggcggtttcacctgcatcctgaggatccaggcctcgggctgcggccgggtctgcgtgaccctagatgatctcagatgcttgggcttcatggcgacaacggtgagtgggagacggagtcccggaggcgccccgccgccggtgagcctagatggccccagcacatcctcgatgtcctccatctccatctctggctgctgctgcggaggcgacggtgcgccaaggcgagtggtgggctggtcattggtggcttccccgaccgagtagggtttgggaaaaagtatactttcccacaatacttttttttgtgtgaataacatatgggtctcacatatttttttatttttgttttcattctattgacacgtaagcgccacgtaggacaaagacttggtcaagactgccacctcagccaaaaccacctccaaaaccatcgagggacattgtttgcaccagttttgatagttggaggagtcgatgaacccggttttgtggttggaggatatgaatcttactcgggcgatacttgagcgagtcaaagtataccttttccttcccattttacttgttaagctaagcccatcaatcactctgtaattcattccccctctctccactccaccatgttaccttctaagtttcaaacagtatacgctcctctatatcgccgccgtcaccggcagcggccgacggccgtgaattggaccagctagctggtggagttgacaccataaattcccgccggttttcacaagagcgccatggcggacgtgctccggcgagaggcaggcggcgtcaccacaatcatcttggtgtgctccacggtggcggcggcagcggcggcggctgggacgctggcggtggctgacgcgggcgctgcggctggcggtggcgtgggaggcggcgctcgacgccaacctcgtcaagcagaagtgcgcactccgccaggcggagcgcacactattcagagaaaagtgttgaaccaactaggagcaacaattgaattggcaggggatggagctaaggctgtggatatattcaaagatgctattgagagagtaagtgtttcaggagagcataatgtgccattgccctatgatgtcatattcatggattgccaggtttgtttctccttctagttgttaggaaacgataagcgaacaaacgataaagaacaatagatcaatcacagaagacacgagatttaacgtggaaaaccctcccaaaacaggagagaaaaaaccacgggtgccagccagcaaaatatcttcactatatctagggtgaggttacatcaccgcacggcggcttacaagaggtatatatatggttgaaccctaaaagggatgacgatccg

SEQ ID NO: 28549 - DNA, 1399 bp, Oryza sativa
  unsure (1)..(1399): unsure at all n locations
cggagtagaattagagagagaaagcgaagtattcnncgatgaagaaagtgtcacaggcgaagcagagaaggggtgaatttgtttgnagtacacctgatgaaaggagggatcatatattaatttagattaccctgaaagaacactcatatgataagacgggctagccaacaatggatagaggggataggacaacaaaggggacttatagaagaggaatatacagagcgacaagaccatcacttaagataaatgaagggggaagaacaaaagtagaaaaggatgtcagggtctgattagaaaaggagcagcacagaagcgggggaatttttaataggagggcagagtgagagtatttaaaagcacgcacccccccgggcgtccccaggtgcacgatccatcctttaccctgaacacaacaaagacaaaaacactttcggcgccaaatagcctcttgggctaaaccactataccaactaagcttgagcaaagctcaaacttagcaacaggaacatgctttgtcatcatatcaacaggattatcatgagtacttatcttgcataccttcagcttaccttgcgcgactacatcgcgaacataatggtacttgatatcaatgtgctttgtcctctcatgaaacatctgatctttagtaaggcatatagcactttgactgtcacaaaacaagttaatgcaagaataaactccacaaagctcagcaaacaatcctttcaaccaaactgattctttacatgcttcagcaatagccatgtattctgcttcagtggtagactgggcaacaacatgccgcaatgttgccttccaactcacagcacaactaccaatggtaaacacataacctgtgagtgaccttctcttatctaaatctgcagcaaaatcagaatccacatatccaataagccccttattagtcctgccaaacttcaagcaagcattagctgtgtctctgaggtacctgaaaatccactgaatagctttccagtgttctttaccaggattagccatgtatctactaaccaaactcatagcatgagataaatctagacgggagcaaaccatggcatacatcaaagaaccaacaacactagaatatggaactctagacatgtattctacatcctcatcagtactagcacattgtaaagctgataatttaaaatgaggtgcaatatgagtactaacaggctttgtatcatgcatgttaaaacgctgaagaaccttcttaatgtagctttgctgactaagaaataaccaaccggaatttctgtctctagtgatttccatacctagaattttcttagcagcatcaagatccttcatatcaaactcactactcaactgtttcttcaatgtagtgatttgttccttgctcttggcagca

SEQ ID NO: 28550 - DNA, 2045 bp, Oryza sativa
  unsure (1)..(2045): unsure at all n locations
ccgctgcccattgttattccgactcgctactctactattttccattntcatgtaaagcttgggataacacagtgcttgccagtcctcatgcagtctgtctgtgatgatatcgtaaaggagcatcattctatccagaaatctgacatcactacattcttcaaagttgctcgctttgtcttagcttttcaacacgagaaggcatcaaatgctcaggtattgaattaaactcatgggccatttgtgctgcatttttatggtcagtgactcactggttttgacctgtggtactgtattgtctatcggtgttaaaagaacagttctggaaataacatgacttgctctatgagctggtatttattcatgtctcagcgtaaaaaaaagggtaaaacactatcctaattattttatagtattttcaacttcaaacaacacgtaatcatgaatattacctagagcaagcaataaaggcccaaaacaatcacgtatgactggtgtggaccatggacagcacctgtggcgctgtagcagcaagagggaggaaggctttacttttcctgacaagattatatatttttctgaataattagctgacttgccagaaggatttgttgtttagtaattacctactagttactaaatttgttatcagttcaattaagaaaagaaagagaaaaactaaatctactgcacccatctgttctctatattattggttaaagagtcttgttgcatgaccggagaagagccctgctgtgcaagatctgcccatggtcctcggacctgtataaaatcatgttttcacattacttttataaaaccatgtgtaattgcatttacttatatcggccagctgtttcatattcctatcacacaaggaattttttcccggtataatctgttggagcagcaatctgaaattgtcaagagttccatccgtttttcctagtgcaacctaagttgtagattagtgatgtcttcattgcctcgccttgtttgcattgaatactatacttgcaaaatttgtaactagtgctgatatgtatcatctttttttccatgatgttttatgacattgctaacctctttttgtcagaaatctaatgctgcggtccaactgcctgaggcttctcctagcgatcatcttgatgataatctgccgtttcttggtgacatatgcggacctgttgcagccacattgaatgaaggtatgtttaacttggtcatctccaggtggcgtgaggcctatgatagcctgaaggaaacacatgattacaagactctttcagcagctgggtctctaatgaagaacatggtaagaaaatatgtatactaacatttcaggctagtaactctgctcaactttatactagtctagtactctgatgaatctcatcaactcctttgttatctgagaattagagtttattattaacttgaaaaagagaatcttatatactttagaaagaaaggcttgaacctgcctagttcagttagttctactgtcttaatggcttgtccagttatgactttatgtacattcaaaatctacgtgctgaagaaccttaccttgcagattgacatggtatatttggtgcttaaagtacttcctgatgattcaagagaatctcaaacagctcgtgttttactgtataagctgttttatgatcagacagaacaagggctcactcaatttctgctgaacttattcagatcatttgatactcataagcaaccaaaaaggtttgtacaagtgattctttttggatatttatattaggaaaaggtccaaaattactatgggatactgtgtgcaagctgctacattctgcaaacacttgttcttgtgaaagggcattgcatggtttgggttgcacttggtttctagacaatcatacgagtctttttttttttcctttaatcanctatatagcaatctaataatacatttttacaaatagttgatgaacatatctattgttttatcagtgatcttgcagatttctaggnnncnatccgggtgcccaatgatattcaaatggcacgct

SEQ ID NO: 28551 - DNA, 639 bp, Oryza sativa
caataaaaatataatattaagcgattcaacttcgattagaactaatcgatttaggcagttatgcgttggcacaggagataaactgtttccaccgacaatgcaacacgaagaattgccagcacgcaacatgaaagcaactttcacggtacagtgatcaccttatttgcagcgacgcgaggcgctggtgcgcgcggccgtaggacggatcgagccggatggcctcctcgcactcctcgacggcctcgccgaggcgggtgagcccgatgagcgccgcggcgcggttggcacggcacgcggcgctgtcggggcacagcgcgagcgcgcggtcgtacagccgcagcgcctcctcgaagcacccgttcttgtactgctcgttcccggcgcgcctaacctcctccgcctcggcgctcgccgccgcggacattctgaccgcccgacgcgtggtccttggaggaggagactggagcggcacatcgcgcgcggacgacgcttccgtggccgtagttgccggtgccggagccaagcacgtcgcggcgggcggcacggggaggccgaaccggcggcgtggtggggaggcggccggaagggcaaatgttccccgcggggaacgcgccggcggcgagcgccgaggtggccgtg

SEQ ID NO: 28552 - DNA, 502 bp, Oryza sativa
  unsure (1)..(502): unsure at all n locations
atggtgtannttttgaatagcactcggtaccgtataatatctgcagagagatgagatgtgacccaattaattgtgcactgtttgcttaattaggccgaagtgtgtgtttgtatttgtgtgtgggttaattaatatttgttcatggggtttacttaattagagtttggttgtgatttggagagggtgattttaagcctgatgatgtatttagttggggatcgaatcaaactgatccaagtgaataatgaagctcaaacaagggcttttccattttagtttcacaagttgttatgggctggctctcaatgaggtcctgaggggctttcgtttgcgtggccttgcaactgcaattccggcccctctagtcggaactttacgggccaaattttgtaacccttttgtagtagtagagccagaaatgctaaaaagaatttggtcgaaaggagccactataacactattgttagttttctttttcaaaatttcctgaatctatagtaaa

SEQ ID NO: 28553 - DNA, 3592 bp, Oryza sativa
  unsure (1)..(3592): unsure at all n locations
gcacatatccgcgcccaggcgaagaagcggacttgcacgcggtacagcgaagggacgatgagtctcttcgctcgtacattcagcggttctgtcaagtccgcaacaccataccgtgcatccccgcacacgcggtgatctacgcgttcagggggggcgtgcggcacaaccgcatgctcgagaagatcgcctccaaggagccccagaccaccgcgcagctttttgagctcgcggaccgtgtggctcgcaaggaggaggcctggacctggaactcctccggttctggtgtggcagcttcggccgcccccgggtccgccgctcggtcagggcggcgggacaggaggaggaagaaggggtcggcccgtttcgacgacgagggtcatgtcctcgccgtcgagggcgcttcgcgggccccccgaaaggggaggcctgcgagcgacaaaaagaaggaggccggcgcttccagcagggagcgcccgaccggcaagtggtgtaccgtgcacaacaccttcctccacgacctcgcggactgccgcgcggtcaaaagtttggctgagcggacgaggaagtgggaggaggagaagaggcaggagcgccgtgagggcaagaccctggcggctcccgccggcaaccggcgaggtgaggccaagcagaaggccatcgccgaggacatcgacgatggcgacgatgacctggggttccaggagcctgaggccaccgtcgccaccgtcgatgggggagcgtgcgctcacgcttctcgccggagcctcaaggccatgaagtgagagcttctggccgcggcccctaccatgaggcgacgcggcgggcgcggtggtcggaggttgcccttaccttcgaccagaccgaccacccgccgtgcgttgtccggtgaggacagatcgcgatggtggtttcccccaccgtttgcaatgtgaagttggggcgtgtcctcatagacgggggtgcaggccttaacatcctttcccccgcggcctttgacgccatcaaggtcccggggatggtgctccggccgtcccagccgatcatcggtgtgacgccggggcacacctggccgctgggtcatattgacctcccggtcaccttcggtggttccgccaacttccgcacggagcgggtggacttcgatgtggcggacctcagtctgccctacaacgcggttctggggaggcccgcgttggtaaagttcatggcggcggtccactacgcctatctccagatgaagatgccgggccccagtggccccatcaccgtccatggcgacctcaaagtcgcgcttgcttgtatggagcaacgcgcggaccaccttgccgcggcgtccaagcccgcgggcggcgacgagaggctcagcacctccgtcccggccgccccaaggcggcggatggtcacgtgcgacgaggtcccggtcaaggaggttgtcctaggcgacggcccgtccaagaccacacgaatcggtggtcttctggacgataaataggaagacgcgctcgtctccttcctgcgggcaaacgccgacgtcttcgcctggagaccggcggacatgcccggggtccccagggaggtgattgagcaccgtcttgccgtgcagccgggcgcaaggccggtccggcagaaagtgcggcggcaggccccggaacgtcaagccttcatccgcgaggaggtggcgcgacttctggaggccggattcatccgtgaggtcatccatccggagtgactggcgaacccggtcgtcgttcccaaggcgaacggcaagcttcggatgtgcatcgactacaccgaccttaacaaggcatgtcttaaggacccttaccccctgccacgcatagatcagattgtcgactccaccgcggggtgcgaccttttgtgttttctagatgcatactctggttatcatcagattcgcatggctagggaggatgagaaaananctgcattcattacccccataggaacttattgttatacgacaatgcctttcgggttaaagaatgcaggtcctacttttcaacgtactactcgaatttctttgggtagccagataggacgcaatgttgaggcctatgttgatgacttggttgtgaagacgcgcaaccaagagaccttactctcggatctagcggaaactttcaaaagtctccgctccgcccgcataaagctgaaccccgataagtgcctgttcggcgtgcctgcgagcaagcttctcgggttcttggtctctgcccgaggcatcgaggccaaccccgagaagatacgagctatagagcggatgcgcccccccagcaagcttagggatgtgcagtgcgtcaccggctgcatggccgccctaagtcggttcatatcgaggctgggagagaaggcactacccctatttaagctcctcaaacgctccgggccgtttacctggacggaggaggctgagcggaccttcactcagttgaaagcgtacctcagttctcccccagtcctggtcgccccggagccagatgagccgttgctattctacctggcggcaaccccgcaggtggttagcgcggcgttggttgtggagcgcgacgaggacaaccctcaccccgtgcatccccaccctgtgtcgactcgacccgggagagagcagggaggagaggcccccgagccgaacggcggcccgaggcccccgacggccggagctggccctccgcctgcttgtccgacggtgccaggcgcccccgacccccaggatggccccggggccactgcgggaaggccgcgcctatcgccctctgaccccgaggtcgtcagcacagaagccgagtgcggggccgcgaggcctctcggacgaagagcgccctggagatgcggcccctggcgaagaggatcggccccgccgaaaggtgcagcggcccatctacttcgttagcgaggccctccgggacgccaagacccgataccctcaggcccagaagatgctttacgctattctgatggcttcgaggaagctgcgccattacttccaggcgcatcgggtcacggtggttacgtcttaccccctcggccaaattcttgcataaacgagagggtactggacgggtggtgagatggccaatcgaactctctgaattcgatttgcgctttgaaccacgccacacgatcaagagccaggccctcgccgactttgtggcggagtggaccccagctcccgagcccgtctccgcccacgagaccagctcgggccccccgcagctgcctcacaccgcctactgggtgatgcagttcgacggctccatgtctctttagggcgccggtgcaggggtcacgttgacctcgccaagcggatatgtcctcagatatctggtccgcctatactttcgggcgaccaacaatatggtggagtacaagggactccttgcggggcttagagtggcagctggactggggatccaccgcctcctggtgttaggcgactcccagttagtcgttaaccaggtctgtaaggagtaccggtgctttgacccgtagatgaacgcttacgtgtgccaggtacggtgtatggagcgccatttcgacggaatagagcttcggcatgtgcccagacgggata

SEQ ID NO: 28554 - DNA, 2281 bp, Oryza sativa
ttccatatatttgtaaaaatatgtgcaaagctatgttcagtaagtactctgtaaatgttagaatatcaagggaaatgtaaaagaatcacagtaacagacctagacaagggagggggagtggccgtttcacatgttcagtactattttttgctatgttggctaaaatttggcttagagagttggatggagagtctcttggtgatgctctaactgcgggttgggtgggttttttgtgtggatttttcgctgtgatttccacaatttgagtatgtcacatgtggacagtcagtgatgatatgactgtacaaaccaattattcatacccagtcaaagagctgccaggaaaaatatatatagctgaatttttcccatgaaacctaacaagggattcattaggtgaggtttgtacgaatgaggtttgtctaaggaagacatcagattgggggatccctcatgtatgatttatcaaaaaattacaacaatccttattcatgtggtcccttgagagtcaataccacttaaatctagtatatccaactcctagaaaaaattagtccatccaattccaagaaatagtaaagtaattatttctactttttgaaattagtacctgaatcctgaaaaatccggagacgaatatgtgctaagaaatctagcaatgttgtctgccaaaagtggaagataaacagcattgtatccaatagattgaagacatgtattgtgcaaaactgggctcttgctctgttttactgggttggctataacaccgagaacctttgtatcaggtcctatgcgccttatatcataaatgtctatcagctcttcgacggttggctgcccaggtgctgatacctttgtagcatcaagactcccaaaggttagatatcccccaaacttgggggataacacccttgacattaaacctttttcgcccataactagtccaatcataggcacctgtcatttccatttctactggtcagtcaaatggaagttaatccacaatggtcaaatttagaaaaagaagagcataaaagtccaatttagacatactacaacattatccatactgttgtctacctcctactccctccggcacaaaacatagctacttatgcctttttttgaagggattaaggttgaggtgggaaatggttgtggttggttaagataaaaaagtagttgaagaaatttaatgaggagtggttgtgattggttaagatggggaagtaggttgagatgagacaaatttgaatgatagaagtagccatattttgagaccgagggagtaataaataacaccaaacatgatgacataagaataagctaacaaacgagcacagctttgccaatgagcttagttttcttcttaaaattctcctaaacacataaagttttaaaagcttaattggtccgatatttcaatttgcatcctctctgcaagcgaccaattttatcactattcacatcctctgtgcaagcaaccaattttatcacaatggtaagtaatgattttctattaaaaattaatgatattatttgctttcactggtaaatagggagatttgaatatggaaagtacagtataacagaagggactgaaaaaaaagtttaatactacaggttagattggtgaaattctcatacagcttaactgaagtacaatatgtgaaatgcaatttcctaaaagccaatatgctaaaattaaattgcaagtcctaatgttttcattaaaaaaaatgacttccaaaccataggagctaggaagcatttcatacaaagtttgaggaatgtttactggcctgagctagggatcattagacagaacgatttccgtgtgaagtaatttaaaaacagcatgaatctaaaaggaatgcagtagtggtatcaagatgtacaggatgattatacaggataggtgacgcaagtttccagatggaagagtgaaaatgtatcttggattttatacaatgacacttacttggcagtgcaccatcacttggaacattcgtgacacatcagcaatgtcactagcagttgttgcgattttcactatgtcagatccaactgcttgtattctagccacaagatctgcaagctcctcgcaggacggagtactttcataattgtgtgatgagacaataagtttacacttctctggcttactgccagaaataaagctgataaatttgtcagcaacctacaaaaaaaaggaaagttggttacaattgtgtgcatgtattccaaatcgtgaactcaaataaatgaggcatatgggtgt

SEQ ID NO: 28555 - DNA, 1152 bp, Oryza sativa
cgttgggtttctgcctgcctgtggggaccggccccacctgtcaccgggcctaaggagtggcatcatgcccgatcgcctccctcgaggggggcggtcgccctggcgtgacgccgggggctactgtcggtgacatggggccgggggtatcgtgactagaggcttgggtagccgcgatcactcacgtggcccgaccccctcgggggggtcgggcccgacggtgacgtggccacctctccctctgtctccccgaggggtcgggccgctcctgtttcggccccgagggctggggcaccccgaccccctgtggtgattggcgccacgtgtgtgggttaggtgagcacagcggcgctcacttaaccgcatttatagcgggttagacgagcgcgtcacgccgcattcaatgcggcgcagcgcatgcttatccgatctgtgaccagtcgcggtatgtgaccggtcacagaccggtcagatcgcgggttaggtggcaacaggcggcctgtcgcacgcctcgccccgtcccgtcggaatgatgagagcttcctggttctcgtctctagccggagctggcgtgctgactcctggagttggtatgtcagtcctggtcagatccattccaggcttcagtgcaagcatggcaagaaaatcgctggccattgaatgaaggatgaaacgggcgtccaccgggagagctgacgagcggagcaggaggcgtgtgtactgcttgtcagaggtcatttccggctgtagattagccctcattgtaaaaaacatgtttcttttcttaggcagagagaggcccatgtggtgacccctaaccagataaaaaaaggaggcccaggcctaaggagacaaaaaaggggggggggaggtgagaggctggccacttgatcggagagcctgaactctctctcgctctcgagctctctggctctggagctctctgttttccttcacacacagatccaccagaacacaggagtagggtattacgcttctcagtggcccgaacctgtctacgtggcccgtgtcttgtgcgcttcttctcgctgacattcctcagatcgagggcgaagaacctcacttagcgcccccggccgaaccggcaaaggggggcctgcgcggtctcccggtgaggagccccacgctccgtca

SEQ ID NO: 28556 - DNA, 1717 bp, Oryza sativa
gctaccgaactcagcataggaaagacttagatattgtagtttcattccatatatagagtattacaccatacttatattaatatattccatagcacaatacgaatagattccaatagaaccatcaacacaatccataattttaatatatgacaaaaacattgaaattataaaataagcatagttgcaaacattgcttgctgctcatttattcctcaacaagttctctagctaattggtccaacacatcttcatgtctcttcagttttgcttcattgaaggttgatgtatccttctccatcaatttttaaatacatttggtatttttctacccttgcctcctctcttttagcacttgcgttctcttttatttttgcttctgctccaatcagtgttgcttctgcggcctttagcaatgttgctgctttagttgtaatagcttcatgaaagagaaccatattttgacttggcttgtcccccaaagttgatggagcaccttttccttttttcctctgttttgctgccttttgcctctcaaggcacttctctttgcgctctgttttctcctctatttcttggttcgatgatgaagtatatgctcctgattcagaaatcttgttcctcttattatggctactctcttcaaggactctacaccatttaggttgttctttaagatctttccacatataatccaaggtgaaagtattttggttgttctaacttttgtgccattcacgggctttctctattatcatatgatcagaatacccattagtgaaagtacttctagctttacaataaaatccacagaacttagtgacatctctcttgacattatcccaatgtgttctgcattgcttggggttccttttgtgcccattgctaggcaatactggtgttgaactctcaagctatagccttccaatactaatattattttttgtcattgcctttgatgggatcaactgagttgttcaaccaagagctcattagttgtatattgtcatcttcagtccaattgatgcgtgtccctcttcttccttcttcactgctttcacttgcctcttcaatctcaactacttgtttctccttatatcttgtatggtatggaaaagctcatccatgtgaagaagtgttggctgcagccccaattgaagtactatagtgcataccaaattgtgatctattggctgcaaatccaaatgcttggatagatgactacactagattttcttgaagttgaaaacctttaaagcttcctagagtagtttgcgcataataatcttgttggtgagcaccttaaaagattgaagggtgtccatatagttggtagttgcttagaggaccaaaaggatggaaattttggagaaaactaggtctcaagttttagggataacttgtgggaaattgggtagaatggggagttttggacatcactatttgttgcttacttgtttggcttaacaaaaggctccacttagtatctagggaactgaatggatcaatatgttgttcatctcacttgtgcctcctttcgtaggtagcacaagaatgttgtaagaagccaatggctaggaaagcaaatgagcaactcaaatgaaagagcaccaacggctagtagaagtagttactatctgtagtaactgacatgtatattttattggtgtgaacagaaaaacattacaagtattatattttgtagctttgtggccacacc

SEQ ID NO: 28557 - DNA, 2643 bp, Oryza sativa
tttcaagtttatcaccttgcctttgctggtttagctgtaccaaaagataaaaggaacaatttccaatgaattacatatacattttgtttaacaccaagtgagctttatataatatttatcaatagacttgaagacttatatatatatttgttataccctatgccttattcgaaacgaatccagtatgcttttttgagtaatggcctggactgcaagttgatttactgtttatgactattactattcacagttaaaactgcaaatttatagaggtgttaggaaatggaagaaagaaaataaaaacaaacagctgtttccatgtctcctaggaactctcagttgctacctaaaaagccaggtgtttcacttgcttggtaaaatgccaccgcacaatttggtaccactgcttaggacctggcacagtttggcaccgttgcttggaacataaacagaaggtctctttttagtgttctgctcaagagctttaagacctctcaagctcacaaccattatcatatgcaggttgctaaaatggataagctcagtggttctgcacgtcttattatcgtttcagatcttgaccacacgatggtttgtgtttttcaactcatatcttagacttgttcagagataattgcagcctgttatatgtcgttttaatccttcttcaattcaaacttgcaggttgatcatcacgatgaggagaacttatccttgcttagatttggcgccctgtgggagtccgtttactgtcaggattctctactagtattttcaactggaagatcccctactctttataaggaattgaggaaagagaagcctatgctaactccagacatcactatcatgtctgtggggactgagataacatatggtgaggcaatggttcctgatgatggttgggaggaatatctgaccaataagtgggacagaaatgtagttgtggaggagacagctaagttttctgagctgaagcttcaggcacgttcaatatttcacatctgattctgttaatctacaattatttcgaaaatctgatggctaaaataactagtaacattgttctattgccgtacatttgcatggatacagccagagacagaacagcgtccacataaggtcagcttttttgttgataaaaagagtgctcaggaagtgataaagtctctctccggtaatatggagaaatgcggggtgaggcaacattcgacttgatgttagcttgtttcaattttggataacttaagaactatttatggtttcttttcgtattatgttaactgctatatttcttgtaaacagcttgatgttaaaataatctacagtggtggccaagaccttgacatattacctcagggcgctgggaagggtcaagcacttgcatatttgcttaagaagttaagctcctgtggaaaaccaccaaacaatactcttgtttgtggggactctggtaatgatgcagaattatttagcatccctggtgtacatggtgtcatggtcagtatacaataaatttcatgaagtgtctaacaaagttcatgccagattgaatataagtttactgtaactgcaatctttttttaaatttttcaggttagcaatgcccaagaggaattgcttcagtggtatgcagaaaatgcgaagggtaaccctaaaattattcatgcaactgagaggtgcgccgctggtattatcgaagctattggacacttcaaactaggacctagtgtttctccaagagatgtggggtttccttatgttaaggaggaccatatcaaacctacagatgctgttgtaaagttttacgttctctatgagaagtggcgcagggctgaggttccaaaatcagattcagttgtacagtacttcaaaaatatcactgtaagtacatcactgcccagtgtgatgtttcttcaaaataatttgtaacctttgtcaaaatcagttttatcttttacctcaaaagaaattatcagaaccttctaattttggaaaagaagttatatttccaattaataaagtgaactgggtctgacgtattatattgttgagttaactgattttttatttgtttttggtttgtcttagcatgcaaatggtgttatcattcaaccttctgggcttgaatgttctctccatgcctctgttgatgcattgagttcatgttatggtgagaaacaagggaaaaaataccgaacatgggtggacagactatttgtctcacagtctggttcagacagttggctggtcagatttgacttgtgggaggcagaaggttagtccttagaattgtgtagaatgagtgaattagctcttatatgatattttttacacttcattcaaatttctttaatgttttacttacacaatttagcttgttcaatcatattttttcacttgtaggtttctctagacatgtcacttcaatctattaattttgttgtgtgttgtagtatatcctcgtacacaccagaaattatatgaaggttttaggcaatagtttatgaaaagattgacaacatattcaactctgcatctgtacgtacaaatgtcataatacattacacatatgcagtctagtgcaattcatttgtaaataaaagtaagaaaacatactcctcaataaaaaataatttattt

SEQ ID NO: 28558 - DNA, 28338 bp, Oryza sativa
gccaccatggattccatttctattctcccctttcttgcttcttctccttcccagcaccggcggtccgggtggtgaggacaagggtggctggcggttggggtcatggagagaggaggtggacgacgtcgcgtgcagtgttaggggagaaccacgccgagccaaaaaacaaggatgggaaccaaaaaacaagtccatagtaaaacaaccgccgcaaatcaacagaaatggttagttgattatagtagaaatccagatagtaataagaaaagctatcatctaacctaagaagaagtcatggagaatgtctagatttttcgtcctaaaaaaagaggcagctcaattataatttcacatatcttgccatgagacatgtgtcttaaaatacccaatcaaactaacaaaggcattaagaacagtttctgacaaaaacatggacgttagtattgagagatttttatggcaagcaaacagcggatttaagaaatttaagaacgatttccagtggttaggctataacctaaataagcgataaactgattaatatgtaccaaaattataaaaatctagaaaaagtgggaaaaccaagaaaaaccctaaaaggaacataatatttcgatacctgtaattttaggcaaaaaaaaaaaaaagaggacttgaatggggtggccgtggatcggagtcacggataagtacatgaaattttaaagtttaagtaattttatgaaaatagaaaaaaagctaatttaaattggaaaaggaatattctttcgagttttttttgctgacagatggccgttggttccaaagggcagtcaggcaaaattagggagaggtatatggggggaggtctactacacgaacgttcgtggatgacgaatctcacaaaccattagcctttcttcgtactaaatcatgtaaatcacacgcctaatcacggtttgcacctattttgtcgtttctgtccgtaaatgctttattttttccaagtttgttttgattggactattttctttttagaaaaatactccctccgtattttaatgtatgacgccgttgactttttaacaaacgtttgacctttcgtctcattcaaaaaatttatgtaattatcatttattttattatgacttgatttatcatcaaatgttctttaagcatgacataagtattttttgtatttgcataaaaaatttaaataagacgaatgatcaaacattggttaaaaagttaatggcgtcatacattaaaatatggagggagtatcctctaaaatttctaattacatataatatatatatactaattggagtatataaagtttttatatagaaaatatatatatagtttataaatacataaagtttatatacataaagtctatatataaaaactttttatataaaaagtctatatataagggtataaataaaaaagtctacatgtagaaagtttccaaaaaaaatagttgaaataaaaaaggtaatctggaaaaaaaaacggtgtgaaaaaaacagaaaaacactatgggttacgtaaaagaggaaactaaaaaacgaaaacttatcaccttaaaagtggaaacggcagtgaaacggaaaaaaaacggaaagagatgaacaatacgcgtacctgtgaagaaagaaatatctgttcccttacctattcgtgagatctgctagtggcgcacgttcgcccacacttgattcacggaggagggaagggtaatgggccggttgatggtctttgtcagcgaggatgcatattagactttgcgttttatgtgtagtgagagactggtggccacgacacgcgagaagtccgacacggcgtcggtcgctcgccgttcctactccgagtccgagtcagtccctcctcccaggcagcctatataattattcttctatcaattatctcctcccaaatcgtgtgatttccttccgccaatcgatccctctcgcaagcaattgttgcggccagatccgatcgcatcgatcgctctctcgggcgagatggccggcgtcgaggtctccgtttccgtctcccctaccaagaagagaaaaggggggagtcttccgccctggacggaggagaggacgatgccctggctcatccatcaaagaagaagaagatgtggctgctgcccaaggaggaggtggactggatcctcgctcagtgcaacgagcccatctgcgccaggttccgggagctgaagcgcgccaacccgtcgctggtgccgtcgccggaggagaaggacgagtacaccatgcttctctacgagtgcacccgcgaatcctacgaggacgaggctaagtacgccaagttccaggactgggttcggggcgagtacgctcgcaaaggatttgtggaggtggactatgactatttcgccaagagggagaaggccatttggctgaacgaggaagcacgggaggaggttttggggcactggtcagatcgtcatcatccttcccacaccgaccttgacgatgaagattggaagcttgtaagatcaattctagaacgatttgatcaacggtccgcaatttcccgattcaacagaaggaactaagcttttgtagtgaacaaatcaattcacctctgtatgattcactttgtgcttccattctctctctggcagagaaattattttgaagtgtcatatgttttcatcatctgtctttctcttctcacctctatatgattccactttgtgcttccattctctgtctggcagagaaattatattgaagtgtcctatgttttcatcaactgtcattctcttctcttggtggtcaaatttttttggtcaaattgaaacatgaatgatttagctatagaaaatcattcgacagccatttagccatttagccttccccttccccttttggtgcaggaagcttccttcctatagttcagagctcatataaaagaaaagtccaatcttttcactaatcggttgctaatgtgatcggacgggttaatcatatagtatatgagttatagtattttcatcagaaactcatagttggaatcgcaactaagcttttcaaatgttcaaagcaaattttctcagatgtcggatggaactaattaatatcttgccaatttagatatatacattttttcactgtgctttaatctgagcagccaaaggtccgtaactcgattcttggatccacaaaaggttttggtcatggggtggtctaaagatgagatttttggggctcaaactttgggtggttcagattgcagttcggggctgatgtaaattggtgtagtgcaaatatgcatctggtcaatttgtaaagactgcatgtttttctgatgtcttctgagtattgatttcgggagagatttttgttgtttgtctaccgttgccgaaaatttatctcttctctccaagaatttatttactgcactgccaaaatgtatatggagattcagaattcttcagaaccgcttctgcaaggccaaaacagctgagaaccgtttatcattagtatgcaatgtttgctttacggacatgaatatagtagtatggacttgcaacatcagtctatgcccttactttatgtcatcttcatgaaatacgatacgtttgcagtcaccaatagcatgcggtttatggttattcagaacttcagagttcttttctttccaacgcagtcagtttttccctctcgtacgtgtttcagagaaattgggttggaggcaaggagtaagtttgataaaaaccgtgaattacacaaaaccacaattatagtcttggcaggtggtacataaccccaaatattatggtcttagtattgaaaaaaaaatcagatcaaatattagagcacaaataacaaaataaccaagctcaacatggatagcatcccagttgatgaacataattatctggtaaacggtagtgttgactgcagaatataccgctgaaattgactacctgcgagtgcgagtagcgcctgtctgattcttttacgctcgtagtccccttgagagtatttgcttcttattgggaatgactggagtgtgattttttttcctgctctcagttggacgaatcaacaaaatcagacatcaggagtttcattagacgacattgaaactaaacttaaacattagattcctaggattgcacaatttaaaaaaacaaagtccacgtggagaaatgaagatcttggatatagataattttgtcggcgagaactaactgcaagagttcctgccaagatatttcttgtgctaatattttggttgattctacaggggtctagctatacattggttgataaattttctcctaaaaatttatttgggaggtccaaatataagtcaatcatagagtaattaaattataacgtatgtataaccacaaaataatttgtatgtaattaaaagtctcacacagtaacatattattttcatgaagcagaggtcgctatgaccaaatctccttacccatgtacacgctatgatattttgtattcctaacttaacggttttaacgtacaagttacattgcagttttatgtaagttgcaatataagtaattttagtgtatttatatatgatgaaattttagaaagagaaaatttatcgacaactatatagaaaaatcattctactgaatattattccagtcatacaccatgatacttcagggactacaaacgcatgggtaaattttatagtgcaaaccataaatacattgaaaatctgaaaactatatcgttggatcgaaaaatagacatttgaggataaatttactcctaataaatttttacttaggaataaatctgcgagttgagtaaaatttttacttgtgatgacgtggataaatctcagacatctatattttatccaacggtagttttatgtttccactccatatgtagaagatgtggcgtctgcccaaggaggaggtggactggatcctctctcagttcaacgagcctgtctgcgcctggttccgggagctgaagcgcgccaacccgtccactagtacagatccttccatctgtgacggcccctaacaagactggaattcgcgggccgtcacaaggaagtaatctcaatcgggccgaagtttcgcccgattgaaatatggtcgcacagccatggtagatcggcataaaactaagggtcataattgaggcccgattgagatgagggttccatatctcaatcgggccctaaaagaagcccgtcacaaatgactgtcatctgtgacgggcaccaaccagaggcccgattgagataagtttaatgcccgtcacagatgacactcttctttgacgggcttttattaaggcccgatagagattacttgtatgcctgtcacggttgattgttttagggccgttacaaatatttgttgcacagtataaataccccccacctaatgtaactatatcccactgttcattattttagtgggaggctgcagggggcgattttttgtcttttttccaaggaaaacagaaaattcccaaaagtgatcaaaatggagcaatcaagtgagtaatattaatcattaattgagcaatttcatcacgtcttacttttgcaatactgatcttataagatgtgcctctgatttgttttttttattttgtagcaattgatcgaagttggatgtatgcgaaaaatttgaaacgtcattctacggagtacagaaaaggcgtaataaattttatgaacgccgcggaggaggatcggaaaagaagaaacaatgattacatgtgttgtccatgtgcagattgcaagaatgagaatatgtttgatagcggagaggatgtacacggtcatctgatacaacgaggattcatggagggctatacatgttgggtgaagcatggagagcaagaatcaggaagtggagcagcaacagacagaagtggtgcgcataatcaggaagatgaagatgagcatgacatgtttataccttctccattgggcggtgaaatggttgatgtggatcacgatctgctgcaagacatgttacgtgacgttgaggacccagcccagaatgagagagattccatgaagttcagcaggttggtcagtgattccgagacgtctctgtacgctggatgcaaagcaaaacacactaagttgtcagttaccttggacctaatgaagctgaaggcaagtagtggatggacagacaagagtttcacagatcttttaggaattttgaaggctatgcttcctgctgagaacacattgcccgagacgacatacgaagcaaagcaggttctgtgtccactggggttagaggtccgtagaattcacgcttgtccaaacgactgcatattgtaccacaagcaatatgcggacttggatgcttgtcctgtctgcaaggcttctcaatacaagcgaaagaaaagtgctgacgaaggaaagaagtcaaagaggggtggttcggcaaaggttgtgtggtatctacctatcattgatcgtttcaagagaatctttgccaacccgaacgaagcgaagttagtacattggcacgccacggagagaaggaatgacggtatgcttagacacccagcggattcgattgaatggaggaatatcgatagaaaatacaaagactttgctgccgaccctagaaacatgaggatatgtctgtgtacggatggcataaatcctttcggtgacatgagtagtactcacagcacttggccagttcttattgcgaactataacctcccgccatggttatgctttaaacggaaatttattatgttgtgcttgttaatccaaggtccgaggcaacccggcaatgatatcgatgtattcctggaacctgttatcgacgatctagagattctttagaaagaaggtgtggaaacttgggatgcatatggtcaggagaacttcaagctaagagttctattgttctgcaccattaatgactaccctgtactcggtaatctttccggacaaactataaaaggaaagaatgcatgctccgattgcaaggaacatacacgaagccggtggctgaagaaatcacgaaagatggtatacatgggtcatcggaggtggctctcgctacgtcacgcatttagaagaaagaagaaaatttttaacggtaagagagaacttcagcctgctcccaaagatttgtccggagatgagatccacaatatggtcaaggacataagcaatgagtttgggaagaaaagaaaacgtagcaagacaaagaagaagggtatgtggaagaaaaaatccatattttggcggctaccttactggaaagatcttgatgtccgtcattgcattgatctcatgcatgtagaaaagaatgtgtgtgagagtttggttggcctgatgttgaatattcccggaaagacaaaggacgggttgaacgcgcgccttgatctacaggacatgaatattcgcagtgaactccagcacatacgagatgcagagacaggttgagtgtacctccctccagcctgccacacattgtcgaaggatgagaagatcgcaatgttatcatgcttgaaggatattaaagttccatcgggctattcagtgaggataagtaagtatgttaaattggacgactaaaacttgttggaatgaagtctcacgattgccacgtgctaatcacacaaatcttgccagttgctatcagaggcattctaccatcgaaagtgcgtcacacgatccaacgtctgtgcaccttcttcaatgcaattggacagaaggttatagatccagaagatctagatgggttgcagaccgatattgtgaataccctctgtcacctgaagatgtttttcccactgtctttctttgatataatggttcatctccctgttcatctggtgaagcaaacaaaactatgtggcccggcttttctaagggaaatgtggccgtttgaaaggtgcatgggagttttgaattcatacgttcgtaacaaagctaaacccgaggggagcatcattgaaggttacacgaccgaggaggctattgagttctgcgtcaattacgtccgatgccgatcctatcggagtttctgcgtctcgtcacgagggaaggttgttaggtgttggcacaatcggaaggaatagaattaggcccgatcaagcgtcgtacgtgcaggctcattacactgtgctccaacatatggcagaagttggcccatactttgaggagcacttagcgaaaatccgagatgagaacttggggcgatctgatgcatggattaacagagaacataactctcggttcaacgaatggttcaagaatcatgcgacaatgtccacggatgtcccaaatgagacagtacagttgttggggatggaaccgtcttggaccctgggagctaaactacgtcaagttcaaggttcctttgttctgctgccgttgggtgaatctacgcactggtgtcaaagccgacaagaaaggatttactttagtagatctatcaagggtgggatacgccgatgaaccatttgtacttgcgaaacaggtcgagcagatattctacataaaagacccttcaaacaagaagatgcacatcgtgagggatggcaagcgccgaattgtaggagttgacaacgtcatcgatgaagaagaatacaaccagaatcttcatgtaagaccttacattgaccttgacgatgatccccaagagtctgtggcatatgctcgtttagatcatacggaaggcataaccttgtgaccgatgcatttgtacttatctattgtaatgaatgaagtattttattttattacaaagacttgatatgtgtactaatttatatggctaattttgttttattacaaatgttgtttaaatatgtcaaatattcaaattgaatttcatgctgttgggaatatagttatacataaaagtgaccaaaataaaagttgtagatcttgacaggatctacgactttgttgttgttgcctttttcatttgaaatcatttactatttacaaaaagtggttttaatttgtcatattttcaaaatcaatttcaagctgttgggaacaaagttatatagacaaatgaccaaaataaaagttgtagatcttgataagctctacaattttgttgttgaccatatttcgatttcaaatcatttactatccgaaaatgtattatgactaataaattgaattattatatagcagctatatattttgcactcacaaatataaagacttgacgggaaaaatagaaaatagtcatcggtgacgggccttattttaagcccgatagagattaatctatctctatcgggcattatcgtagggcccgtcaaagatgagtcatccgtgacgggcctgaatgtcatctcaatcaggcattagtatggagcctgtcaccgatgtgtcatctgtgacgggccctacagcaatgcccgattgagatgactcatcactatactataactagggtttctcagatcagatcgaaaatttttctaagtcccgctacagtttcccgcctccttagaaccctagcgccaccgtcgtcctccatcgccgagcccgccgctgtcgccaccgagcccgcggccgccgccaccgagcctcctctgccctccattcggaccgccgccgcctcctcaccgatgacccccaccaccgccgccaccgccgccaccgagcccgccgccgccgccaccgagcctctgcaccgaccggcgtcggccttccttgtcgtcgccgcccgcgtcctcaccaacgcacgtcgccaacccccaccgagcctgtcgctgcccgcccggcgccgacctgcccgaccggcgtctccaccgacgggcgctgccctccaccgagcctggcgccgctgccgtgaactcctccttcgccgagcccgccgctgccgccaccgagaccgccgcctccaccgaccggcgacaccctccaccgagcccggcgccgccgccaccaagccccaccggccgtcctcaggtgagtcctccatctcgccgccctctgctaactgtgaatgacatgtcattgaaatgtggatgtggatgatatgtgattgaactgtgagtgagacatgttgatgttgggatgaaatgtggtgcatttattaattctgtgatagatgattgtagtgattgatgaaatgtggttcatttaactttctttatatgcgaagtggttcatgttgggatgaaatgtggtttatttatgttgggatgaaatgtggtttatttatgttgggatgaaatgtggtatatgtatgttgggatgaaatgtggtttatttatattaaatagatgaatttagtaaatagatgaaatgtggttcattttataaggatgagatgtccaatttagtttatttaaatgtttcatttatttataagtgacattcaattcattgtaatagattttagcactgaattctgtattttcgttattttgaaaaaaagtagacgatgtctcagcaaggcgaactaatgtcgatgacaactagtgggtcctcaagggcacgtactcctaggacagggaacaaaatccttaaggaacggttccgcataacgacagtgaaccaagtagggttgccgataggtccaaggaaaatattgagccgatttaggtttatctgcggggtcatagggaggcagaaattcagtattccgcaagatgacatcaagcaagtgccggccgcagagaaggatagtgcttggctagcgttcaaggagagcttcgattatcctgtagagcacgagaaccttatcaggcaggctgcttttaaggtcatgggcaacgcttggaagaacttcaagagtaagctagtcggcgagttcgtcttcaacccgacgaatcctaatccaacagagaaatttccttggatcacggaataggtctgggaggaattccatgcgaagaagtcgacccccgagtccatagctagaagcgaggcatatctcttgcttcagaccaagaaccagcatccgcaccggcttggcaccgccggatatgccggtaaggaagaggaatggccgcatgaggatgaagaagcggaggaatcaaacacaccgctcatgtttggcgatatcccacacccttgggctaggaactaggccagggctaggtaccagaagaatgctgatggcacaatcttcatgccaaatgcaaaagatcaacgagtgtacgaagctatagtaagtgtctagtcaaactagatgttcgcattgtttcccatcttgcagtttatttaaccccactaaattgtaatgcagaaggaattggttgccgagcaacaaacctcgcaagaggccagctctcaaagacgcgaggacgacctcctcacgaaagtgttgggcaacaaggtacactgtggacggacacggggcgttgggtcctccgttccctggaagtatggatttccagactacgcgtggcagtacaagaagcggacttccaacaaggcggagaaagatgcacgccttgaagccaagatccgggcgtcgatcagagcggagctgacatctgaattcgacgaaaagctcgagtcgatgagggccaagattaggcaaaagatccaagaagagcaacagaacccgcaggccgccgctgccgttgcgcatgaagagttaggaagtcccacccaaaaacgcagcagttgcgcatcaactgagttggcagaaaatccaacatcggttaacagcgccatcgaccacataatggtaaaagtttcgtacacaatgcatgaaaggcttaacgaatcaatatgatatataatattctaaagaaattgatgaatctatcgcaggaaccaacgagctgcaccctcacagttagggtgatgccgaccttcacagttccagcagccgagggacttgcgtacaagccgaccccagagacaagagtgcatggattgcaacttaggggcgactgtgcaaaagttcaagtcgactcggttaagcccgaatacgagctgttcccactgaggtacccaccgaacgacgaggtcctctcactaggaaatgcccgtggtaccttcatccaatggcccaaggaccacattgagataagggttacagcgaggccaaccactgcaccaggcggtcatccgccaaagagacccgcctctgctccttctgcccctcctgctcaagatcgtcctgcacaatcttacgatgtgcagttgcagtacgacacagattttagggaggaccgaacggaggccgacagcaaggcgattcatgaacccccacctatgaagaagagcaggaaggcacactcttcccctcatagaattactcttgataaacccgaagcaaaggggagaggaaggggaggaaaggtgcaggcctcgcttctagctctaaggaagctagatctgggcaagggccaggaagacactaagggcaaagaggtcaagaagaaatacgtcgctccataggagttccaactaggcatgccattggttggagatgacgtgcttgccgcaatgggcaccgcttgcaaggaccttcacgtatactacatggagaaatctaacactaggaggccaaataaaactaccgatatccttggagagcacgatggaaagccattccttggtccaacaaattatatcatggtcgacttcaaggatctattcgacctctacaggctccgagcggtggacacaagcctccttaagtgctactccttgtaagtattatcgcccaacttaatctggtaacaacaattggtttaactcgcttacaagatcgtttatcatgtgtgtaggttaagttggcaatggtgtcagaagaatgcaccggaagttgccttccttgatccacaagtggtcactgtcacaaatatccagaatgaccgtcaaggaatggtcagctacatctacgacaccttgtggtcccgccgagacaaggagtacattatgtgcgcctataatcaatagtaagtgtgttatctaaatatacacaacagcattacacattccttcagtacttaattaactttcactatattaatgccgcagtgcccattggatccttctagtcataacacctaagtggagtacatgtcactaactgaactccagaattgataagaacacatatgattagaccccaattcaactagcgatagatgaagcgtgggcccaatacgtgcaaagaggatgcctcaggaagacaggacatgacaccctcatccacaaaaaagacttcccggtgaagcaacaaataggtgaccagtgcggattccatgtgtgccacaacatgcgccttctgtacagagaaaaggtgaagactttggctgagtttgaggtcggtggtctcaattgtgatagactaactacattttagtacttatatatgatcgatcaagtaatctggaattatgacaatgtagggcacaataaccaagtctctgcctaccagctttgaggagattcgtgaggagatagccagcttcatcctccgtgaaataattaaccccaaaggaatgtttaggcttaaactaaaatgatgagcaatgttgaacttttatgtctagagaatgatgaacacttattatgcaactgtgatgatgtaactgtgatgcttatatttatgtatatatttcatatgtttatgttaagacttgctaaataaatatttgatccaattaactcggttttgcaggtgaaatacgataaatatttaaatggatgtgaaatatgtgaatggatatgaaatatgagatggctgtcaatgtgtggttgtgtgaaatatattgatgtctgtgtatgtgaatgcatatgtatgaatgggtgatgctggggagctggggatattagatatctgtatttgtttctgtcatttttgcagcgggcatggctagcaaaggcctgaggctagccaaaaaaacaaaatttatttttttttgtggattatactcatctttgacgggccataactaaatgcccgattgagatgatgttcatctatgatgggctctagtttaggcccgattgaggtcagcagtcatctgtgacgggctctagtttaggcccaattgagatgagtgtcacatgtgacgtgctctagtttaggcccgattgaggttagtagtcatctgtgacgggctctatttgtggcccgattgagataggtcatctgtgacgggctatagtacgcttggtagactgggtcaaagctatcggtgacgggcttcaattagggcccgattgagataggttcatctgtgacggccatttgcccgattgagattacttttcacatcagtaacttctagcctatgacggacgccgtgcccgattgagatggggcttactgcctgattgagatgagggtatccgttctagtggtccctggtgccgttgccggaggagaagggtgagtacaccatgctcctctacaagtggacccacgactcctatgaggacgaggccaagttcgccaagttgcaggcctgggtttgtggcgagtacgctcgcaaaggattcgtggaggtggactatgactatttcgccaacagggaggacgcgattaggctgaataaggaagcacaggtggaggttttgggacactggtcggatcatcattatccttcccacaccgatcttgacgatgaagattggaagcttgtaagaacaattaattatagaacgattcaatcaacggcccaaatttcccgattcaacagaaggaactaagcttagcttttgtagtcttctcaactactccgttgttggtagtcaatttttttccccttttgttggtgtggtcaattttttccccctttttttgttgaaagcggattgcgagatacagaagaggatcaattttggagtcatcaagatcaaaaagaagataattttgaagcatgagttctcatactccaaaattggggggcatgttttaacagtggaatttggtaagccccgaagtcatcatcggcctagagtgagtttcagcttcagagtcctggaatcggccgatgaaattatcacgtcggtaatagtcggattcttgctatattcggttaaggaaattaatcaatcaaatgaagtttatccaggagagaccgagttaaagaaggatgcgacaagcagattatctattaattcggaagagtatgtaagtttccttttatcctcaggaaagtttctttcttttccaacaaggactagcatctacccttggtataaatatgtacacccgaggtcattgtaatctatctcaacgatcaatacaactactctcggcgcatcactactctttttgcttttctactttttcgacgagtttatacttctcatggctgtttgcaccggtggggctagggcttcgacactctaatcttgtcaatgtaagcacctatctatcatatatcttagttaatctattttggtagttcaatttacttgtatcggctaagatttgttttaggggtttatgctggtatcggctaaattgctttatcatattagattagctaagatatccactgccctgaagattagtcaaagacttaattgtttagactttatgcttctttgcatactttgcgatatatcatccctagtcgtgcttgaatcggaaaagctaacctgcctttgattataataagggtttcatcggggtttcagctgatgagttatctggacgttgcatcggcttataaggattacatacaagttagatttagccgatcgcaacaaaggtttcgttgtttatctaatcttgtggatttaatgacatcagacctccagccgatgtatgctttaaccttcggatcaatacttattctatcatattgttagccgattggtttctattggattatattgttgtattgttacattattatcagccgattgtctatgtatcattatttactcaagtatcagatcccacattggacgtatagccaatagctcaaaaccttatcgctatcggctagtatcggcatcgaccggaactactccagcggcttgtcagctgatcggctatttgatctactatttatatatcttgtcagttgtaggatcaaactgactagcatgcccgcatgccatcatgttttggacctgcactagagctaagcagatctctcaggccattgtgttcatcaacttagttcgtgccaacacagttccggcaccatcggctgagcgcggatttctcgtcagcagccccccaattccgttgtatattatataatgcggcggattttgctcttctcgaacccgcatcaatctaggggtttctgttttgactgtagaggccactactttgaaatcccctttttccggctaagtctttcatacgtgctccatcgcaaaaactctttcgtctccgacgactccactggtgatccagtccctcggcggcgagctcctttccaacgctctcgcgctctaaaaacacgctaccgacgctagtgtcgcgctaccaaagtgcgataccgatgagcccactcccgtccatgcctctctctttctccctaatcgcaaaacccatcgccacgtggcactctcgctcgataaaatagcgataccgccattggtgtcgctaatccaaaaagcgatgtcgccagctcaaatgcttcacttttctttctcgcaagattgtcgggctaacgtcattgtcttgctgattggtactgcgatggcatggcggtatcgcataatccggttgcgaactgggtatcgcgcttcctaaccgcgattttggaaaaaaaattatatattttcaattttttctcgcaccaatccccaaatccgctggcgctcgcatcgcacgttcgctccggtccgcacgcgagtaaggctgtgtttgggaggaaggttcctcccaacatggaaagcaaagcatgcgattatagtgagatcaattaagtatttgcctaaaaaacttgaaaaatggattaatatgattttttaaagcaactttgatatagaaaacttttgcaaaaaatataccgttcagcagtttggtcaggtctatataaaaacgtagtattattttaacacaaaacaaacatattttcgacgtttgatgtcacgaccacggtatttgcatagtatggggatcgttggtactaggatatttgcgagatagaggtaaaagagatggagacgaggattttcatacagattcgggcccctgaattgccaggtaataaccctactcctgttggccgaagccggtcgttgctcttattcaccataatcacaccaatacaatatttggggtagcctatctaactgttgtcgacttggcggtctgaagtgctgactcgtagtcgacaacagggtagccttccttctcgaatccgcatccagcaagatcaaagacagcgctatgtctctcctatcagtatccctagacaccgtaagggactagccatgcttatctctgaagtcgatatccggcgtcttgtcttggcgtatgttggcttgtatgttgatcttgtgtcttgatctattgttccatcccccctctcctcctagagggtcttgtatttatacccataggtgtttccttttccaagtagaactagggaaaccaatatggatacaatctgagtaatccttgtcgtttccatatagaactctatttatctttccttatctggaactccttctatacccgaaggttgttttcgtatgaaacatggtatgtggtgggtcgtgccgagatttagtcaactactattaggtatgtggtatccataaccctgacagtagcccccgactttaatgcaaatgaacgagtacatattctcaatccgaagacctcgtaataactgttgtcgaggtcacgtgaccgttctcggtgagttcagagataacgctagacttcccttataagccttgtgcaggcaccgtatagggtttgtctgagtcaatctccgacgtcaactaagaaggtacagagcatacgactaagtttcctgtcttgctgtaatcgagaatttggattgaagtcaagaaattttatctcggcgggtacaccatcttttcattccgtattccttgttgagatccaccagccgttctcaaatggtcgagaaggcgcaaagtctgcgacgaaaccttgtcaacatttgtcatactcgccttagtcgatcttggtgtagaacaatagagacatggagtcttcgacaatgtcgaatagaattttcatgaaatcaacactcagaaaagaatattagatagaaatggcccccgagcaaatgctcaaagggtgacatgttataatatgtatggaaaactaaaaatgaattaaatttacaaaccaatgttttgtgtacgagcgtcttctcttttaccgacttcgatcagtcagtttgttgagtcatacactctccctagcccccagccttgtcatcggagataagttctcagaggagaaggctcttggacccttgacctgccttggttgaaaaaacgcttaccctagcccccagccgtgaagttggaaaacccaattttcgattacacggcttggttaatatgcacggtgagaactcttacatgaccggatcttacatggtcattcgtctctgcattacctgacaaggccttatctgctctgggcgtccctagccgaagttcccttaggttcctcagaggccttgccagggcggcgtaaagggacagtaggattagttttaactctaggtgtcgtcgtggtaagggatctctgggtaaaacacttggcgatattgtgtacctgatatcaactttgttggagtagagataatgagaggatcgctacaccgctggtcgaaaaccagttgtagccccaactcaaccacttgaagtaaaggtagtgggagaatcgctacaccactggtcgaggaccatgtagtagtcgaaactcaaccactagaagtggatgtagtgggaggaattgctacaccgctgatagagaaccaggtgtagccttaagaaatagaggtagtgggagtatcgctacacctctggtcgagaaccaggtgtagccttaactcgaccacaagaagtaaagctagtgggagtatcgctacaccgcttggtcgaaaaccaggtgtagccttacctcaaccatgagaagtaaagctagtgggagtatcgctacaccgctagtcgaaaaccaggtgtagccttaactcgaccactagaagtagaggtgcgagagatcgctacagcctactagtccgagaaccaggagtagcctcatgtctcggccgattgatgtcgaggtatgagagatcgctatggcctattggtccgagaaccaggagtagccttatctctcgaccgattgaagtcgtggagcgaggaccactacgctgctggtcgaagaccagctgtagtcgtacctcgaccatctgaagtcgtggtgcgaggaccactacgctgttggtcaaagaccagtcgtagtcgtacctcgaccatctgaagttaaggtggggcgctagagttggtttattacatgtgcatctcatctggccagcatgactcacatacccaacttgtagcatatccggatgtccgtccacaatcatgtcgggtgatcaagccgacatcgtttgcgagtaattatccgttaacaacccttttctcaaatagcccagtcatagccggtgctatgagataggtcgtcggtcttcgttggtaggttggctgcgacaaatctgcatttgtctagaacgttctcgataatggggagtgctcgaccacaacctaatcgagtgctcaattgttcctgaaaagtatttttctagaaggcaaggcatatagcagagaatatcgagtatgtactcaaaaaacttcatggatcttctagtattatcagaatataacgagcagatgtaaatatcaggcattatgtaaaccgtaaacaagcatgattcatacagaagagaacagagcgagtccccagcgttagaccgtagttggcctaacatcggaaacactcgcacaatagatattgtataaataacatgctctaggtaaacataataaattatagatctgacaatgctgtatgatctgaataggtacgataaattgcatataaaatattgcatacatttgtagatacatgtcagatgtatctacgaaattagtagattaatttaaaaaaccaatccaccaattaccttactgcgtactcgtttgatatcatatgatctgacgtcttttggtacgacgcgtatcttgaggcttggatgatctcgataaaccaaattgttgacaatgatggttccgatcttgtcgaggcacgtactctggttagattaaacttcccagatccaaagtagttgaagtagccctcgtcaaaaaatctatagtgacgatgacttggtgaagcttgacgaagatcccgatccgtcggagaacatacttcgttcgggtcatatcacccaacatacgaagtcgctgagtagtttattgttgaagaatccatctcttgaacccatctcgtcgaaatcctgaagcaccaaaatcccctacctggcacgccactgtcgacgtttgatgtcacgtctacggtatttgtataatatggggatcgttggtactaggatatatgtgagattgaggtaaaagagatggggacgatgatttttatacaggttcggttccctgaattgtcaggtaattaataaccctactcctgttggccgaagccggtcgttgctcttattcaccataatcacaccagtataatatttggagtagcctatctaactgttgtcgacttggcggtctgaagtgttgactcgtagtcaacaacagggtagccttcctcctcgattccgcatccggcaaaatcaaagatagcgctatgtctctcctatcagtatccgtagacaccataggggactagccatgcttatctctgaagtcgatatccgacgtcctgtcttggcgtatgttggcttgtatgttgatcttgtgtcttcatctattgttccgtcccccctctcctcctagggggtcttgtatttatacccatagtgttcccttttccaagtagattagggaaaccaatatagatacaatccgagtaatccttgtcgtttccatatataactctatttatctttccttatcggaactccttctgtaccacaaggttgtttccgtataaaacatggtatgtggtgggtcctgccgagatttagtcaactattattaggtatgtggtatccataaccctgacacatatcattaaaaatatattcaatgttagatttaatgaaaacaatttaatattttagatgttgctaaatttttttataaatttaatcaaactcaataaagtttgaaaacaaatcaaacgactagtaatacgtccagtaaaaaaaaaagactagtaatacgaaacaaagaaagagtagtaaaatttctccgttactactcgatgtgttgatcccattcaggagttaccaactaggctattaatacgacgagtgataaggcagaacaaattaagcaggcagacctgcaaagtagcaagccagcgctcgcacctccgattccgacactgcctcggtcgcgcaccacccccgactccgactccgactcctatccggcgatgagtaattaagctatatattcaatatggcggaggaggagtcttccacgtcgacggaggactagacgagcagcatcctccggcgaagaagatgtggctgttgccgcaggaggaggtggaccggatcctcgccgagtccaacgagaccgtctgcaccgtgtaccgggagctgaagcgcgccaacccgtcgctggtgccctcgccggaggaggagaaggacgagtccaccatgctcctctacacctgcgcccgcaacgcctacgaggatgatgccaagttcgccaagttccaggcttgggtctgcgacgagtacgctcgaaaaggattcgtggaggtggactacgactacttcggtgagagggcagaggtgttcaggctctacgatgaagcacgggaggaggtgatgggacactgggatcatccttcagatagcgacgatgacgacgaagactggaagcttttcattagggcaattaggaggaccttcgtctgaatcgaatctcaaacccatcatcacagtttctctaatcttattatttgtattgtaagaacaattcaatgtacggatgcaacagtttacctctgtatgatatctattcacagaaatttaagtgtgttgtgctgatcgacatcattttttgattgttagttattggtttacacgcttgtgcgctctgttgttggtgttcagcctttttttccttttgttgctagaagcctcgtacaattcagagctatgtaaaagcaaaagtccaatctttgactaatcgttgttaaggctgtgaatgggattaggactgatgggattaagcattttttccaaattgtgctgttcttcaacctgaattttgtaagcagagcgagctgaatatgtcaccgagcagatatattcagtagtgtcttcagctgttagcgattgcatcatgaatggttttcttgcggtaacagatgaacaaaatttatttttgccttctgtacatgctacccagccaatctttgaattaaatctcaaattacttgcctcttgcttccgtatagcaagaatcctctgtatttatgtgcttatgatgtgatagatataactgcattgacaggagaattaggagtcatttggttttgtatatatgatttctgacaaaaataaaaactctctgtttgtatcctaaatttggacccgtttatctgcacagtattttttgcatttttcttctcactgcgaggatgacgaagattggaagcttatcaagaggagagcaggacctgggtgtatagatgagattttggggctcaaaatttttgtgcttcggattctttctatcaatggcaattccgggctgatgtatattcgtttagtgcagcagatatgcgtcggccaattttaaagactgcatgtgtttctgaagttttccgaatattgatttttggagacatttttgtttgtgtgtgtggttgctgaaaatctatctgttgttgtcgccaagaagatactgcattaacaaaatgtatatggaggatcagaattatatacagaatcaccttttgcattgccataatagctgagaaccgtttttcattaatatgcaatgtttgcattaggtacatgaacatcgtactagaaacttgcacaacaacatcgagtctatattgatattgtgtatgtcatcttcaggaaatgagcggtctgacaatgacgacttagcattctctatccattgctttgtttatctcatcttgtcgagttaagacttacctctatatatgtgtcttggcttgatcattgacaaaagtgagaaattcttagtacaaagatctagtgctaatttttcttgttgctaaagctctaaagcatgaggattatatatggagataacataaactgaaagtgaacctcccgtacttcataaatacatggattagatttgcaccgcccaaaccttggcaacagacgtatgcaaattaattctgcgaattatatctatatttctgcctgacactgctgcaaatctgaaaatctctgaatctcacgtccgaatcccactaacgatgaggagctccatttttgtctcagggcagaagatggtttgtctactttaacagccctgtggtcattaagctttgctgatggtaactttggttggaagagttacttttcttggaaaatttgatactatttggcttccattccatgtttcttaacaaaagaaaaaattagttatgattggagataacctttttgatatcttattcttcatccagagatgtacaaagttaggaaatgatagttacttgactttgcaaaaggcattctgctccgagctatataggagcaagttcattgcattttaagttacttgaactcttaagactgcatcatgttcttgtgaacactcagtacaccattgctctgttttttctttttccagccggttctctgtttccattcatgttgttttacctttaggctgtgtttgttagaacaaattcccatccggaacagtaatcacggaaaatggagtggtccattagcgcatggttaattaagtatttgctatcttttttcaaaaatagattaatttgatttttttagcaaatttcgtatagtaactttttgcaaaacacacaccgtatagcagtttaaaagcgtgcgcgctaaaaatgagggagaggggttgagaaaaggggcatccgaacacagcctcctaattaacattttgactcatccatttttacaaattcatcagcgacagaaggcagatttgcctcaccaaactctggcctcctaataaacaaactcacaaggataccatcccagatctccagtagataaatataattaactctgataaatggtagccctaaatatacatacccctttgagaatatttgcttcttactgggagtgactgtaaagtgttctttttcctgttctcatttgtacgaatcaataaaatcagacattagaggttttataatttcattagaggaagctgaatacctagctttaatttgctcgaatcctaccccaaatttaattaaacctaaacattagactcctatagattggttggacaacttaaaaagaaagttctcgtggagcaatgtagatcttgggtgtcgatagttttgtctgcgagaactaatttcctgagttacttccaacattgttatgttgttgcaaaactttggtcgattgtactgaatattatgaatattattattgtggtgatacatcatgatagttcacggattagagacgatctcctgtaggccttgggccagtctccaagggttgaattaattttcatcatggtgataattttggcaaaaattaggctgggcctgcccgtaagagggatcagaaaagttgggtgatagtacttcctccatcccaaaatgtttgacgccattgatttttttaaaaatgtttgaccgttcgtcttatttaaaaaattaagtaattattaattcttttcctatcatttgatttattgttaaatatacttttatgtatacatatagttttatatatttcacaaaagtttttgaataagacgaacagtcaaacatgtttaaaaaatcaacggcgttaaacatttagggaaggagggagtatttaatctaccgatccaacatagataaagtagatggcactacttatgattcattcatttgatgaatctactgtagtaattaactgatcaatgagggcactgtacacaggaaagatctactgtgaagaaattgaggattttcgtcaaaaaaaaaaaacaaatccatcagttccctgctagattctcgatacttggaatgccaacttcggttttttcgttcatccacatctaggcgaactcccgcgcaccacaagaatccgtaattttaagacttggtgggttttccttggcaatcggttgacagaataattaatcttaacgattagcccaaggaaatcgtaatattcctaactttctaaatttggtagtatttacttgacggatgctatacttggtagtttttgaccgccaaaaaaattgcagattcttatagtggcgccagcacaaggtatcatgtacattgggtgttgatcgaataaccgggaggagcggacgagagaatgattctgttggtagttttttaaagcggcccacctttttatttagaaatatcaatatatatgggcttttttttcgagagattgatattttcatgccttaaatactcattagagatttccataacagggtttaggggatcaaattttggatgtttgttggccatgctctaagtgaagtagtagtaaaatacaatatatggaggaatatataatcctattggaagagatcacccagtttttagtggtttaatttgattctgaaaccaaatagcccgtatattcctcctggttattaaacacaaaaaatatttgtccagcggtcaaaacatgttttcgcagaggcaaaaccttccgcctgtatccaaatgacgctaaaaatccccaaattttgcaagcggaccaacgattttcgtaggcggcagttcgaatcttcgcaggcgctgtaggtgctacagtagccccgcctgcaaaaatattgtcggtccctagggtttcaaatcacaaatcacaaatcctcacaaatctcatccaagaaacaaaatccaatcacagatagtgtaaagttgcaacacaaaagtattggattcaaatccacagcaagttaacaacaatgaacaatatgtaaacttaaaagaagacatcgtcgccggtgaactcctccgttgcatggggtggccgccgccgccacagcctcctcccccctccgtccggatctgggaggggtgggttggggtagcaagcccacacagccgccgccgacacgtacccctcccctccgccagatctgaaaggggaggggtcgaggggaggggcacccacgtgcccagtgggttgtcatcgtcttcgcgtggtagtcgtcgtaggccccgtcgcgacccccctctgcccgcgcccctccgaccctctccgcccgtgccatcaccaccgccctccgcccgcgccgccgttgcccccccccgcccgcgccgtcaccaccgccctcagcccgcccccccgccttcccacttggcccgccccaccgcgggcccccttcgccggccccctccggccaagcctctgccaaaggccttccgccggcgcccccccgaacgccctcccccgaaagaaggggagggaaggaaagaaagggaagggaagggaagggagcccagatgaagagagagagagggggaggggaatgagtggtggggagaggataagatggaagagaagatatgataggggacttagtttattttatgtaggtatgatttttgcaggcggaccacataagctaccttctgcaaaaattcaaaaatcatatttttttcagacggaccacttaagaggtccgcatataaaaataaaggtattttcgtaggcggacctcttaagtggtccgcctggaaaaattaatttccgcaggcggatgatgaaaattcacctcggtttatattttcgtaggcggatatttggctctgggtgtcatatccacctgcgaaaataaagatccaacgttggcgaaaatgctttttctagtagtgaaatatgtgacgctgcagctagttaataatgccaagtgatacttaatgatcgatacaaatacgagactgtgatactttatatactgtggaaactgatttaccgctcggggcaagcaacatacagtcatcaaaagttggcgcatacatggatcacatgcacgagacaattaacaacgattaatattgatacgtttacatatcttgtcgcaagcttttggcgtttatcgatagatagacatatataaatttctttctctggccaaaaatcttgggcttcaattgattggttgataatgctgaagacttggcaatcagatcgattggagtccaatttgcagatcaacttggcataatatattaatttgatttcgtgcaatgatcgattagcgttggggtgcacgttgaacctggatatatataatactggcaatatgtgcctaaaaataagggtgagtgtgcctcacgtggaccctgtaaaataatgtgctgattgtctaacacaatatatataggtactgaatttggttcattgaatgatgataagataactatttctacaacatttactaaactatttagggccctttgaatcaaagaatttgtagaagaatttcataggattgaaatcctataggaatttttcttatttggcccttttgattcaaaggattggagttttccaaataataaacaattcatatgaaatggctcattgtatataggttttggaggaaatttagcaagatgtccaacttcttcgaaagttcttttgagtttagctttctcatctgattcttgcatttttactgtggcccaatcaaacgatcatttctgtgttttttctgtgttttgcaattctctattttacacatcattttattagaatcctatattatattttttctagtcctctatttttgtattcctactatccaaagatgaacaggcgcgtccaccggcttcggtagtactggttcaaccagaatcagcatcactatcagtttaagctacgaactgacagtcatacacagtaacatcaattctagttcaattcctctaatctctaccgattgcaataggactgtttgattcagactttcgctagcactactaaaaaaccaataataggggacaacctcatatgtaccggttcatccaat

SEQ ID NO: 28559 - DNA, 2525 bp, Oryza sativa
tatttggtgtaatattttatgatttttgtatgaataaagatatcttataattattgtatgactgtcattattgtaagaataattatttgtgtacggtttttttgactcatgtagatggatcggcaatggatgtaccgctgacccggggcggggttccctccaaagagtttattgacggcgtgcactatttttgagagaggccgaagctaacaggcaaaggggttttatttgttgtccatgcaataagtgtaagaatcagaaggagtattctgcatccaggactattcatttccacttgtttgagtcggggttcatgccaagctataattgttggacatcccaccgagagcaaggtgttgaaatggaagaagatgaagtggaagacgacaatattccggactttgctcagtatgttggatttgaaggaaatcaaacgggcgaggaggaaatagctgctgatggtaacgacgttgcggatgatcttggtcagatgttgcaggacgccagggaggactgcgaaagtgaaaaggaggcccataaattggacaagatgttggaggaccacagaacttcgttgtacccaggttgcgagcaggggcacaaaaagttggataccactctggagttgttgcaatggaaggcaaaaaatggggttagtgacaaggcatttggcgatttattgaaactcgtcaagaacattcttccgggggaaaacaaattgtccgagacaacgtacgaggctaagaagatagtctgcccattaggactggaagttcataagaatcacgcatgtccgaacgattgtatcctatatcgcggtgaggagtatgagaacctagaagcatgccctgtttgcaaagcactacgatacaagattagacgggacaatccagaagaagttgacgggcagctaacaaagaagagaattcctgctaaggtgatgtggtatttccctataataccacggctaaagcgtttgttcaggaacaaggggaatgctagaatgttgcgatggcacgctgaagagcgtcaacaggacgggatgctgagacaccccgccgatggttcgcagtggcgaaacatcgacagaaaatttaaagaatttggaaaggacgcacgaaacatacggtttggtttgagtacggatggcatgaatccttttggagagatgagcagcggccatagcacttggcccgttacgatgtgtatctacaacctccccccctggctatgcatgaagaggaagtacataatgatgccgattattattcaaggccccaagcaacctggtaacgacatcgacgtgtacctaagaccactggtcgaagatcttaaacagttgtggaagaaggaaggtgtccccgtgtgggacgaggacaaacaggaggagtttaacctacgagcgctgctgttcgtaaccatcaacgattggcctgcacttagcaacctattcggacagtccaacaaggggtacaaggcttgcactcactgtatggatgaaacagaaagtacgtatcttaagcactgtaggaaggttgtatacatgggtcatcgtcgaatccttgcagcaaaccacccggtacggaagaaaggcaagcacttcgaacataaggccgaccaccgtacgaagcctaaacatcgcagcgggaaaacagtgtttgctatggttaaagatcttaaagtagtgttcggaaaggggcctggaagccagcatatagagagcgaagatggtcacgcggcgatgtggaaaaagaactctatattttgggagttaccatattaggaattcttggacgtacgccacgcaatcgacgtgatgcacctcactaagaacctttacgtaaaccttcttggcttcctaggtgtatacggaaagtcgaaagatacactggaagcacgtaatgatctgaagcatatggaaccaaaggagaaaggaagccattacttgagtccagccagctacactcttagcaaggcagagaaggaaagtatgtttgaatgcttggagagcataaaggtaccgtctggatattccacgaatatcaagcgaataataagcacgaaggagaagaagttcacaaacctaaagtctcatgactgtcacgtgttgatgacacaactgctaccagttgtaataaggggtatccttccagacaatgtccgggcaacaataacaaagctatgggcattcatgaacgcaatttcgcagaaggtcatcgatccggatagattagaagcccttcagaatgaagtggtgcaatgtctcgtcagttttgagttgatatttccaccttcattttttaatataatgacgcatctgctttgtcaccttgtgaaagagatccgtattctcgggcctatgtacctacacaacatgttttctttcgagaggtacatgggcgttctgaacaagtatgttcgtaaccgtgctcgtccagaggcaagcatcgccaagggttatggaacaaaggaggtcatcgaattttgcgtagaatttatcgaagaccttcgcccaatcgggagac

SEQ ID NO: 28560 - DNA, 1596 bp, Oryza sativa
agttcgcgccaggaacatcggtaagtccgatgcatggattacacggcatcacattgatactttccccgcgtggctacgacaacatctcatgggtaacgagtcgatcaaccaacaacttgccttcctggcgaggggaccatctgggtcgatcgcgacattccagggatatgagatcaatgggtacacattctacacgagagcccaagacatgaagagcacgaaccaaaacagcgctattcgtgtcgatgccatgggacacgatggaacaactgccacgtattacggtgccatcgaggacatatgggaacttgactatggtcctctcaaggttcctctgttccggtgccaatgggttaggttgactggtggaggcgtaatgatttatgacagtgggatgacaactgttgaccttaacaaggttggatactcggacgaaccttttgtccttgccaatgatgtaacgcaagtctttttcgtgaaggacatgtctagcaaaggaaagaagggcagagggcctgatgagcctaagcgtcaagtggttctcccaggcaaaagaaaaatcgtcggagttgaggacaagactgacgaggattacgatcagttggatgggcaaccccctttcacggtgacgattgaccctagcatcctcctatcaaatgaagacaccccttactcacgcagcgatcacaaggagggaacaatagtgaggagaaagtacgtgccgtaattattgtgtacacgatgtaaactattttggatgtattgattatccatataaatcaattgatgtatggcatatgttaattacgcacgattattagaggtttcaacaagtttaaatcatgtatatgctagttatatgtgatacttacaatttttaaaagttttaaatcacacaggtggcaatttcatatgtatgttaattagagtttttaacatttaatttactagcattcatatgctaattataattgactagaggatttttaaaagttttaaatcacgcaagtggcaatttcatatgttaattagagtttttaacatttaatttactatcattcatatgctaattataattgactggagaatttttaaaagtattaaatttaatatatttttaaaactatcattcatatattagagtttttcacaatttaatttactatctttcatatgctacttatatatgactattcgaatttttaaaaggtttaaatcatgcatgtggcatttacatatgttaattagagtttttagcatttaatttaatataattcctacgctaagtacatatgatgattacaatttttattaattttaaatcatgcagtatgtacatacatatcttaattagagtttttaccaatataataatatcattcatatatatgctaagtatatatgattattggaatttttattaattatatttgcttattacgatttatccacttaatttatcacagacaaaaataatttttcgaggtaattgtcattaatctttgtactttaaataatgttaatgcattaacttctattttataaacacatatgtaagtgaaaatcatatgcagtgctataatctttagtcccggt

SEQ ID NO: 28561 - DNA, 608 bp, Oryza sativa
ctcgtcactggcgctccaatcgcctcgatgggcttctcctccagatacagctgcagatcctgggcgggcacaccgttgagcgtcacctcgtagtgcagattgcactcgttgtcaatggacatccaggccatgccgacggcatgtggattctgtgcatccgtgtgctcctgtcgcttcagcagaatgggttccgccgagtcccgagcatcggccactggacggggcactaggcggccacggatcaggctcgtctcatgctcggtggccacattaacgcccagttcgccggcatacagcgactcgaggaccttgggacccaacttctccacactaccaatggcctggttgaagttgaagctcggcgtcagatcctccagcttggccttccgcttgccctgctcctcaatcaaactgatgttgggcctatcccgggtgttcacgtgctccgtttcgatgttgtaggccagagatccatcggtgttcaagtagacccacgccaaaccgctgctcttggtcgaggattcggcactgtgcggcgccagcagggtctggaagatttcgcagctggctcgggtcacgatgtgtccctggatgcgcagatgtgggta

SEQ ID NO: 28562 - DNA, 10578 bp, Oryza sativa
  unsure (1)..(10578): unsure at all n locations
attggaggatgaagttgcaaaccttttaggcacctccgatttgtatgtaatcaccaaaataaattcaatagaaattttggcatgacctcccctcttttttgaagaaattttgaagcttgctcgggcagctggaggaggaaaaagacatatatataggggtgggactttagtcccggttggtagcaccaaccagggctaaagatcaccgagatctttagtcccggttggtgttaccaaccgggactaaagatcccgggggggcctgataggccctgacagcattcgaaccgggactaaagatcggttggtaacacaaaccgggactaaagatcaaatatgtccgttacccttttgaaccgggactaaagatcatctttagccccggtttttattgcatccgggactattgtggaaatcggccgaccgacgaaagatggtttctccaccagtcctatgatatcatataagtataggtgtattacaaaaccaacactaataatataattacaagattttctaataatcgatacttttatacaagaaaagtgctggtttttctaataaatcagcacatttgctgagccgtaccagcatgcagttgagcgtggagtgggagattgaggacaaaaatccttcaagtatcgtaattctcattgctctcggccttataatctcacatctcatcatctctcatctcccaacccgatcccggccggccgtctctcccagcaaggcaagggtgcgttcgcctcctcttcccccagccggcgagcggcaggactgcctcctttattcaccctgttcactccgtttctcctcatccactacatctcccttatgcaactctccctcttccctcctcttcgcaccactcaagctgacactaggccacgggcaatggccactttctccctagtgtgacggtcactggatccgtccacatagcgcatagtgaccacgagatccagccaactagagcctggcctggagctcaacctccctctcctctcgatatagttgtagtcacgatgatgcatcgagtcagatttttctgattcgtgacctaaaaggtgccagtttatgaaccgtgtcatcgatgattcttcccatcaggctggaatggggtggcttggtaatccggcacctatacgaggtttcgaattgacactcattgggtgttctgtactagtatattttgttaattagcgctatatttctgattacgatttggtctaaacaattaactattgctaatgtgaggtatatatctgactgtgtaggggatttaaatacaagaaacanacacatcagaatggggtggtaggaagtcattaggaacacaaaaaccaaattatttttttgaaataaatataacacaaatagaactaacctgataaaattgagtctaacgaacgttgtaattaagtccggtttaaccggacgtataccatgtctgctggtgtgcctctgttctgaccgctgatagatctttggtctaattggaaaaaatggacaaacataactctttacaagatgatcaacaatattgcatcaaggtgagttcataatacctctaaaccgcctctccaccttgatgtattataaacagatattgagacaaattcttttattaaatggcacatcacggaccttgcacgtaattatactcaatatatatttgtccataaatataaagtattttaggttatttaataaaattttaaggtgaagggtgaaattattctgttgtctcaaaaataagttgattggaaattaaagaacagtctagcgatgtactgctccctccgtcctataatataagggattttatgtccaaatttattatattaggatgtgtcacatccatccaaaatcccttatattataggacggagggaatactaactactactctctccgtcccaaaataaacgcagtcatgaatttccgtgcacaactttaatattccatcttatttaaatttttttaaaaaataaaaacataactattcatgttttataatctaataataataatatgctaattatagaaaaattttaaataagacgggctacgtttattttagacgcatggagtacagggaacgcaacaaataatgtcgttgaatgcatggatgagatcagatcgatcacgtgcaggtacatgcatacagtatgtatttcacgtgggtatacgcatgtgtcagaaaactattgcatcgaaccaaacgcttagttatatacgccctcggaatttgatgcagcgaattatccaccctgtacatttgttcacgaatgctggtgcgaattgaatgcatgtgtatcacaattaattcacagacctgcgggtctctcttgtactacatccgtactaaaatatagtaatttttagctatatatctaaatttatagttaaaaatatttacgtttgagacggaggaagtagtcttaaaaaaaattagtgatcggccgttgcacacttgtacagctgactacagtggctgtccgccatgcttgtacccaatatttttatgtttataacaaatttttgtattgttcttttcaggccggtactacaactaccaaaaaggtcaaccgtatggtgctggtgcaaacaatgtggagatttttacccgtgtgccattaaaaaacatgatgcctgcctctgtgccactaaaaagttcgagcctctctctatgccatcggcaaactttatcgcgccctccacaccattcagtcctttttagtcctaacggtgtcaaacagcgcaaccaaatgactttgttgcccttagacttgagagcccatttggtgaagtttgttttcttctgtgccattcggagggcagccattcgggctcaggggcgcggccggtgcagcggcgaggctaggtgcggccgtcgcggtgaaggagcagatcgcgcggccgtcatggtgaaggagcgcattgcacgggccttgcggctgtacaagaagncgcggcgcggtgncgncaacggtggcgggtgaatggtccaggtgtgggcgccggtgagggacggcgcccggcgcgtgctcgccacgcgggggcagccgttcgtcctggcgtcgcagtgccaccgcctgttccagtacaggaccgtctccctcacgcgcgtcttccccgtcggtggcgccgccgccgccgacaagcaggggcttcccgccagggcgttcgacacggggacgccggagtggacgcccaacgtgcagtgctacggcagcggcgagtacgcccgcattagctacgcgctcatctacgacatccagggcagcctcttcctccctatccttgaccccgacgacgcgagctcccccctcgccgtgcatgagctcgtcagcaccgtgctgcggctccgcggctccggagaggtcgccaacctctgcaacactcttgaggcaatctctctctcgctctctcgatctatctgcaactaagatcaagaaataattagctacagcaattagcaggagtgattagattagtgaactgattaacatttcttgtgttcactgagaggtgcagggattactcgccgtgaaccagatagtgaatccagatgagacccgggcggccatggccgaggtatcgtagctcctaaccatggtgtgtgtctgtgtgaagctcacaagctgccattggcacgcaaacatgggtgagatgcaggagcggcggaaacgacacggagaaggccgcgctgacgaccgccggcgcaccgttccacctcgccgccgccgccgccgggcaaaggaggtggtcgggcgccagttggaggggtggccggtggcgctgtccgctcggctcggcggagacggcggtgacgaggaaaggggagggcggcgtggcggcgcgggcgtccagcaactcggccacgctcggctgggtgttggctgggagtgacgcggacacggatgccgcggagataggggaatcgagagagaagagagagtgaaagggcaagagcgacatttttcctgctcgagcccacatgccagagctactaaacagttaaaaccaaacagaatagtgacggaatggtgtgaagggcgcgataaagttcgacgatggcataaagggaggttcgaactttttagtggcacagaggcaggcaccatcttttttaatggcacacagggaaaaacctcaacaatgtgtgtatgcgatgtttggatgcgccatactttaccacaattaaaataaaggcagttgtgatcggtacaaaagtgcggtgttgttaatgtaaattatatcgtgacacatgaagacacgagagatctacttagtttcagtgtagatcctatcaattgggattagagcgtgctagacagttagtttgatactacaactgacaagatagataaattgatgataaaaaaaccgaccgaccaataagccgatgtagtgatactagtcgatgttgatagggttttgaacaaacggctatatatccaatatagattctgacactttgataaagacaatggaagcacttgaacaaacaattcaatcggccgatgataatatgatgaagtagatgtcttatgaaccaatcgaccgatattgatatataatattaaatgtaagctctatggttaaagcataaatcagttggaagtccgatgtaaaaataagttatcggttaatactccgataaaacgcagcacaaataatatataaacttagcaagacttagattgttagtagtgacctaaccgcgagacagttctaaattgcgtctgatcaaacaatcttggtaagttgatagatcatctatgctaacgtgatagatataacaaatctatttaaaacaaatcgactaaggctgaagatcggacctaatcgagacaatcctaactaaaccggtatgtctctaaacaacacagtgcaattaaatatgtaattgaaacatcacgtagacaaatataccaatcaaaccagattaatctaagaaattgaagtgatgtagccttgaacaacactaaaatagcttatacaattgctagggccaaccgaacttagggcttacgccttcatgggagatcgaagcaatgcagccccgcgtcaggtgccagtttcgtcggtgataaaacctcaaaaaagagggcggcaatgttctataaatcttattgatcgagagataatttataataaccacgagtgtatgtaattatagccataggtagacactagtactctctccgtccctaaatatttgacgccgttgattttttaaacatgtttgaccgttcgtcttttttaaaaaaattaaagtaattattaattcttttcttatcatttgattcattaaatatacttttatgtatacatatagttttacatatttcacaaaagtttttaataagacgaacggtcaaacttgtttagaaaaatcaatagcgtcaaatatttagggacggagggagtccttcttagacacaacacaaacattcctaaagataaagtaaaagacacgagccttgatcggactctaaacaatctctcctaaaaataaaaagaaaactaacagacgttgccaaattaatagataaattaccatgcctcgtccttcttaaactcgacctcttctggataaacttcctttaattaattaattttcttaactgaatacactaataattcgattgctggcagatgatatttttcataggtcaattttagaactctgtggtcgatactgtctaggtcgataacgacttcgggtttaccaaattttaacgttaacatgtgcacaatagaaaagttagaaaacaattgcctctatgggcatgtacagtagagtcgctgcagcatggtcatgttttctcttgtaaactggtactgtgctgtagcagcaatatctgccgaataaaccttacaataacatgctttctagatttattaacattaatataaatatgaaaaatactaaaatgacttatatgtgaaacagagggagtaataaattacggccgtgtaccaaatttaatttgttggagcattaatttgtttacgtaggattaggaagtactagctatagataaaaaaaaccctgaattattggagcatctccgattttccatgcatgaatgcatgacgacattcttgcttgtcctctagctaaaaataattttagttcccaccctaaaatttttcatcctatcacatcgaacatttgaacatctacatgaagtattaaatatagactaaaaaaactaattgtataaattgcgactaatttgcgagacgaatcttttaagcctaattgctccatgatttgacaatgtcgtgctacagcaaatattaattaggcttaataaattcgtctcgcggtttaccaacggattctgtaattagttttcttataaatgcccgaacactccatgcgacaccctatgtaataaccgatgtgacacgtcaaaactttacacccctgaatctaaacagcccctaattctatcatcaccagtgtattcccttcatcaaactatttataataaattattaaattaaacaatcgtgatccacgtgctgacaagtaggtcgcaccaaccacccagttatcctcttcttcaccgctataaaaccccatggcctcctcacacttccccccgcagcttgtttagcttaattagcagtagcacaaagcagcaatataatggcgacggcggcgaggctgctcctcctcctcttcctcacggcggcagccagcgcgtgggagatgaacatccggttgccgacggagatgctgaacggcggcgaggccgtggtggcgccgatcatccacgcgctgcggccgctgctgggctccggcgggcagctggcggcgcgcgccggcgtggcgtgcgacagctggaggctaggcgtggaggcacacaacgtgatcgggtggaagacggtgccggccaggtgcgagggctacgtcggccactacatgctcgggtggccactaccgccgtgactccgccgtcgtcatcgacgaggccatcgcctacgccgagagcctccagctctccggcaacggcaaggagatctgggtgttcgacatcgacgagacctccctctccaacctcccctactacgccaagcacggattcgggtacgtatactatacgtacacgtacacgtacacaccactttccttgcagtattacctatacatatatatcttgtattatacgtgtattgctgcaggtatatacgcctcatttcagttgggacttacaccgcgcgctgacttggttatacatttatctactggcaacttgctggcaagataatactactatatatgaaaaaaatatctaaaaatctagctgatgtgacataattaattaagtgtcaaaattatgatgaactatttaatgtgcatacaaatatacagtatgtgaacgtattattaaattgagaccggcctgcctagttcacaaattaatataggaaatactggggtattacaaaatgtgaagtcaaagatgaaaagtatatatcatccaattaatgaatataacacagtaaaacattctcaaaatagtaaaaaatagcaaggagatgcgcatctatatatgcttagcaagattccaccggacattccaagacctcgcaaagaactagataactttaagcattatattgattaagaggataaaaagaacactatgcacttgtccatgtggctatttttaggcaaaccactgaaacctttattagattcttcaatcaataatttattactagcctgtaggaagtcagaaccctaaaaaaacagattggaccagcagatcaggtaatgagtgatgcaaacatgcacaggctggcagacagtacattttgtcgggcttatattgtccagcagtcatataagtcagatccaaaattcgttctttcaaaaaaaagatccaaaatttaatcgttatacaaattatgggtggatttatggaccactgcatgatgagggcgttagttagatctttcactaattgttaattttttcaaatatgcacaaaagttggaactttattttgaattcctgtaagttctaaattaatgaagagtttcattaatgattttttactaacacccggcagagctacactgtacaatgatacgagcttccgcgaatacgtggcggaagggagcgcgccggcgctgccggagacgaggcggttgtaccggcggctgctccagctcggcgtcaagccggtgttcctgacgggccgcaccgaggaccaaaggaacatcaccgtcacaaacctccgccggcagggatactccgggtggatggagttgttgctcaagccagcagtgcacgccgccggcgagctccaggggtccgccgttgcatacaagtccggcgagcggcaaaagctggaggatgccggtttcaccatcctcggtaacattggtgaccaatggagtgacatcctcggtacaccggagggcgcccgcaccttcaagctgccggaccccatgtactacatcggctaggttgctgagtaacaagtccaatgaggcccagactccgtgtcacgtgcgtttcatctttgttttgtcttgaaatgcttctaagttacaataattttcgacgcgcgtctatctgtacttttccttgtgagattgatgagatttgtaatagcatgtacgtgtaagagcggtaaatctatctagctatgtactattgagcaagcttgtcgcgtgcgtatctttgtctaataattaagaaaaattgcaagatatctcaccaaatatcatccttagtttaagattttcctatatatataaaacgatttattccgaatacctgtcctttttcctacttatttaccttagattgaccccggcccattagatgtagttcacgccctatttttttttctttcttttgcaagtgttatatgacttagcacatctcttgatagacatgaccccaaacattcttttcaaaacaacagtcgcattgaactcatctttctcattttgaatttgtcgaaaaaccagctgccacggaagagtactcgtgactaccgtcgcccaatggcatactggccaccctaagtggggatgctacgatcgtgtaataagcctagcaaatatgggtgacgatcatggttcatcgtctatgagtatttatacgggcacatgataatatatatgaaagggaacgggcagatcgaggagtatacattatctaaaaatacagctgatgtgataattaattaattattgccaaagctagctaggatgaacgtgcatacaatatacaatatatgtgaacgtataattaaaatgaaaccggcaggcccagtgcatatatagaaataatacaagaagtactctgatattgcaaaatgtggagtctaacttgaaaaggtcgtccaattaatgaatattattaagaacgagataattccaggacctcacgaagaacgagataattaactttaaatatattgataaaacatactccattcttaaaaaaaaataacctagatggtaatatgatccatcctattacaataaatgtgaactaatctctcatatcttcacttaatttaggttaagtttttttttttgagggggatcacaaatgcatggtgtatgaggaaggaaaagatcataggttcattcatattatcgatcgagagcacgtgcagtacatttttagaaagatcactgctccctccgtcccattttaagtgcagtcataatgttccgtgtctaatttggatcgttcgtcttattaaaaaaaatttaaaaacataagtcaagcacgaagtactatttatgttttatcatcccataacaataaaaatgctaattataaaaaaaaattaaataagatggacgattaaagttagacacagaaacttatgattgcacttaaaatgggacggagggagtaataatcaagatttaattataagtggcctgtcagatgtcagacctaccttttaaaataccttttaaagaaaaaacgcattgcaccacatcaggcaataagtgatgcaaacatttcacatgctcgcagatggtacattttgtaggctagatgttgtccagctgtcatatgtagcaagtcatatccaaaatttaataatcgtggtcttgagaaaaaaaaacagaagaaacagagtcttttacaaagaaacagagcatatactaacaaccgatagaaaacaaatggaaaaagtatactttgactccctgaactatcgctcaagtatgattcatatcctccaaccataaaaccgggtatatcgactcctttaactattaaaactggtgcaaacaatatccctaggtggttttgactgatgtggcgcctacgtggcggttttgactgagtctttgtcctatacgtggacttgcatggcattagaataaaaaaaatatgtagaacccatatgtcattcacacaaaaaaaaaagtattgtgggacccactaacatatgggacccacatgtcatcctccctctcctttccttcttcctccccttctttctcccttatcccactctctccccctggcctttctcttcaccagagtggcggcggctgcggtgg

SEQ ID NO: 28563 - DNA, 4794 bp, Oryza sativa
ccgcgacagcggcatcgtcactcgagttaggatctggctccgcgacagggagcaccacggtgttcgccgtcgccgactcgatgggcatctcggccaccatctacatctcggccgcctcgtccccaccgccaccgccaccgccgccgtcactccccgccgccatcgtccccatgtcagtcgcggataagagagagataagggagagagagggggaggaagaaggggaggagagggaggatgacatgtgggtcccacattactttttttttattctagcgccacgtaagtgccacgttggacaaagactcggtcaagaccgccacgtaggcgtcacgtcagccaaaaccacctctaaaaccacctagggacattgtttgcaccggttttgatagttggaggagtcgatacccggttttgtggttggaggagatgaatcatactcaggcgatagttgagggagtcaaaatactttttccaaaacaaatactgggggaattccaatactaggatcgacaacttaattatcaaaagaggtccccaaaattcatatgagttagcaacttatagataccctaagccaaagcaaaacaaatcgtcagataattacagctgaatctatccctttttctcttttcttttacagcggcatgtattattttcatatgcagttgcctccttgtatggcagagcgaaacgggcgattcgcagtgctctggtcaaagcgctattgtggttgtgtgcgcgcttgctctcgtgttaatgcatttaagcgaccatgcccggtttgcccgtatataaggggcaagtagatgttcatatttttacataaagactactgatactctagaaaattgcgaagaaatcctcctatcaccaatacctcgttgtgcttttttatggtaaaacattttgaccttgagtgaaatataatgcgaagaaacggaagttccgtttctaattatatcgcactaaatcttaaaagtatcaggacattctcataaaaatacatcaaaatccaacatcaatcctatcccacctcttgtttagcgcctaccgtacccatccctacacccaacacctccctgccttcctcccatacaccatccgcctatgcctcccctagctgaccagccattgttgctctctcaaccccttaagctcacgccctcctcgtcctggcatccatgctgccttttccccttcttgatccagccatggctattctaaggggaggagtctagcggtggacttgctgacaagggagacgatgggtgtaagcattaccgctgagccaccctcaccccacgctggcgcgggattatcctacaccggtgctcccagatcctcgcctcccgccacccactcttcctcggtcacgcctcctaccaccgtccccgcctcctgcaaatcgaggaaggtggacggtagacctcagcaaggaggcgtggaggtggacgtcagcgtcgcggaggacctcgtggccctcgagtcggcatggggacaatgtggagtttgtcggtgatgacgagcaaggccatcggaggggagcaggaacagtggatgcaccatgcgtgggctctggcgccgccactcgtcctccctccagcaccttcgtctcctcttctcctcttccactttctagcggaggcaactgctttggatggcgtggctagagacgataacaatacctcagacctcaatggggcggctcacaaggacgagcttgaaggcaacatccttttctccaccgctatcctcctctagctcgacatgaggcgctctcctctatccctcccatccgctggcgagccgcacccttcaccgttgtgtgaccatgtacttctttcctatcattgggtggggtgagaacctcagtggtagtgcgcgggaattggggagcaactcggcggcctgtttccatcaagctcagcggcgagtgtggcgactgcaaacccttttgacctccccactcctcagcggcgacaacaacgacgacccagtgcagctggagctgctggccaaggcggctttcgtgggtgcggctgtgtgctgggccatttggttaactcgcggaattattggctctttaaaaatgttttgaataaatcctaggtggtgtacagtatagtgctttctccttgatgcaaaggtgcaaagggttatttctattttgaagaaccttaccttatcttcgttgatataaaagttagtcgatatagcggaacgacgactaaccttcctgatcgcttcagtcattgatcacccaagacatgccagatgacgacacaagaacacacaatatttgttaacgaggttcagccgaagcctacatcctcggggctctgattatgggcgctcctccccaaccaatatagctcctagccgctacgagtccatggcctcaccgccatcctctccctacgtgtctacactgcattgtagtcgccatggttacattgtgggtgcccccttctctatttaagagagttgccgggttacagagtttgactctaattccacccctaacacctatatcacaattccaagtcgaactgtaaccaaatagaactagtatatttgacgtctattctaacaaactccacctagaagtagtagaatcaccatgccgacccacctgtcttctagacttgagttgtttccttttcgtagcttcatcacaagccacccgacaagtctgcaccagactcactgccatcaagagactccgctatccctgcaacttcttcctctggacttcacctataacagtgctccaccttctctcttatcatcacagtcgtcttaccaagcgaaattgaactcctccttagctttcttatcatagactccttgaagaccatgttcacctcatcttccatctttgattttatttaatctaatccatggtttataacccgcgtcatcaccaaatagataaatcaaactcactagactaatgaagaaaccatttcttcattgtagtcttatgaaccgagctaataaatccaacatccacgcttttcgcatcctttgactgcgctccatgataacctaagaaaattcaccgtacgcctgaatcacttgaagaattatcatgacagccttcgctcttcctcttcagtgacgcagatttcatatatccccatcatgcaaacccgcaaatcctagatatatcctgtattgccaaacaacctgtttatgtcctcaacgattttcacccactgtttcccgagacttttcttcagttatggactaactccatatatcccaacctcttgtcaagtcccagatatatcatgttcctgccagataattctatatgcgacctaactagcctgcactccaacattcgcatatatatctagtaatttttcttatgggtttggatgtagccgaactgtcttggagaactgcaacaccctagtgtaccatgtgtgatgcggttgttttcctctttcttttttttaaattccttcacagcagggggtttccctagcatgcacatatcaaaccatgttatattgggcgtatgaacaagtacgcgctcgaacttaaggatggatgtgacgagatcgatggaccctatccaaacaaaccagatatgcatgaacatatgggaaacatgaggggatcaggtggcccagcatgctatagctagaagtcacatgtttactgtagcgtcacatagcctcacatatttactatagcatcacataggctagtcatggattaattaggctcaatagattcgtctcccgaattagtccagggttatggaatgggttttgtcaatagtctacgtttaatacttctaattagtgtccaaacattcaatgtggcagggactaaaaagttttagtccaccttgcctatcgtgtaaaacgtatatctgccgatgccgtacccttgccatgaggtcacaaggctacttgggccagttgccagcctatttaatgttttttcctcgatcgtttcaccgaacggtagatctttttccttcaaccattcaggaaatttgtgcttctgttccttcgagacccaagatgccggtcttcttgggttgcaagctctgatctcgttcatgtgttcctcaatgtacggctcgaggatggcgcgctgttgcagcatgctgctatgtgcttccgctacaactttataggcctcatcatagaaccatttcttgcttacggtccccttcccagctaaccggccctcgtgtacaggagggggcataccaatgagtgtggcgtccttcatataatctatacagcattcaaccacctcctcagttatgtacccgtctatcattgatccccccagatgagcttggttacagacataccatttcagaactgacatgtacctctcatacgcccacatatgatgtagatataggggaccaatttcgataatctgagggacgatgtggacaatcagatgctctatcatattgaagtaagatggagggaaaaacatctcaagctggcaagctgtctcgattgcgaatttatgaagggggcctaactcttcaggatcaaaaaccttatgtgatactcgattgaaaaaatagcacaactttgttatcaccaacttagtgtgaactggcttgaccgctcttatagcaataggtaggaagacagttaacatcttgtgacagtcgtgagcattgtacccagagatggtcaaatctttcatagatacaagttttctaatgttcgatgagaaaccagtcgagactttcaaactacgcaagcatgtacagaaagcttttttctcttttggtgtcagtgagta

SEQ ID NO: 28564 - DNA, 4089 bp, Oryza sativa
tattttattggaaattagacttaatatgacattattgactacggaattggtgcgactcctagcaattgactattgtagtcttaattagacttagcatatacgcacgaaacacttagcatatacatgactattttagtcttagcatgtaatattatttgagttttaatataagattattttatttgtaattagacttagtatataattatttactagctagggttgtataatatacgtcacctagacttagcttatatcacgatttgtaattagacttagcacgtaaggttgtgtagggttctaatgtacgacatttacacttagcatacatgacttagattgttaaaacataaatgtctcgtgacttagcagatgtttcttgtatcaacagatggctgaccgcgatgaggaacagatattgtacgatacaatcgcggagggaagcagccagtactggaatgaagaagaggggaacgaggatccaaaccagtacttgaacgaggaagggaacgtggagagggatgcggaggggaaccagcaggggcacgtggaaagggatgtggaggggaaccaggaggaggaggctagtggtagtcaaccctccgttggacagaagagggcacgcgggcaacgaggtgcagcgaagaagcttgagggtcggcacatcataacggaagtggaagaagatggacgtcctagtgccccggccgaagccgccaagaactatgtacgtcacagcggttgggctgtgcgggataacgtgcctgtcagtacggtgtactggcgaagaacaagggcacgcggagatcataagagctttgtcccagattcggagaaagagatgctgtggaccacaatgctcgagacattcacccttcctgcgggtacagaggacaaagtgaaaaggtggactctgaagaaaatggcagaacagtttcagagcttcaagggagatctgtaccagaagtatatactgaaggggcagacaccgaacttcgacacattcccaaagctaagggatcactgggacgagttcgttgcatataagacaggtgaacaagggcaggcgatgatggaaagaaacaaagaaaatgccgccaagaagaagtaccatcaccacttggggtcaggaggctatagcgtcgcgatgccgaagtgggagcagatggaggctagcttgattgagaggggtatcgaaccagcaacagccaattggccggaacgatcgaagttctggtactatgctcacggtggaacgctcaacccagctgatggctcactagtcttcggcgatcagatacgagaggctgcgcgacgactaacagatgcagtggaagcctcctctcagggcacgttccgaccagacagagatagggacgagctgacactcgccctgcaaactccagagcatccaggacgaacacgagggaaaggggtgattccttggaagattggtttcaaggaggacatccacacgtacaggagtcggatgaggagcaagagagataccgaggcgaagattgcagacctagagttccgggtatcgagctacgaactcaacatgcaagaggaggtggcaaggaaggttgatgaacgcatggccgcacatcggtcccatgatccctagccgaccattcctcctgcaatggtgagcccgtcaggaaaccgtagcagctgcgcctcaacggggcaggtaggatcacagagcatggacgccatgcaaacacaggacgaatcgacctgtcccattgatgacatcactcagcggacaccatgtgagctgcatattcctttcaagaacttatcaataaaggtaagatttagccattccgctagttgctgcttatatatgttgattactaataaataatctctcacaacatgaaggtggcgtcgggcatggccatcccaacggacccttcaggtacttaccactgcaggccgattccagcaggatactcgaaggtcgaagttgagttggtcgaaggcgcgtacgaggacctcgagctggattaccctggaggagacggtgagacgcatctacgagacacatgccatgccattattctatggcgcaggcggtacatcatcctccctgggcgacaagcggcgtctcgtgcaccatctcctccggctccgccatctcctcctcaggatcttgcaccgtctcctcctcatgctccggcagcaccgtctccacctcaagctccagcatcgactcctcctcaggatcctgcaccaactcctcctcgtgctcctacacctactcccccacaagctcctcttccggcaccttcaaagtcaggggccccccagctccaccgcctgcccacacaagggcaacgaagaaggcgaaagttgacgccgccaagaacaaggacccggggtacgattgcacgcaagaggagcttgacgcttacgttgcatcagaagtcaagagacaattcaagcctcgaagtccagaaaagaagattcttatagaccccagtgtcaggaacttctttaggggtatgcctgcatctgtcaaggaggccatcaagctatcggactatgagcgaacgctgaagaaagcatcttctggaaagtccaaaccagtccctcagcttggagagcaaccaaaccaggagatcgagccgttggtgaccggtaaagaaatgacgatagaacaatttattactgacaccggtctaactacggatcaattgctaggagtcgcaccaatcgaaaaggcggaagtgaaatacatgtacgaactcagtaaaccgcttgtcaagcctgagctgctgcagtccctacccacacaaatgtacaagttccatcagctgtacatggagatgagcaccaccggtagagagatgatcggagcgacgatcagggacacggacttcttgcaaggagatgacattctctggatcaatttcaggggaatctacgaactataccagctggacgccctgacgtctctattatgagttgctggattttgtaagtatatcgttcagttagatttcttactatacgtctcctttaattaattaggtccttctatataagtagactatagaaaataatatactcccttttatcgttgtagaatggagattcaaagggcccgacggcgaagggttttcgatactggattcatcgaccctcggaaagtaaacgtcgcaatgctcgaccaatatccacaagaaacagaggacaatctcgtccatctcctgaaggcgcagcattacaagacgttcatactgttgccatacaacacagagttagtttaattttactctcttcctacataccaaatttcattcccgtacgaacttgctaagtgtttcatatgtaatgcatcccacgcacattgcagattccactgggtgcttttactcttcgacctggaggcctgcaccgtcaacgtatatgactcaatggataaaaaagagtctacgtttgacaaggttttcgaacttatagacaggtaccgtcataagttcctttgttaattaagaaaatcttgttatgttaattgctactacgaatcatagctttaaactccatgtagggcttggtatcggttccgtcatttggtccgcgacaaatggagagaaagacttaggcggaagttcaaatttcctgtgagtacacatcctctacatttatatttctccgattcaaatacatacaagtgtatattaattagatctctcgttgtttgtcatttatttgtagtgcgcaaagcaaaagcagggaactaacttgtgcggctattacgtgtgcgagtattgccactgccttgcagaccaaatcatcaccacaagagagctcgatgtacgtacaaataaattcaaaatttcattacgtagcgatttcttgtttaattactaatcaatttcatacattcatatagtttattcgcatgagggataacctgaccacacacaaggaatttatcgcggcggttcaagaacaactcatgggattcatcaacgaagaaatccttgatcccaagggtgaattctactacgacggaaacacaattcaccggtccttagcttctgagctagcagtgagtactactacgtcgaaatcgta

SEQ ID NO: 28565 - DNA, 9005 bp, Oryza sativa
tcctggttatgtttaattttatcactagatcacctcacattgttcatgccatgattattgtcttaatattttagattaaaatatgccgatatatgactatatttccaacaatccaaaaacttgataggtcattttcggtagttagctttgctactgcactgaaaccacatgcttttgatggttctaattataagagatggaaagcaagtgcactactgtggttgacagcgatgtaatgtttctatgtttcacggggtaaacgaagtgaaccacctgtctctcctgaggagaaggttaagttcgaggctttggattgcctgttccgtggagcattgatcagtgtactcgctgacaatatagtggacgtgtatatgcacataccttcaaggaaggacatgtggaatgcacttgaggccaagttcggagtttccgacgccggcagcgagctgtatgtcatggagcagttctatgactacaagatggtcgatgaccgttctgtagtggaacaagctcatgagattcagatgctggctaaggagcttgagaacaacaagtgtgagttgccggacaagtttggggcgggtggcattattgccaaattgccaccttcttggtcagactttgccacttctctaaggcacaagagacaagagttccgtgtttctgatctcattggctctttgggtgttgaggagaaggcgagggcaaaggacaaccggggcaaaaaggttgagggaggttctagtgccaatatggtacagaagaagaacactcatgcatcccacaatagcaagaaagtcaagtctgatgtcaaacctaaggctagaaccaattttaagaagaaaggcaagggaaaggcaaagggagactgctttgtgtgtggcaagtctgggcattgggccgaggactgtcctgagcgcaaagacaggaagtctgccaacatggtcattagtgagggcggaggaacatcggggtacggtaaaattttacctacagttctctctgtttttcattcacctgattggtggattgatactggtgctaatattcatgtatgtgctgatatttccctgttttcttcttatcaggtcgggagaggttcctccttgttgatgggaaacgggtcacttgctaatattcatgtatgggttgttcatggtgttggtacggtcgatctgaagtttacttcgggaaagaccgtgcagctgaagaacgtgcagcatgtcccttcaataaagaagaatctagttagcggctctctactgtgtagagaaggttttagacttgtgtttgaatccaataaatgtgtcgtatctaaatatggaacttttattggaaaaggttatgacagcggaggcttgttccacttttctttggatgacatgcgtaataataataatgttgtgaaccatattagcgagaatgatgagtccaatgtgtggcattcgcgaccctgtcatgtgaattttggttgtatgacacgcttggctaacatgagtttaattccaaaattcactttggtcaaaggttccaagtgccatacttgtgttcaatcgaaacaacctcgcaagcctcacaaggcatctgaggcgagagatttggcacctctagaacttcttcattccaatctgtgcgaaatgaatggcgtgttgactaaagggggaaagaaatatttcatgacactgatagatgattgcactagattttgttatgtgtatctattgaaaacaaaggatgaagcattgcattattttaagacatataaagctaaggtagaaaaccaacttgaaaggaaaatcaaacggttgaggtctgatagaggtggagagtatttttccaatgagtttacatctttttgcgaagagtttggaattattcatgagaggacacctccctattcaccccaatcaaatggggtaaccgaaagaaagaaccgtactctaactgaaatggtgaatgccatgttagacactgcgagactttcccaggaatggtggggtgaggcagttttgactgcttgtcatgtcctaaataaaatcccaatgaagcataaggaagtaacaccattcgaggaatgggaaagaaagagattaaatctctcatacctacgaacatggggctgtttggccaaggtaaatgtacctatagccaaaaagcgtaaacttggaccgaatactgttgattgtgtgttccttggttatgctattcacagcgtgggttatagattcttagtagtaaactctgaagtacccgacatgcgagttggtacaattattgagtccagagatgctacattctttgagaatgaatttcccatgaaaaatacacctagcacttctaatcatgaaactgtcataccccataagcactttgcaccgatagaacacaatgatcaaacgcctgagggaaatcctgaggaggataatattgtagatactcgtaagagtaagagacaaagggttgcaaaatcctttggagatgactacattgtatacctcgtggatgacactccaagaaccatagaaaaggcatattcatctcctgacgctgactactggaaggaagcagtacgcagtgagatggactcaattatgtctattggtacttgggaagtcgttgagcgtccatatgggtgcaagcctgtaggatgcaaatgagttttctagaaaaagcttagacctgatggtacaattgaaaagtacaagacaaggcttgtggccagggttatacccaaaaagaaggcgaggatttttttcgacacctacttaccagttgcccgtttgatcacgattcgagtactacttgttcgagcagcctctcatggtcttctcgtccatcagatggacgttaagacagctttcctaaacggtgagctggaggaggagatctatatggatcaacaagacaggtatgtactagaaggtcaggtgggaatggtgtgtaaactgttgaaatccttgtatggccttaagcaagcacctaagcaatggcatgagaagtttgacaccacacttacatctactggctttgttgtgaacgaagctgacaaatgtgtgtactatcgctatggtgggggagaaggagtgatcttgtgtttatatgtcgatgacatattgatctttgggatcagcctcaatgtgattgaggaggtcaaggactttctgtccaagagctttgaaatgaaggatttgggagatgctgatgttattcttaacattaagctactgagaggagatgagggtgggattgcacaatcccactatgtggacaaagttttaagtcgctttggctatagtgactacaagccagctcctactccttatgatcccagcatgctattaaggaaaaaccgaagaatagcaagggatcaactgagatactcctaaatcattggttcattgatgtacttggctagtgcaacgaggcctgacatctcatttgctgtaagcaagctgagctggtttgtctcaaatccgggagatgatcattggtaggctctggaaagagtaatgcgctatctaaagggcactatgagctttggaattcactatactgggtacccaaaagtactggaagggtatagtgactcaaactggatatctgatgctaatgagataaaggccacaagtggatatgtgttcacacttggaggtggtgctgtttcctagaagtcttgcaagcagaccatcttaacgaggtcaacaatggaagcagaacttacagcactagatactgcgacagttgaggccgagtggcttcgtgaactcctgatggatttgccgatggttgaaaaaaccagtgccagccatcctaatgaactgtgataatcaaacagtgattattaaagtgaacagttcaaaggacaacatgaagtcatctaggtatataaaaaaagactgaaatctatcagaaagcagaaaaactccggagtgatagcattggactatgtccaaacggctaaaaatctggcagatcagtttaccaaggggctaccacgtaatgtgatagacagtgcatcgaggaaaatgggcttgatacccacctaaggttgcacaaaagtggaaacctgtccattttgatcggagatcccgtgaatttggatggcgaaacaatagtctattgtgtggctgagagaagagacccttgaaaagggctcattttcatgatgtacttctcttctattctgcatggtaggatggcttatgccttaatgtggtccaagtggcttttctaagcagagatgttgacttgcagagcatctcagaaggaacacacttatatgagttcgactgctagtcatagtctatgagatttgagcgatctctagatactcatgaaagggcctggagtttgacttatatgctccaaatagaggggatgcaaacggcagcccagtaccagtcaagggtttgactgaaacctgatcacacaagactgacaatttaaggcatagtccattattcaattatggtctgatgtagctcttttcctaggtggaagttcaacttaacagtctccaccaaaacactggtctgtcaaacaggttcaattttgagaacatttcttatgagccatgaaatttggtggggattgttagaataaatgggctaggcccgtttttctattaaaatctcaagggcccataataaatgttaaggataacaataccatcctgagaattaaaagtggagtatctgaacttaaatagggagttattggaggctccctattgaccggttgaggtggggatcggaaagccacacgcgcgcgcgcgctgagccgagcccgtggccgtgggcgaggcgtgcgttgcgactgcgactctctctctctctcattttgcaacggaccggaatccaaccccgcgtgattgcctctgtaatgggcaggcgattcaatacgcattgattgcgccattactgcggcaacgggcggattcctctcctgtgctattaggaaactgagaaccacgatcagatcttcacgctactttcctaacgccggttcttcgtccttgcgcctgtgctgcttctgctttccccgattctgatcgcttgcgcgcacgagagatcggaacgagcagggcctccggaaccacaccttcgcctgagatctacaccgggtaggcgggtgatcaggttttggggagtgtttccgcacgactgctcctcttcctcggttcgtcgtcccttcatctgcatcaccatgactggagctgtcgcacccgcacctggaggtggcgcacccagagctggcgcaccgatcgacaacaccaatggaggcagttctacctcacaatccagcggagggactttcacagggtataactttctaccgtgatctttgtgtttgttgcttctgttggtcgcaatactattgcgttctctccatgatgatgatgcttattctatcttaaacatgctcctagttatgtttaattttatcactagatcgcctcacattgttcatgccatgattattgtcttaatattttagataaaaatatgccgatatatgactatatttccaacaacaacctgttgatcgacagcaatctactcttcataatcagggttgctgacgacgacctctgtttctccttctttcttcctgatcagggcggctagggcttttgcagctccggtgaggtgaccttctagctttgcacctcttatagccgctagaacctgcgccttccatatggcgtggttggattttcctaatttctctgagctgaattggccgaccaggggattcccggcatggttcttcgaggagctcgccatggtacgacagggagagagctagattggatcttgctctgataccatgtgaataaaatagatgggaagcgttgaacccctctcggggccgcacctttgttaatataggcgagaatagccctcgccgtggcacttacaatctcaccgatcggttccagatcagttccaacaaacccggataatcaggaacacaatcggcatacattggataggaacgatatcacaagtgccaactaatctattcatatctctagaaaccatatcatctaacagagacaaacaaagcaattgatagagaatgctaagtcatttattcctgaagatgacatacacgatatcaatgtagactcgatgttgttgtgcaagtttgtagtacgatgttcatgtacctaatgcaaacattgcatattaatgaaaaacggttctcagctattatggcaatgcaaaaggtgattctgaataattctgatcctccatatacattttgttaatgcagtatcttcttgacgacaacagataaattttcagcaaccacacacacaaaacaaaaatgtctccaaaaatcaattttcaaaaaacttcagaaacacatgcagtccttaaaattggccgacgcatatctggtgcactaaacgaatatacatgagccattcagcccggaactgccattgatacaaagaatctgaagcacacaaaaattgagccccaaaatctcatctttacacccaggtcgatcctgctctcctcttgatatgcttccaaacttcgttatcctcgctgtcagcagaaaaatccaagaaatacagtggagatgaacgggtccaaatttggggtacaaacagaaattgtttttttttttcacaaatttagggtaccaatgactagagtggatccttattctcttgtcaatgcagttatatctatcacatcagaagcacataaatacagaggattgttgataaacagaagcaagaggcaagtaatttgagatttagttcgaagattggttgggtagcatgtacagaaggtaaaaatgaagtatgtccatcttttgtcgcaagaacaccattcatttgaatgatgcaatcgctaagagctgaagacactgctgaatatctgctcggtgacatagtcagctcgctctgcttgcaaaattcaggttgaagaaaacagcacagtttggaaaaaatgcttaatgccatcagtcctaatcccattcacagactaatcacgattagtcaaagatttttctttgcttttacataagctctgaactgtacgaggcttcctgcaacaaaagaaaaaaaaaagctaaccactaacaacagagcacgtaaaccaagcagtttagaagaattaataatcaacaatgatggttggtcaaacaaacacacttaaattttgttcaacagatgtcatgcacagctgaactgtttgttgatccataaattagcttcttcctagtgttgaatcggtaaactgcatccattcattttattgaattgtgcttatgtactccctccgtattttagtgtatgacgccgttgacttttcgaccaatgtttgacaattcattttattcaaaatttttatgcaaatataaaaatatttatgtcatgtttaaagaacatttgatgatgaatcaagtcactcccctttcatccctagaacacaggtcactcccctttcctgaccgggcagagcaaggcgacgaggcgtccgtgtgcggcaagctaaggacgtcaatcccctcccctcttcacaccgtgggtcgctccccttcccctccgctttccccacaggcggcgcagctccccctcccctcccccaccagcgcccatcgcatgccgcctccctccgactccgcatcatgcgatgcgcctcctccgctctgcgtagtgcgccataagagagtacgtatcaactaagtatggatcggaaaacgagcgacacaagaaatcgcggacgcacgcggacgtgactgcatggctgcctagtgagagactgctggccacgatacgcgagtaagtccgacacggcgtctacaattattcagaattattcagaattattcaaaatgtatatggaggatcagaattattcagaatcaccttttgcattgccttaatagctgggaaccgtttttcattaatatgcaatgtttgcatgaacatcgtactagaaacttgcacaataacatcgagtgtatattgctattgtatttcatcttcaggaaataagtggtctgacaataacaacctagcattctctatccattgctttgtttgtctcatcttgacttaccactgtatacgtatcttggcttgatcactgacaaaaatgagaaagaagcatagtatatttcttagtgcaaagatctaaagcatgacgattatatatggggataacagaaactgaaagtgaacctcccttacttcataaatacatggattacatttgcaaagcccaaaccttggcaacagatggatgcaaattaatcctgcaaactatatctatatttcttgatggcactctgctgcgaatcagaaaatctccgattctcatgtgtcataatcccactaaagatgggggctccatttttgtctcagggcagaagatggtttgtctatttcaacagccctgtggtcattaagagatttgttccggtccaataaaaagtatctcgatgtatcgataccttaaggtaccaaatcgttttatcattggatctagctgaataggttacgataccaaatcgttttggatctaacattgcacattgttagatccaatgatcgtaaacgatttcgtaccgtaaggtaccggtgcctccatatacttttggttggaccggaacaaatctcggtcattaagctttgcttcaagctccatgctgaaggtaactttggttggaagagttagttttctcggaaaacttgatactatttggcttccattccacgtttcttaacaaaagaaacttgcgattggaaatttagttacaactagaaaggtagcccgcgcacatgcgcgggcaccttctcgtataatgtaagtgaaattttattatgaatatttatgtgtgggtggctttttattaaaatatcttgtattatgttctaaactaaaattaaacttattttgtgtgctttgaaacctggttatatttttataattacccttccaccatataaattctaaaataaattacttgagctcatg

SEQ ID NO: 28566 - DNA, 5081 bp, Oryza sativa
gatctagcatgtatcagctaaactctgataccactctatcttaagatatcaaagcaaatagaatatttcaaccaaagcctaatattcctaaatgcagcaagatcttacattaaagggcaagatttaacatattaacgaagcatatagagtaaaaatagttaaatcaggtaagatcggctgaaaccccgatgctaccctaatcgtcaaccagaaggcaggctagagattgatattctaagcacgacttaatagatcaaactcaactgatgcagcattaaatatgaaaagaagaacaatatctagacaatcaagccactagatgcttcatagagtggtaaatatcctatataatctaagccaacgtcgctatttaacctaatcggctaccttctactaacagatgttagccgattgtaggttagataacgatattaccgaagattatataagatatatgataactcgacgaattacataaataagattagagtatcataaagatggaagcactaatcccgagaacgcaagctgctataacaagtttacctcttgttgaagatcgaaatcgatgcagctcaacccgaaagcaagaacttgtcgaaacaaaacgaaagcaacaattcttaaaccggctccaccagtaagatatttttaatcctttcactagttgatctcagccgattttgtctaacacttgtctcttttacagcctcctcctcctccttcttctcctgtacgaccatcatcgagtgaccatactccgtcggctgtagggagccatcatgttgaagaagaagaacaactagctgctcctaccattccagtaagtttccttttgacacaagaatttagatcggctatgtctacttagctctaacttcctttaaataattattgcaggtcctagccgatcttttctgctttgacattagagactatcttgatgagacagaagaggataccacaagcaaagctttagcccccttatccgatgatgtgaagaaaattcttgaagatatctcatcggctagaggcatcatcgttagacagcttagtggttgattgtggctcaattaggactcggctacatgaggttcaagctctgatcccagatgagctagccgatatccttactccggccgtatatctcgagcaacatcaattcaagctagagaaagccaagctgagactagctgaacgtcgggagcgcaaagatatcgaggctacaattcaagccaatcgacagcttgttcatgaagagaaggccaaacttgatcagctatctgagggcccgatcaaatctaatattgatcggctcgaaactcgtaagactgagctcttggcacaacttgaagaatgcaacgccgagctggacatggaacataaaaagctagccgatctcccaaattctgttgaagagcagaaggcaagactaaaatcggctatcaaaaatgttgctgatctgaccaagtttttaaaagtcatccctgtaaccgatgctcaaggtgcccatgccattgaagaagtagaaaaaatcaggcaaagagctatttcagctttccagcaatatttgtcttagtgatatcttatgtaataggtcttagaaatttttttgcaatcggctaagaaactctgactctttatgtaactcatctcaacaatctttaagccgatttaatatgaccccatatttggctcaaaaatatgcaatttttcatatatatatgtgccccccctaattttacaatgtcacaagcattgataaaattataaaagcggctaagggcgatacaacaatatcggccattatacatcggcaaaccataaccgattacaatatgaaaaacaactaagggcgatataacaaaggaggaactgattaaacggcttgctgattatcagtgatcaagggccgataattcgggaaagtacctccttgaagataaaccggtcccgtagtctgatagtcagctattgaaccatcaaccatcgacttcaccatgtttgacaaagtattgactaatatcccagattgattgatcaaagcatgatgtacggcatagtctacctgatcttggaagttattaaactgtagctgtgctgcgttactaacttggttaagattagcacctttaaatccctgagaaccatcaccttgaactccttgagagccaataccttgaactccttgagagccatcaccttggtctcattgaaaaccatctgcagcacctttatcagtcggttgagccgagccatctagagcttgtttcacttctccatccttagaagaaccggtcccaggaacatcagcaactacctttactttgtacttctgaactaatgttcccttgcgagtctccgtgaatgagctcaagaactgattccgtgcttactgcatcattgtatcaagatctttttgctgctcaagtgtcaatttatcaaaagtgatgggcacaatgttggcttcatcaatctcagatagacccagcttcaggatcttttctttaacagagccaggaccagccgaggacggcgatgctactagtttctcggccatgaggaaagctgctgttgtgattctgacttctgataggtcccaccaggcgtgccaaaagcgtgttgacgtaaaacacgaggcctgggagatctgcttaactctagtgcaggtccaaaactcgccttcgggtatgctagcgtaccagttgatttgatcctgcaatcaacaagaaacaaggacaaagaaaccgtggttaaatccataaacgatagccgatcggctaggtgccgatgacatattatttatctttgagccgatgtcatatatgcatcgatcggcaagtatcaataaataaaacagaactaaatctactcgatcggctatagatattaatgatatatgatccttatatcgatatatacttaaaaccaagtgattgggatagatcggtcgccatgccgagacagtataaatcacttagatcgaaatatatattaataatgagattatatatattcatagtatagccgatcagatagatctagcatgtatcagctaatactctgataccactctatactaagatatcaaagcaaatagaatatatcaaacaaaagcctaatattcctaaatgcagcaagatcttaacataaagggcagatttaacatattaacgaagcatatagagtaaaaatagttaaatcaggtaagatcggctgaaaccccgatgctaccctaatcgtcaaccagaaggcaggctagagattgatattctaagcacgacttaatagatcaaactcaactgatgcagcattaaatatgaaaaaaagaacaatatctagacaatcaagccactagatgcttcatagagtggtaaatatcctatataatctaagccaacgtcactatttaacctaatcggctgccttctaccaacagatgttagccgattgtaggttagataacaatattactgaagattatataagatatatgataactcgacaaattacataaataagattagagtatcataaagatggaagcactaatcccgagaacgcaagctgccataacaagtttacctcttgttgaagatcgaaatcgatgcagctcaacccgaaagtaagaacttgtcgaaacaaaacgaaagtaaaaagagtggcgatgcgccgagattgtattgaacgtgtgttaaattgattacatggggctcggggtctatttatacccgagaattacaaaacatgtccgtatcggacacgactcttatctctacaaactctaagataccataagtctttgcggcagacttttgcccgaatatatctctaaggaaattacataaaatatcctaattaatatatacaattgccttctcaagactctatccatgtgtggcaatcatcacgaagcacattaactcaacccgatgatgtataccgagtcgtattgtcggaatcggctgtatcagcttacccaatctgactcggactcagccgatcctgattgtagctgatttggattccacccgattcttactctgttcccgaatcgatcttcgtctttgattccgcttcgatctaatcttcatcttcgatactgacactggtggagaaaccctttgtagtcccggttcgtaacccccctttagtcccggtttccaaaccgggagtaccaatccgggactaaagatcgctatctttagtcccgggtgaaataaccgggagtaaaaatcgatctttagtcccggttggtaacaccaaccgggactaaagatcgagctaaccttttttttttgcatggccctgttgctgcatggtttatatatatatatatatatatatatatatatatatatatatatatatatatatatataaaccatgcatatatatgtttcaatacatatatatgcatacatatatatatatatgtatatatatatatattatattatattatatgtatatacatgcataatatatatgtatttatacatatatatgttatgcaaatgcatatgtatatagatatatatatgaacaaaatatatttacattatagaaaatgtgtacacatgcatatagaaacatatgtagtcatgtattaattacaatccattatatgtcctagctagctacgatttcgacgtagtagtactcgctgctagctcagaagctaaggaccggtgaattgtgtttccgtcgtagtagaattcacccttgggatcaaggatttcttcgttgatgaatcccatgagttgttcttgaatcgccgcgataaattccttgtgtgtggtcaggttatccctcatgcgaataaactatatgaatgtatgaaattgattagtaattaaacaagaaatcgctacgtaatgaaattttgaatttatttgtacatacatcgagctctcttgtggtgatgatttggtctgcaaggcagtggcaatactcgcacacgtaatagccgcacaagttagttccctgcttttgctttgcgcactacaaataaatgacaaacaacgagagatctaattaatatacacttgtatgtatttgaatcggagaaatataaatgt

SEQ ID NO: 28567 - DNA, 5244 bp, Oryza sativa
aacgtttgaacacttggatgaagtattaaatataggcttaaaaaataactaattacacagattgcgattaatttgcgagacgaatcttttaagcctaattgctccatgatttgacaatgtggtgctacagtaaacatttgctaatgacggattagttaggcttaataaattcatcttgcagtttattgacggattctgtaattagtttttttattagtgcttgaacgctacatacgacaccctatataatattcgttgtgacacaccaaaattttacacgcatggatctaaacaacccccttagctacactggtggagaaaccctttgtagtcccggttcgtaacccccctttagtcccggtttccaaaccgggagtaccaatccgggacgaaagatcgttatctttagtcccgggtgaaataaccgggagtaaagatcgatctttagtcccggttggtaacaccaaccgggactaaagatagagctgacctttttttttttgcatgcccctgttgctgcatggtttatatatatatatatatatatatagaccatgcatatatatgtttcaatacatatatatgcatacatatatatgttatgcaaatgcatatgtatatagatatatatatgaacaaaatatatttacattatagaaaatgtgtacacatgcatatagaaacatatgtagtcatgtattaattacaatccattatatgtcctagctagctacggtttcgacgtagtagtactcgctgctagctcagaagctaaggaccggtgaattgtgtttccgtcgtagtagaattcacccttgggatcaaggatttcttcgttgatgaatcccatgagttgtttttgaaccgccgcgataaattccttgtgtgtggtcaggttatccctcatgcgaataaactatatgaatgtatgaaattgattagtaattaaacaagaaatcactacgtaatgaaattttgaatttatttgtacgtacatcgagctctcttgtggtgatgatttggtctgcaaggcagtagcaatactcgcacacgtaatagccgcacaagttagttccctgcttttgctttgcgcactacaaataaatgacaaacaacgagagatctaattaatatacacttgtatgtatttgaatcggagaaatataaatgtagagcatgtgtactcacaggaaatttgaacttccgcctaagtctttctctccatttgccgcggaccaaatgacggaaccgataccaagccctacatggagtttaaagctatgattcgtagtagcaattaacataacaagattttcttaattaacaaaggaacttatgacggtacctgtctataagttcgaaaaccttgtcaaacgtagactcttttttatccattgagtcatatacgttgacggtgcaggcctccaggtcgatgagtaaaagcacccagtggaatctgcaatgtgcgtgggatgcattacatatgaaacacttagcaagttcgtacgggaatgaaatttggtatgtaggaagacagtaaaattaaactaactctgtgttgtatggcaacagtatgaacgtcttgtaatgctgcgccttcaggagatggacgagattgtcctctgtttcttgtggatattggtcgagcattgcgacgtttactttccgagggtcgatgaatccagtaacgaaaaccctccgccgtcgggccctttgaatctgcattctacaacgataaaagggagtatattattttctatggtctacttatatacaaggacctaattaattaaaggagacgtatagtaagaaatctaactgaacgatatacttacaaaatccagcaactcataatagagacgtcgagggcgtccagctggtatagttcgtagattcccctgaaattgatccagagaatgtcatctccttgcaagaagtccgtgtccctgatcctcgctccgatcatctctctaccggtggcgctcatctccatgtacagctgatggaacttgtacatttgtgtgggtagggactgcagcagctcaggcttgacaagcggtttaccgagttcgtacatgtatttcacttccgccttttcgattggtgcgactcctagcaattgatccgtagttagaccggtgtcagtaataaattgttctatcgtcatttctttaccggtcaccaacggctcgatctcctggtttggttgctctccaagctgagggactggtttggactttccagaagatgctttcttcagcgttcgctcatagtccgatagcttgatggcctccttgacagatgcagacatacccctgaagaagttcctgacactggggtctataggaatcttcttttctggacttcgaggcttgaattgtctcttgacttctgatgcaacgtaagcgtcaagctcctcttgcgtgcaatcgtaccccgggtccttgttcttggcggcgtcaactttcgccttctttgttgcccttgtgtgggcaagcggtggagctaggggggcccttgactatgaaggtgccggaagaggagcttgcgggggagtaggtgtaggagcacgaggaggagtcggtgcaggatcctgaggagtcgatgctggagcctgaggtggagacggtgctggcggagcatgaggaggagacggtgcaggatcctgaggaggagatggcggagccggaggagatggtgcacgagacgccgcttgtcgcccagggaggatgatgtaccgccatagaataatggcatggcatgtgtctcgtagatgcgtctcaccgtctcctccagggtaatccagctcgaggtcctcgtacgcgccttcgaccaactcaacttcgaccttggagtatcctgctggaatcggcctgcagtggtaagtacctgaagggtccgttgggatggccatgcccgatgccaccttcatgttgtgagagattatttattagtaatcaacatatataagcagcaactagcggaatggctaaatcttacctttattgataagttcttcaaaggaatatgcagctcacatggtgtccgctgagtgatgtcatcaacgggacaggtcgattcgtcctgtgtttgcatggcgtccatgctctgtgatcctacctgccccgttgaggcgcagctgctacggtttcctgacgggctcaccattgcaggaggaatggtcggctggggatcatgggaccgatgtgcggccatgcgttcatcaaccttccttgccacctcctcttgcatgttgagttcgtagctcgatacccggaactctaggtctgcaatcttcgcctcggtatctctcttgctcctcatccgactcctgtacgtgtggatgtcctccttgaaaccaatcttccaaggaatcacccatttccctcgagttcgtcctggatgctctggagtctgcagggcgagtgtcagctcgtccctatctctgtctggtcggaacgtgccctgagaggaggcttccactgcatctgttagtcgtcgcgcagcctctcgtatctgatagccgaagaccagtgagccatcagctgggttgagcgttccaccgtgagcatagtaccagaacttcgatcgttccggccaattggctgttgccggttcgatacccctctcaatcaagctagcctccatctgctcccacttcggcatcgcgacgctatagcctcctgaccccaagtggtgatggtacttcttcttggcggcattttctttgtttctttccatcatcgcctgcccttgttcacctgtcttatatgcaacgaactcgtcccagtgatcccttagctttgggaatgtgtcgaagttcggtgtctgccccttcagtatatacttctggtacagatctcccttgaagctctgaaactgttctgccattttcttcagagtccaccttttcactttgtcctctgtacccgcaggaagggtgaatgtctcgagcattgtggtccacagcatctctttctccgaatctgggacaaagctctcatgatctccgcgtgcccttgttcttcgccagtacaccgtactgacaggcacgttatcccgcacaacccaaccgctgtgacgtacatagttcttggcggcttcggccggggcactaggacgtccatcttcttccacttccgttatgatgtgccgaccctcaagcttcttcgctgcacctcgttgcccgcgtgccctcttctgtccaacggagggttgactaccactagcctcctcctcctggttcccctccacatccctttccacgtgcccctgctggttcccctccgcatccctctccacgttcccttcctcgttcaagtactggtttggatcctcgttcccctcttcttcatttcagtactggctgcttccctccgcgattgtatcgtacaatatctgttcctcatcgcggtcagccatctgttgatacaagaaacatctgctaagtcatgagacatttatgttttaacaatctaagtcatgtatgctaagtgtaaatgtcgtacattagaaccctacacaaccttacatgctaagtctaattacaaatcgtgatataagctaagtctaggtgacgtatattatacaaccctagctagtaaataattatatactaagtctaattacaaataaaataatcttatattaaaactcaaataatattacatgctaatactaaaatagtcatgtatatgctaagtgtttcgtgcgtatatgctaagtctaattaagactacaatagtcaattgctacttgtcgcaccaattccgtagtcaataattacataccaagtctaattacaaataaagtaatattatattaaaactcaaataatattacatgctaagactaaaatagtaatgtatgctaagtgtttcgtgcgtatatgctaagtctaattaagactacaatagtcaattcctaggagtcgcaccaattccgtagtcaataatgtcatactaagtctaatttgcaataaaataatcttatattaaaactcaaataatattagaacactacacaatcttatatgataagtctaattacaggtctaataatcttaattaattgcattacaaatataacaatcatttatattattacgtcacttgcctgctccaattccttatagggctagctcttccactcaggcttgacggacgactccgacaacacgtcttttctgcaagatacaaaaaaatgtattaggataaatgcgaagtaacatatatatatatatat

SEQ ID NO: 28568 - DNA, 23518 bp, Oryza sativa
atgcatgaagggagatgcggcggctctcaccccagagatgcggcggcagcggaggaggcggaggcagcggcgaggacgacgagctcaagacgacggcgagatacggcggcgtcggcgcggggatttgccctaggcagtggcggcgaaggagagaggccgagagagatcgatcggccgaaaacgtttaagtgttggtgaagaagacgagggcgcaccgggaatatatatacccccggatctttactcccggttgttctcaacaaccgggactaaagatatctttagtcccggttgttctcaacaaccgggagtaaatatcttttcccgctatttcgaaattctttttaaacccggttagggttaagaaccgggactaaagattatagcactgcatatgattttcgcttacatatgtgtttataaaatagaagttaatgcattaacattatttaaagtacaaagattgatgacaattacttcgaaaaattatttttgtctgtaataaattaagtggataaatcgtaataagcaaatatatgacttataattaataaaaattccaatatatatatattcttagcatatatatgaatgatattattatattggtaaaaactctaattaagatattaatgtacatactgcatgatttaaaattaataaaaattgtaatcatcatatgtacttagcgtaggaattatattaaattaaatgctaaaaactctaattaacatatgtaaatgccacatgcatgatttaaaccttttaaaaattcgaatagtcatatataagtagcatatgaaagatagtaaattaaattgtgaaaaactctaatatatgaatgatagttttaaaaatatattaaatttaatacttttaaaaattctccagtcaattataattagcatatgaatgatagtaaattaaatgttaaaaactctaattaacatatgaaattgccacttgcgtgatttaaaacttttaaaaatcctctagtcaattataattagcatatgaatgctagtaaattaaatgttaaaaactctaattaacatacatatgaaattgccacctgtgtgatttaaaacttttaaaaattgtaagtatcacatataactaacatatacatgatttaaacttgttgaaacctctaataatcgtgcgtaattaacatatgccatacatcaattgatttatatggataatcaatacatccaaaatagtttacatcatgtacacaataattacggcattacatcggcggtgacggttgaccgcacgtactttctcctcactattgttccctccttgtgatcgctgcgtgagtaaggggtgtcttcatttgataggaggatgctagggtcaatcgtcaccgtgaaagggggttgcccatccaactgatcgtaatcctcgtcagtcttgtcctcaactccgacgatttttcttttgcctgggagaaccacttgacgcttaagctcatcaggccctctgcccttctttcctttgctagacatgtccttcacgaaaaagacttgcgttacatcattgccaaggacaaaaggttcgtccgagtatccaaccttgttaaggtcaacagttgtcatcccactgtcatcaatcattacgcctccactagtcaacctaacccattggcaccggaacagaggaaccttgagaggaccatagtcaagttcccatatgtcctcgatggcaccgtaatacgtggcagttgttccatcgtgtcccatggcatcgacacgaacagcgctgttttggttcgtgctcttcatgtcttgggctctcgtgtagaatgtgtacccattgatctcatatccctggaatgtcgcgatcgacccagacggtcccctcgccaggaaggcaagttgttggttgatcgactcgttacccatgagatgttgtcgtagccacgcggggaaagtatcaatgtgatgccgtgtaatcaatgcatcggacttaccaatgttcctagcgcgaactagagccaagtgctccttgatgtaaggagctaccaatgaagagtgttgcagaacagtgaaatgggctttacggaataaattgttgtctaccgtcattattgctttccttccgagagttccctttccccgtagtctcccttcatggcgtgattcaggtaccccgattgggcgaaggtcttcgataaattctacgcaaaattcgatgacctcctctgttccataacccttggcgatgcttgcctctggacgagcacggttacgaacatacttcttcagaacgcccatgtacctctcgaaaggaaacatgttgtgtaggtacataggcccgagaatacggatctctttcaaaaggtgacaaagcagatgcgtcattatattgaaaaatgaaggtggaaatatcaactcaaaactgacgagacattgcaccacttcattctgaagggcttctaatctatccggatcgaagaccttctgcgaaattgcgttcatgaatgcacatagctttgttattgttgcccggacattgtctggaaggataccccttattacaactggtagcagttgtgtcatcaacacgtgacagtcatgagactttaggtttgtgaacttcttctccttcgtgcttattattcgcttgatattcgtggagtatccagatggtacctttatgctctccaagcattcaaacatactttccttctctgccttgctaagagtgtagctggctggactcaagtaatggcttcctttctcctttggttccgggtgaaggtcgccgcgttgttccatatgcttcagatcattacgtgcttccagtgtatctttcgactttccgtatacacctaggaagccaagaaggtttacgcaaaggttcttagtgaggtgcatcacgtcgattgcgtggcgtacgtccaagaattcccaatatggtaactcccaaaatatggagttctttttccacatcgccgcgtgaccatcttcgctctctatatgctggcttccaggcccctttccgaacactactttaagatctttaaccatagcaaacactgttttcccgctgcgatgtttaggcttcgtacggtggtcggccttatgttcgaagtgcttgcctttcttccgtaccgggtggtttgctgcaaggaatcgacgatgacccatgtatacaaccttcctacagtgcttaagatacgtactttctgtttcatccatacagtgagtgcaagccttgtaccccttgttggactgtccggataggttgctaagtgcaggccaatcgttgatggttacgaacagcagcgctcgtaggttaaactccttgtttgtcctcgtcccacatggggacaccttccttcttccacaactgtttaagatcttcgaccagtggtcttaggtacacgtcgatgtcgttaccaggttgcttggggccttgaataataatcggcatcattatgtacttcctcttcatgcatagccagggggggaggttgtagatacacatcgtaacgggccaagtgctatggccgctgctcatctctccaaaaggattcatgccatccgtactcaaaccaaaccgtatgtttcgtgcgtcctttccaaattctttaaattttctgtcgatgtttcgccactgcgaaccatcggcggggtgtctcagcatcccgtcctgttgacgctcttcagcgtgccatcgcaacattctagcattccccttgttcctgaacaaacgccttagccgtggtattatagggaaataccacatcaccttagcaggaattctcttctttgttagctgcccgtcaacttctcctggatcgtcccgtctaatcttgtatcgtagtgctttgcaaacagggcatgcttctaggttctcatactcctcaccgcgatataggatacaatcgttcggacatgcgtgaatcttatgaacttctagtcctaacgggcagactatcttcttagcctcgtacgttgtctcgggcaatttgtttccccccggaagaatgttcttgacgagtttcaataaatcgccaaatgccttgtcactaaccccattttttgccttccattgcaccaactccagagtggtatccaactttttgtgcccccgctcgcaacctgggtacaacgaagttctgtggtcctccaacatcctgaccaatttatgggcctccttttcactttcgcagtcttccctggcgtcctgcaacatctgaccaagatcatccgcaacgtcgttaccatcagcagctatttcctcctcgcccgtttgatttccttcaaatccaacatactgagcaaagtccggaatattgtcgtcttccacttcatcttcttccatttcaacaccttgctctccgtgggatgtccaacaattatagcttggcatgaaccccgactcaaacaactggaaatgaatagtcctggatgcagaatactccttctgattcttacacttattgcatggacaacaaataaaacccctttgcctgttagcttcggccactctcaaaaaatagtgcacgccgtcaataaactctttggaccgccggtcagcgtacatccattgccgatccatctacatgagtcaaaaaaaccgcacacaaataattattcttacaataatgacagtcatacaataattataagatatctttattcatacaaaaatcataaaatattacaccaaataattcttaaaaactatttgtaaagttttaaactaattttaatgtgttttacttcttttaattttcattttagtttgttttctattatttaagattaactttcactagagttttccttctcaactattttataaaaccttgtttagcaaatgaactaaatttctatatattctttcttccccacacacattttctctctcatcaacttacaactaaattttggagacaaaaaaagtgtgcaaaacataggtgcaaatgtagtatgacaaaaaaaaaacattggaggatgaagttgcaaaccttttaggcacctccgatttgtatgtaatcaccaaaataaattcaatagaaattttggcatgacctcccctcttttttgaagaaattttgaagcttgctcgggcagctggaggaggaagaagacatatatataggggtgggactttagtcccggttggtagcaccaaccggggctaaagatcaccgggatcattagtcccggttggtattaccaaccgggactaaagttaagatctttagtcccggttggtgctaccaaccggaactaaagatcccgggggggcctgacaggtcctgacagcattcgaaccgggactaaagatgatctttagtcccggttggtaacacaaaccgggactaaagatcaaatatgcccgttacccttttgaaccgggactaaagatcatctttagccccggtttttattgcatccgggactattgtggaaatcggccgaccgacgaaagatggtttctccaccagtgctacatggctatgcaaggtttttgaggctttgtgtggtgcacctgcatgtgtgatggatgctgaggtgggtgtcggatttttaagctaaatatcgtaccgatccaagcacttgtctaaatattactgagtgcatgttcaaatattcagctgatagcgtgagctcatatcacctataccataaagacaatgccaatacatatgcatcttcttatttattaatttcagattcaaaaattattatatttaaagcaaacaactatcaagggctacataaaccataaataaatatataattaatgttacttaatcttctcgatacaatacatcaactggacaatatatagtagtgtagttactacttctcgacactttgaactatatgcatatataggagatggatttttcattccacaaggaaactatacacacaactttagggtgaatctatcataagggcatccggatcttgagcctttactactttctccgtttcacaatgtaagtcattctagcacttttcatatttatattgatgttaatgaatctagatagtatctaaattcattaacattaatataaatgtgggtaatactaaaatgacttacgaaacggagggggtacgtactaatacgaggacaataggagccctatgaaacccatcaaatttttatttcttcttaaatccaccgctgcacaactcgtcgcacagacgatgcagcggccagacatgcatatatgcagtggtcgcgtgcgttttctgtccatggctagctccgtgctacttctagctagtgcttcaggtagaggtcgatctcgacgatgccaccggtggcgaggctgtagtcgtagttcttggtgaccatgtacccgcgcgcgagccggaaccgccccgtgccgccgatcaccaccgactcgcgctcgccggcgtccatgtcgatgcggcccttcgccgtcaccgagctgccgcggtgctcgccggcctccagcaccatgtgcaggctcaggtccgacaacacgccgccctccgacacccgcaccgcgaacccctgcgccgtgcccacgcgcgcgctgccggcggatggcccctccgtcagcgcgttgttcagcgccacgatgtcgccgaactgccgcggcggcgagccgtcgtcgccgttgccgttgccgttgccgttgtcgccgtcgagcagggagcggccggagacgacgcgcatggcggtgggagccgggccggtgtaggcgtcgtgcatgtaaaagtggaggtgggtggtggtggtggtggtgaaggcgccgttccggtgaagaaagacggcggctgcgaggagaaagcagccgacgaggacggaggagaggaacgccattgtcgagcttgatgtggggctatggcatgcagctgcttgcagtgtgttgttgcagctggcaatggcatgtacttatggacgtgacaagatagcgagtgctagcgcaagcgaaacgtttcttttttaaaaaaaaacgaactgggctcctcctcgtgtgaaagttttaaaaaaacatatctacacactatgcatactttaaggtgctgtcacatcggatgtttaaaccctaatttagagtattaaacatagactaataataaaactaattgtatgaatgagagctaattggcgagtcgaatccataattagcaaaacttttgctacagtcaacttttgctaattatggattaattaggcttaaaaaattcatctcgcgaattagctctcatttatacaattagttttattattagttaatgtttaatagaccaaattagcgtcaaacattcgatggagaggaactaaaaagttttagtcccatgtaaactgggccttatcaaaagttttagtcccatataaacttggccttatcaaaaatagtaaagtatcttatctggtcatactcatattttcaaaaagaatgtagcatgctattcacatgctatgagaaacagtaccattgatgtactctctccgtcgtaaaatataatcattttttagacttcgacacagtcttcaagatgatatataaaaataggatgttgtaaataaaaaaaatacatattatgatagtttgcttaatgataaatctagtaacatcaattttacatgatggatattttttattttttctattaatagtcaatgttaaaagtttgacttgacactatgctaaaaatgcttatattttaggacggagggagtagtatttttttaatcacttatatcttttcaacggtatatatatttgtcatggttataaataccacatacctaatagtagttaattaagcacggcgggacccaacacatatcaagtcttatacgtacctaatagtagttaattaagcacggcgggacccaccacatatcaagtcttatatggaattaggcctcacttatgaaaggtattttgaataaggaaggacaagtagagttctatatggaaactatagggactactcggattgtatccatattggtccctatagttctatttggtcaaggggacacctatgggtataaatagaccccctaggaggagagggggacaatcaagatagacacagaccaatacaagcaaacacacgccaagacaagctgccagatatcaacatcaaaaataagcctagacaaacccaatatagtgcctgtagaggctaacaagggatctagcgctatctctaatctcgccgagtgcggattcaaggaggaagactatcccgttgtcgactacatcatggtattctaggccgccaagtcgacaacggttgatagattatcccaaattttgtactggtgtgattatgatgaataaatagcaacaccggcttcggccaacaggagtagggatattacttgccaaataaggggcccgaacctgtataaaaatccttgtataaaaatccttgtctctatctcttttacctcaatcttgcataaaccttggtaccgacaatccccttaccatgtagttgtgacctaaaacatcgacaatattattttaaacatctacatatttgaacgatcgtacttcactcaaaatatataacaaaacaagtccaatattaaaaatttccaattattttaattttttattttttttcatagctcctgtaatagtatagttatttcaaataccacgaagagtttctttcccagagaatgtagttacttctacttctgaaaagagttacttctactaccttaaaagcgatggagcccacatgttagttctgtttttcttaccttttaatttctaacgatatatactccctctgttctataatataagggattttagagggatgtgacactttatagtactacgaatttagacaaaaaaaaaagcttgtccatagtcctagaaagtatcctattcctctaaaatcccttatattttgggacggatggagtatattttaatttcttcctctcgtacataaaaatcggtgcacaactgcacatgtcagaatatatattaagccaggcatcagccataccattggtataatgaagacattgcctgatgtgattgagatgagggtaactgattaattcatgttctaggaaagacaacatccgtcctataaaaaaccaacctaggatgagatatgacatttctttatacaattaatcttgataagggtatgtccgggttcattatactaaaaaaatgtcacacatcctgtctaggttggtttttgatggcacagacagagtactgttgtatattttacgcgctctctctctcactactactctccttttctcatccatagtgtatgtctacacatgcatatcatgtcatgtcattcgcgcatgtccacataagtttttgcttgctcatttgcacgttttctcccattttcaaatgtttttctttcaaaataattatccattctatcatttgattacactgttgtattacaattaaatctttataacaatatatcacacaattatattttgataaaaaatcaaatattgtttcaccctttaaagaaaattgttcactgcataaagagtttcagagaaatgcaaaaattaaaaataccgattgcaacaatagtaaccacctatatgaaacattaagtcccaaagaacgaaaaaaagtcatatttatatcacatattaatattaaattgtaaatattgaaacattataaaatacttcttgaaacattccagaaaaaccaggtgcaacatttgcaagttaactagtgcaacatcatatgtattctagttgaaacatttaaataaaatttgtgcatcatttaaaagaaatgtaaaaatgctaaatattttttcattaaaatataaccatatgtggtcttattataaagatttaattgcagcgaatttaatagtgccatggatcgtagattgaagaagtaaattaagagaaaaggtagtttatagattgctaaagaaaaactaataccacccaactaaccatggttttttattagatgcatgcatgaatatagacttagctacatggctacgcaagattttacaagctttgtgtggtgcgcctgcatgtgatggacgctgaggtgggcgtccgatttttaagctaaatacctgacgcccaaaccatagtggtgtcgtacagatccaaacacttgtctaaatattattaagcacatgttcaaatattcagctgatagcatcagctcatatcaccacatcacctgtacgataaagacaatgccaatacatatacatcttcttaattattaatttcagattcaaaaattattatacttagagcaaagaaactatcaagggctagctcgtgctaattattttttatcaaaacaaacaactatcaagggctacataaaccataaataaatatatgattaatgttactcaatcttctcgatacaatacatcaactggacaatatatagtagtgtagttacaacttctcgatactttgaggagtttctacgtatataggagatggattttcattccacacggataatatacacacaactttatggcagatctatcatgcaggcatcgggatcttgaacatgaggacaataggagcccgcacgaaaccccatcaaatttttttaacatatacagatagaaagaagtactaattttttcagtttgttcagatattacttcctgaatccaccgctgcacaactcctcgcacagatgatgcagccatgcatatatgcagcagtcgcgtgcgttttctgtccatggctagctagtgctgcaggcagacgtcgatctggacgacgccgccggtggcgaggctgtagtcgtagttcttggtgaccatgtacccgcgcgcgagccgaaaccgccccgtgccgccgatcaccaccgactcgcgctccccggcgtccatgtcgatgcggcccttcgccgtcaccgagctgccgcggtgctcgccggcctccagcaccatgtgcaggctcaggtccgacaccacgctgtcgaaaaaagatttcggcaataataaaatgggtggctatcaagctagaaaagtggatgggtttggagacgaagaattttataaaggttcgggccttcttattcaagaagtaataccctactcctgtccggggatgattccgccgagtgtgttattgattgtataaattgggaaaaagaatcgcgtcccaagaggcacacggaccctccttatataggggaaggagtccgctttacaaaatacaatccatatcctaacggaatatgggattatagataaaatacaaacgtaaccgactaagatcccgggtatttccttgacatacaagtttagaacctaacccgagtcttcatagagatattccatctatatttggtaccgtatatccgactaaattacaactgtcatgtagatatggggtatctataatctccacagtagcccccgagacgttcgcagttgacaaaatagccttctcgaaacaaaaaacagtagtccgagtgcttcaattcaacttgctccagcttgccgagtgctaaagatcaaaaactgtgaagggcgaaaataaaacatggtgcatcgagtagatgtacctaattaggtgtagcccccgactatgtgattagttgaaaaactaaacatatagtcaagaaccgagtggttttatagcgaagcacgcatggtacttagtaagatacccagccgactgcttctcaacttgaacataccaaggacaaaaaatacaagaagggccgagtgataaacactcaaaggtccaaaaatagacatgtttgataggaatccgagtaaaaatctcataaaatgacccaccaaacatgatagaaaatcatggtaattaataagtctaatagcctaggctgtgacccttaccataaccaaaataagcatataacatgctaaaagaatgattattaataaaccagtcatctcaaatcaacccaaacagcttttgcagcctaataaagcttacaaaaaatggtataacacctttctgtcgggcacctttttatatgcatcataataattccaaagaattattgaatcgcgttaaaaaggattttaacagcattgggccacaccattgtgaacacaaattgccaaagcaaaaattgactaagtccctagggatcacaacaggccacgctgattatagtattgggctgaagtactgtacaggcccaggcccattagtactcccgataccccaataataccgaagtgaaaaacgtctcttcgtcttccccgccgagactctcgccactttccccatttcctgctacagtgcaaaactgcgccgggcaaactagggttcatcaatccgctccaatccaccctcaaaaacttcacgaaatttctcctcgcatccaccgctccgattccccatccctttccagccgtatctcgaactaaatcagaccatccagttcacattcatggcggaagaaagagaaagcttcgagagtcagtgggcgccctccgatgtgacggaagacaatctgaaggagatggtggcgcacggcgttcttccagcaaaagagatcatcgggtggcgaccggcatttggtgaggcattcccgacccccgatacacacgaaatcgtggtatttgctcatttcttctatggcggattttctcttccaacctcaagatttttccggggaattctgaacttctacgggattagcttgcatcatctgaatccaaactctatagtgcatattgccaattttattcatgcctgcgaagcttttctgggcattaggcctcatttcgccttgttccgccgcatcttcttcctcaagccccagctaaataagagcaaaccatgcgtcgttgggggtgctggtttccaactcaggggaacactaagccaaaaatacttctccatgcccttcaagacctcaaataaaggctggcacgcaaattggttttatgttcaaaaccccgagcctgttcttcccgagtactcctgccttcctccagtttatcgggatacttggaactcactgccaatgggagatgaagctgcacaagcagtagaactgatggagagaatgataaagctgaaagaacagggccttcaaggagaacagatcacccggcactttatcaagtgtcagttagctccaatcaaagaaagatctcgcacagccttcgaatttgacggcaagcatgacccaaaccgtgaagatccagattctcttgacttcaaggtcatgaaggaaaggatgtataagatcttctcaaacgccatcgttgtcagctactcacacttgctgccagtcgtaccgttcaatgcattcaatcctcctccaccggtacgtattcatacacttcaacctttctcaaaatatgatcttattttcttgttgaattagttaacaatgaaggatattacacccaggaatttgctttgatgaagtcggatcccccaatcgctcaacgccgatctccccgccaccaaactgggcaagggagcggaggaccacgaattcggtctgaactcaaccaagtgcttctgatccaatcagccagccagattctcgaaagaggaagctggttttaagtgacgacgaagccgatgataccgccaggaggcctggagaccgagagacaaccaagaaactatcaaaacaggctacaccaaggaagaaaacatccagtcgccctgtgccaaagatcaggaagtcttctaggtgcaacttacataacgatctctcttgcattgatgcgcacccattgtggcaataatactgataatcaaatttgcaggaaaccatctgatatagatccgtctggaaaagactctgacccgactaacatggacacaagttcttccaaagaaaccgggccaactgctgaggatcatccgagtgacaatcagccggcaaccgataatgtagaatccggtgatcaacccccgactggaaaccagtcggccgaagccgaagccggagttaatcaggagcccccgactggaaaccagtcggacgcagggccaagccaagaggttccagaagtcgaaacccaagcagacaaccctcacggacaagacgccagcaatgaccagagatctggatcccctttaaaggcatccgaatccactcgtcctcgtccagaaatcattacgggtaaacactttgtctgaaaccatgttgacccaaataactctgatcgattgtctaacctttgtcaatggatacattaggaccaatgatcggtgatgaagaagaaattccccgtatacaagcagccgaagattcgtgccctcccattctggtcaagtggtgggatgacaacttgcaacctcaaggaattgtaataaaccggcaaaaagaagatgaagaggtatgcctactgaaaaaggcactcaaccaagcgactcgcattgtaaatgtaagtcccttgacgcctgacctcagccatcttgtttgccgtctggctcgagcgctgattaaactgctccgcagaggattcatcttaggaacgaggcgaaaaccgcaaccctagagagactagttcctcattttggaaccctcgaagccactaggagtcaattgcacgaggccagagaacttgccaagaagaatgaacatgatctgtgggatcggattgctgagctccaggagtccaatttcgaactgagtggctcatcaaaaggttcgcgcaaactctgcccaactgatttgtgctgttatctctgtaatcttgattaaccgaagttaatgtagtgcaagctgccaagatatctcaactagagaaacagatccaaactctggaaaatgacaaggcagagctggcaagatagagggattcggctttaaaggaggttgaaggtaccaataatcaatacctcaaaagccattatcttctatatgctgattcattaatgtgaatctgttgacgcaaaccgcaagatcaagtctcaagcacaatttgatgtcttagttgacaagatcaacaagtttgaaggagccagggataaagtcgctaatgccgctactccacttatctaggccatgttcttcaataacgccggttcgagtacacttgatgctgccgaaatcttcgacaagctgagagtcgcaccagatacttacttcaagaacatcaaagaagctggaagtatgggagcaagtctggcattggcgatgaccaaatccctttatccaagagttgacattgatgccattgatggctttgcagacgggacgagcgaagaagctgctcttgacctcatcaatgatgagcagaaagccgctgacaagattgctgctgatgtagttgagagattccaagatttcgaccttcggccaactgggtctgataagtctgatgatgaaaaaactgatactgattgatataacaatgattttgatgatcaatgacggtggaggctcaatttgtacaatactgatgaatttatgctatgcttggtgttccatacttagcttctgatttcttaaaagcctttgtcaaaccttattgagcctaaaacccacaaaagctattaaaaaccttcagtcctcattggctaagacgaaagaccaaacagggcaatgataaatcaagtaagcaaattgaattgataaaaatcacactccattattatcatagtagccccctgactgaaaacttcaaggaaaaccttgaagttagcagtcaaagaggaaagatacaaacgaaatgcctaagcataaaatcgacgaaggtgttcaatattccaagaattgttgatgagagtaccgtcttcgtgcttgagtcgataagaacctggccgagtgacttcagcaattatgaacggtccttcccataagggagatattttatgccgatcctgtgttgtttgaattttcctcagaaccaggtcgtcgactaaaaaggctcgcgatcgaatattccgattatgataacggcgcaacccttgcaaatatcgagtcgactgaatcaaagctgtttctcgggcttcttctagtcgattgatgtcgtctacttggccctcttcatagccctcctcgttgaatttccgaaatcgtagtgattcaaattccacttcactcggcaacattgcttctgcgccataaaccaaaaagaacggcgactggccggtagcccgattaggagtagtgcgtaaagaccaaagtatggacggcagctgatctacccacttgccagcatagggacatagtcggtcaaaaactcgtgctttgatcccttgaagtatcatgtcgttagcacgctcgacttgtccagtactcataggttgtgccacggaggcgtaacaaattttaatgccgaagtcttcacaaaagtctttaaatgctccgccagtgaattgagtgccattatcagtgatgatccgattaggtaccccaaaccgatgcacaatgttgatgaaaaaatctctagccttatctgctgtgatcatgatgacctgtttagcctcaatccacttggagaatttgtcgatagccataaagagatgcgtgtaaccgccgactgcccttttaaacgggctgaccatgtcaagcccccagaccacaaatggccaggataacgggatggtttgcaactcttgggctggcaaatgaatttgtctggcaagaaaattgacaaccttcacatgtccgcacaatcttgtcagcatcagacacagctgtaggccagaaaaaaccttgccggtaagctttgccgacaatggtccgtgcagcggcatgattaccacaaataccagaatgtatatccttcaacaactgtctcccttcttccaaagacacatagtgctgcagtattcctgatggacttttcttgtacagctcggtctcatgaataatgtaaagtctgctgcgcctggaaatccgctcggcttcatttttgtcttgagggagttcttgtttgctcaaaaattttataaaatgttctctccagtcggctttgatcatgcttacgccttgagtatccatggcttcgactgtctcttttctgggcacggtcggttcgtaaagatgttcgacgaacacatctgaaggagctgcttcccgttttgaaccaaaattggccagtttgtcggatgcctcattgttatgtcggaggacatgggtgagctcgagtccatcgaatttattttccaacttgcgtacctcttgtcgataagtggtcatattatcatctagacatgaccactctttcatgacttgattaacaaccaactgagagtctccacggacgattagtcggcgaatacctagagatattgcaatccttagtccatggagtagcgcctcgtattccgccacattatgggacgcagaaaaatgtatccacaatacgtagctcaatctttctctagtcggggagattaaaacaaccccagctctagtgcctgtaagcctcttcgacccatcagaatgcatagtccaatattccatcttttcctctggcatgtctttttggcactcggtccactcggtaaggaaatcagctaaagcttgtgacttgattgaagttcgtggcttgaacgatatgtccaaagacatcaattctaaggcccacttcgcaatccgtccgtttacttcgcggttatgaagtatatccccgagtggaaacgatgtgactaccgtgaccgagtgactttgaaagtagtgagataattttctgacggtaattaagacaccatatagtaacttttgaacctgagaatatcttgtcttggagtcagctaaaacctcgctaacgaaataaattggacgttggactttttgaatatggccttcctcttcacgctcgacaaccaggaccgtactcacaacctgggaggtcgccgacacatataacagtagcggctcttgcggatgtggcgaggccaaaactggtagagtggtgagaagtttcttgaaatcttcaaaggctttctgtgcttcgggtccccactggaaattgtcaatcttcttcagcagcttgaagaagggcatcccccgctcgccgagtcgtgagacgaactggctgagcgccgccatgcaaccagtcagcttttggacgtctttttgggagcttggcggtttcatgttgaggatggcgttgattttctccgggttggcctgtatgcctctttgagataccataaatccgagcaacttccctgacggtactccgaagatgcacttttccgggtttagtttcatcttgaaagcacgaatgcttgtaaaagtttcttctaaatccgcaatcaggtcatccttctgcttggtcttgacgactacatcatcaacataagcttcaatattgcgaccgatctgagttgaaaaacatctttgaatcatgcgttgattggttgctcctgcattcttcaatctaaagggcatggtgatgtagcagtaggccccaaagggcgtaataaacgaggtcttcaagcagtcggattcttttagccggatctgatgatatcccgagtaacagtccaagaagctgagtaactcacagccggccgttgagtcaaccacctggtcaatgcgaggtaacctgaaagggtctttgggacaagatttgttgaggttggtataatcgacacacatgcgccattgccccgtctttttccgaaccaggactgggttagccagccaatcgagatgaaggacttccttaatgaagcctgctgctaacagcttggttaattcctccttgatccatccttcctgtcctgtgcaaaacggcggagtcgttgcttgatgggtttggcgtcttccttaacatgtaaagagtgctcaatcacctctctggggataccaggcatattggatggtttccacgcaaaaatatctttattattctgaagaaaggtgatgagcgcactttcctatttacaatctaactcagcgcctattacagcagtcttatcaggatcggagggatctaagggaatctttttcgtcttggcatcactttcttcggtcttcgtcagcttggttgcaggcgcttctccctcgcttgccgtggtcgcagccagtcggatctcttcgcgggcgagagtagtctcgtgggtttgggccatctcacaactttctttgtcacatgtgacggcctgcttgatgacgctccgtagtgatatgactcctcgaggaccaggcatcttcatcatcatgtaggtgtagtgtgggacggccataaatttagctaaagccggtcgtccaagtatagcataatatgctgtctcgaaatcagcaatttcgaaacaaacattttctgtgcgaaaattctcccgagtgcctaaggtaactggaacagtgatctggccgagtggtgtagctgacaatcctgggataacaccgtggaagggtgcattactcggttttaattccgtgcaaggaatctgcatatcgtccagggtcttagcgaaaaggatgttgagtgcgctgccaccatcgatgagagtccgtcggagcttgacattgcgaaccactgggtctagtaccagggggtaccgccccgagtggaccactcggtcgggatgatccgagcggttgaacttaattgctatctctgaccaccgaagatattggggcgtgttaggctgaaccgcattgatctcccgttctgttagcttctgttttctcttagattcataagccaggggtccgccgaagatgtgattaagttctttgcgatgatcttgaaaaccagtcatggcatcgtcttcatcatctttcttctttgatgtgccttgatctccgtctgagggtttacatgcgttcttgacgtattgctccgcgaactgtttgtagacgaagcaatctttggccacgtggttggagttgggatgatgcggacattggaagttcattatcttgtcgaaggtgttaatgcgggaacgttgtcgggaagacggagaggtggtcgccacaagttcttcgggcttacgcttgcgatccttgtggttgttacttccactccctcccgcggtcggcatatccttctttggcttccaagtggtgcccgattgcttggacgccgtgatagcatcttcggctttggcatactcattggctttttcaaacatctgtttgaccgtcttgggaggtttgcgtccgaacttgccgactaggtcctcgtggcgaatgcctttagtaaaggcagcgatgatgacgtcgtcggtgatgtcggagatcttgttgcgttgctcgaagaagcgtcgaatgtaatctcgaagagattctccagacttctgaacaatgttgtaaagatcgaagtgtgttccgggccgttcaaaagtgccttggaagttggcgatgaagtggtcgagtagctctgcccatgatgcgatcgtgccgcagggtagcccgtgaagccatgaccgggcagaatccgctagggccacaggtagatagttcgccatggctttgctgtctcctcctgctgcgcggattgcgagaccatagacggtgagccaagactcagggttggtggtgccgtcatatttctcaattccagtcggcttaaagccggctggccaatccactcgacgcagatcgcttgtgaaggcagcaactccatccacgtcgtcgtcgtagcgatccggtgaatgatggcctcttgctgcgcgcgctggttgatggtgtcgcgaagatcgatggggcgccttcgatgtggggagtgtggtcgttcaactcggcgctccctatatcgctcgggaggcgaacgaacagaccgttcatcatgtcccctgctcctacgactagattcggcgccggcaatgctgaggctcggctggtgagggactcggctaccagtcggggtgcgggtgcttgcagagttggctggaaccgaggcagcgatcatggtcttcgtctggttcaagatgttgactacatgatcggcttggttgagtgcgtcttccttgaggagggtgtcgaggagagtgattgctgcaaccgcgttctgctgggggggtgcgaaagaccgctgtcccatcgacgtcttgttgcccaatgagctctctcgctcgccgcccagattccaaggcacgttgtcatcgatcttcagcctcctttgcaatccgttcgcgatcttgttgctcacgctgtagtcgttctcgctcttgtcgctgtcgctcttcctccagtcggcgacgttcagcttcttgccgtgcgcgatcttggtccgcttctcgggcttagcgttgttcctccgtttcgttgtcagccatgaatacgccgaagaagaggggcgtgtagttatcctcatagctgtcgtcgaagttgtcgaggtcgccgtggtcgtagtggtagccgaaatcgtcgtagtcgaggatctcggttggtcgagaactgacgctaggggagctgaggtagccatccaactcttccgtcgagactatcccgagaggttggactataacgccaacctccctggatctagatcggatcggggccgaagccggagctcgcctagatcttcgagtaggagatgtcttgactgtgaagacagcggcaaatcatcaggaagtttcatcaggattgaaggataggacccgtcgtcttgatctggtcgcggaagagtagattggatctcgtccgagtggtttgaagccgactcgggagagatgatcttggagtaggcctcggccgagttcggaataccaaacgggacggggacctggtctctccccgactggtttgaatccgagtcaagaagagagatcttgccgaagtcgttcgtgatgaagttgaggctgccgaaccggaacgcctgcccgggagggaaggcgaagtcgtcgatgccagaaacgaaacctatcgcacttagtcggtgagaacttgacgctacccctacctagcgcgccaactgtcgaaacaagatttcggcaataataaaagggggtggctatcaagctaggaaagtggatgggtttggagacgaagaattttatacaagttcgggccttcttattcaagaagtaataccctactcctgtccggggatgattccgccgagtgtgttattgattgtataaattgggaaaaagaatcgcgcccaagaggcacacggaccctctttatataggggaaggagtccgctttacaaaatacaatccatatcctaacggaatatgggattatagataaaatacaaacgtaaccgactaagatcccgggtatttccttgacatacaagtttagaacctaacccgagtcttcatagagatattccatctatatttggtaccgtatatccgactaaattacaactgtcatgtagatatgggtatccataatctccacacatgccgccctccgacacccgcaccgcgaacccctgcgccgtgcccacgcgcgtgctgccggcggatggcccctccgtcagcgcgttgttcagcgccacgatgtcgccgaactgacgcggcaccgcgtcaccgccatcgtcgagcaaggagcggccggagacgacgcgcatggcggtgggagccgggccggtgtaggcgtcgtgcatgtagaaatggaggtgggtggtagtggtggaggcgccgttgcggtggaggaagatggcggctgcgaggaggaagcagccgaggaggagggaggagagggacgccatggtcgagcttgctgtgggctatgcttggctgcctgctttgtgtgtggttccaggcagcctttaatgcttacagctgctgtacttatatagaatcctagtcgatacaccacactttgccgtggaatatatagatgaatgcatattatacatgatagatatatatgtttaaataatatataaatgatgtggagataatggttcgacattgattacatatatattaagttctaaaaatacaacaatattataaatgatatgtcatatttatatgatatttaaaataatctatataataattactagtagatgatgatgtagcacacttgcatatctatctatctattatatactccctccatactcataaaggaagtcgtttaagacaacgacacggtctccaaaacacaactttgacttcttgtttctataaaaatatttattgaaaagtgatatatgtatacttttatgaaagtatttttcaagacaaatatattcatataatttttacattttcaaactcaacaatttgaaagttattcatgatttatattcttagggtttgacttaaacattgtcctaaacgacttcctttatgagtacggagggagtactaaaagtccactaaacttcctacaaacgctcctggatcgtcacgtggcactctacaaacgctcctaacctaccacgtggcaaagaaacatctaactattgatttttatttaaattagtggacccattatttttgaccattagattagatgtaaaaaaaaatagtccacccatcctaatccacttgggctcactattcccgcggatgtacatacacgtacgtactccgtatgctcctactccaattattatcttttaattctattatctttttatctctcatattttccttcttttaataaaaagcaaaatttatgtaaaaacatttagagattggtgttataggt

SEQ ID NO: 28569 - DNA, 7409 bp, Oryza sativa
ggcacccataacaccaggcacctttaatagactatgagtgtcggttaattaaaaaactgatacctttaatctattatatactaaatgtctattaaactttctacaaatgttcgtaatctgctatgtggcactcctacaaaagatgtagagccgctatgtgatgctctaataaattgtagaaattatgagaaaaaacaaaatatctagcagtcgattttcatttaaaatagtggacccaataatttaaaacatcatatcaaaataaaatccctcttacgtatgtaagtacgcctatcctcccctcatttactctttcttttttcttctttttctaattaaggtagttattacgagatatgcaccataacttaatattggaaatgataacttaatattggaaatggttatatctttccatgcatggagcatcgagctggctgtgcaacatgcaagcactaactttttttatggacgatctatacattaattttatgatacgcttgaatgattatatgtttaattaaattaattaatgagcgaagtcctatattcactctttttactatgttttcgatataaaaatagacatccgattggttatctgttttcgatatagaaatagacatccgattggtcatctaataggtaaaaaaagataagccgttagagatatagttacaggatgtgagttcctctgttacggtggccgattgtcacatagtctaaatgattatatataaacaatagatagctaaatgattagtatattttttaaatatattcagtttttagtttgatccatgtaggcttttcttgatatatgataaatatattttcagacataaatccatatcctttccgtgacaactaaacatcaattaaacattatataaaaattgataatatatcacatatcatcatctattagatgtccattacaacacctctatgtcttcacatttcacatctaataaattatttttaaaaatcatatttttgagaaaaaaatacatatgaccatcgattttatttaaattgatagacccttccctctcagaaaaactcagggctctcctcttctctcccccttcctattatttagctaaagtctattaaatttcctacaaacacttatagcttgtcacatgatgctctaataaattagaaatcaaagaaactatgcgagaaaacaaaacaactagcccacaattttcacttaatacggttgacataatattatactccatcattagatctatctttagaaaaaatccaaaacccatctccactgccccttcctcccgggcctcctctcctcacgatacaaacatcccccctctttccttccttccttcttttaattttctagctaacagatttttataaaaatcataaaaattctaataaatgtttagccattatttttctaaaattgatggacccattaattttaaccgttagatcttcatctaaaaagaaaatctgatacctgcatcctcaccaccacctccatatatgcgcacttacgtacttacgttctccctctaccctcctaactctccccttctctcctatttcttaagctaattgctattttttagctgatactcaatctatcaaaaattaataatcggatttctaaatgatcataaaactcaagttacatattttctcaattttttttgaattattgtgttatttataattaaatacataagtcaaaatccatatacatagctcaaacttctaatataaatgtttaagatcaaatttttaagcatcatattaaatactaaatattaaatttagatcatgtaacgccgctaaatcgccatgtggcaataataccaatccccctaaaccgacatgtgaccatctaataaattataaaaattcatataaattatattaaaaaaactaaccattgatttttttcaatatcctcaatcattagatctattcttaatcttaacctacttaaaaacttcaagatgattctgtcctctattgcttgatgatgacatccatgagtcagccgcacatactccgcgtatatgttgatccgttcacgagagagtccgcacgagagagagagcacgattctgagtcaaattgaaaaaaaaaacaccacatcatttgactcggctcactgaaagaaaaagtcaaatgaaaaaacatcttactttttatttgaaattaatttgtcagaccgatttttaacaaacaaatacatatgcccgcgcatcgcgcggactacctttctagttgagatttaaaagttagtgagcagcaattttatagtaagatgggatatactccctccatcagatgcatccgaaaagaatgttaattgtagagttgaaaaggcaatttagtagagaaggaaaataacttaggtatccctagggtttacactttcgatttcagtacgactgaaatttatgaaattttaggattttcggcaattttcggatcgaaattttctaaaatattgaatgaatttgaataaactttgaccaacttcaacaaaaatttgagaaaacccaaaaatttcggtcgatatattgatttgccggtggggaccaaaattgcaatcactggtatccctcattgaatgtgaagtttttgagaatgacataaaaactctagctaattgaattagaggtagtgtaatacagtaccacaatctccggggagtaaacaatcgtttgcttccagcgccgcaccagcattgacgacgttctcctgcatcttcaccggggaagctaggccaaaactgaggtgtggccatggagaaagaaaaaacggtctcaatagttaacagaggcacaaagatattgcgtgaatattcgcgtcgaacgagatcccgtgaatcgcttatctggacttgcttcagcggccacgttgattttctttttgttacgttgcattcgctatgcgcgaacatctcgttgatgccccgcgtgtttagtgggatttcaaaattcttactgataaacattgctgattaatctttgtatgtttctttttttttactcatcagttgttgtttttttcgataacataatgtggagtacgtgtttctcaagtaggctgctaagaaataacaaaatattttcttccgttggttgctaggccaacagccaactgcatacatgagatattttgctttgaagtaattatggcttgctttgaagtaattatggcttagtgcaggggtggagctagagtattgagggggtgtctgagagcccggtcaagaaaaatttgttgctatatttgatctattttcaccatgtgttcacctccatcaatcataggctgttgttaaatctgatcacctagctttttggaagaaagcctgaaacttaagaccaaagtcttatacgaaagaaagaactaccaaaagtaaactatatcggtcagaccaaattgggtatgacccgatgtgttctgcagtgagcccaaagcaccttgtaagacctctgataccaaccgcaagtaccacacatatttgaatgagtaggatccatatgtacaatcatatatatatatagccactcactctgaatgtgtccatgtccacgattggcatctttcaatataataaccacaacaccaagtaataagcaaaggagaaacctttgatagaatagttagccagttattaacttcaacctaagcatgttaaaccactcgaaggcaatgaccaagcaggatacttgtcttggggactcgagctataacactaaatttcacagtcatctcaattgctcaaaacttatactcttgcttcactaatcctgtgaaagcaactagcagcttgcactttataagcaaaacataaaaatattagagcatttgtgtcatatgaaaaataattctatagagcccattgaagaaaggactaatttttaaccaatcccctttaaaattctaacgaaatagactattgtagatgaatttcggagggagaataagcatgaggccccacctcccgtctatttttctgttgttgatgtgtatttttctgctatgccaatctactgatggtttggaaactttcctgtatttgaaaattctccataggaagtgaaatgatcatgatatagccgccttgcgctccgtgggtattggtaattaaataagtgaatagttgtgatgaaatgattgcagtttgtcaaagaagcattaattagatcagtgtacatacaagaccttttttcgcggtccgggtatatagcgaggtaagcagaagacaattgacaatttgagagacaacgaaataatcaaatattccggccgttgctgtacatgcgctatagagataaaaaatgctatgtgaacgatttcttcttatagacttatacgacggtcctagtgcgattgggaacgtatggtgaacgccaccatgcatggttagctgggaaacggacggtaaatgtcatgttctttcttcgcttttgcgtcgtgattctaggagagagccgttacgtcacacgaacatcgtatataacaagttactaactttttcttcaaactttcaacttttccatcacatcaaaactttgtacacacataagcttttaacttttttcttcaaactttcaattttagtcaaacttccaattttagcgtggaactaaacacaccctaaaataaataaatataatatatatatatatatatatatatatatatatatatatatatatatatatatatatatcagctctcatataaaatgaattcaagtgactgtcaggacaaatatggtacgtatgattgtaccgtgttcgacgaattttcaatactcttgggagccgcatataaagaagggataagagtatgcccaacaacctcctataattaggagatgaggggaccatatgaattttcaacgttctaacgggcctatagaaacaagcgaataagtatgagacgagagagacagcctatagaaacaagcgaataagtatgagacgagagagacagagataataaggtactggatgatatagatactaggaaattccccgcgctttgcttcggaaattactaagggggtaatttttaatatgttttttcaataatcgagctaagtgtaaaaaaaaatattagatattaacaacagataaaacaggtttgctaaactatgtaaggagagaaataaactttatagactctgtagcagattctggatgaaatatgatatcccacgcttctattacatggatgaatatatatgttaagtattataaaaatgttggatatgtatgttgaaaatattatgaaaataatgtgaatggtgatggttggatatacttgcacttttatttgcataatttaatgaattgtagatgatgctgcaatgtttgttggagcttagtacgcaattattagtaatggacgatgagatgacatgtttacacgttaagctttagctttagtgggctgtaactatatagcaggtatagatgtgacgatggccatttgagtgaaatcttgagttaattaaactatccataattacactagttaaaagtttgcgatagagaatgtttgagatatgagatctattaaatctaattgatggataaaatatacattttgacttagaacagactgtatatgctccctcagtaaaaaaaagtcctagttatgaatctaaacataaaattgggttagtcaatcgattcataaccatctttcgagcactatattaaaacctctttacttgcccgatcatatcttagatctgtaaattatgttatggtctacgttccactcatagcgatgtgcttgagtccaagggacagggggtcgtcttggggccagagagaatgaatagatagggccccacgagttgttaattggccgctggggaattcacatgaaagggaaggacttattctgaaccaaaaaagtgctcactaaaccgaacatgaaagttgttttccatcgttttccatcataaagctgttcacataacttcacttttgacttggattatatatcccatatatccaggtaccatattaagatgtgattggcatccctcggcaagcactggtatgtacttaccgtataataattgctccacaagtactagtatgtactacttaccgtataataatggattgatatgcatgttttttcttccttgtacatagacacccgagcacatgtcttgtgatatcttagcccaataagaattagacatgtgtagcccatgagagttgtatgcgcatgtttagtaccaccgaagggaggaccattacaaatggtatcagagccgaccctcgcggttgcgcgtatgggtcagtgtgagggcacatggcacatggcgcatgtggactttgcgtgaggcacatggcatggcatatgatgccaacactggacgttcgggcatgtgctaacagggggtgtgtttctatacctttgcttatatgcctgtgtagctatgtgggtgatttggaccgacggggacgtcgggtcctttgaggggggtgtgtgtcagacatcccgacccaataaggattaggcctgtgtaacccatgataactgtgtgcgcatgtttagtaccactttctagtttagcaagggtgcgcccttataaggcctcttccctcaaactatatcactccgggttaaccttttagacgaagtatggacaaaagtataagtgggatggtatgtgtaagtgggcccgtccgtcggatgggctggctacgcggttctggagggatgtgtgattgaggtgaagatggaatattagttcatgtggtagcttgaactactccatctaaaccataaaaactaacttctgctacaaaccgtacatagcctacatttatatttatagctaaaagttgaatttcttttatgggacagagagtatatatacgaagatagctatacatccatctaagattatatgggcacttctaagtgtgttaaatagcagaaataaatattgaggtaaatctctttgatgtacttggaagtttatataattatgtactctacttgactggaaaaatcacgcccaatgatgcaactatcaataattacctaatgatgcaactatcaataagtacaaatttgttggatgaattgaaaagtagtacactacttcacaaacgatttttccatgcgactaaaatcgattttcccagataggggatgacccgcctacacccagatgtccaaaaagtcagtatttttacatggggaagagcaactgcatgtgaaaatacagtattttcgcatgcgggcgcttaagctgtcataatgcaaaaagttaaatcgaatgaaaatgaacaatccaaaaccatagtgtaacgccccacttttcgcgagacgttaaaagctaatttattaaaaatcctaattgtgaaaatttcgtt

SEQ ID NO: 28570 - DNA, 8204 bp, Oryza sativa
  unsure (1)..(8204): unsure at all n locations
aattcctttttatgaaacccaattcccgagtatttcccctctctttgaaaccccatccaagtaattctagaacaatccccgagtatagatctatcccaggataatatccgttccaaataatctcgcctgaacccttctattcagatttctcttctaaatcccttacccacatatctcgtcgagtagtccaactcaaactcccaagttacactctccttctctaaattatttgactcgtctccgaatattgttcccttccttgactccttcctattatcccgagaccaagtatcgacttcgaaattcgaatccagactccagccctaaaaccttccaattaaatctctctgtgaaagtctatttaacctccctcataggttggattccttcttcctttttcctggtccacttcttccttctattccagcccatctctctccctctccctaaagtttggacctatcaatctacctacaccaatccgagagttcgaatttccgtattcggattcctcttgtaaaaccctatccgcatttgtcgtcaatcctcaaaattcaaactcattgattggttcatttcgtccctctctctttcgatcgatctacctatctacctatccatcgacctatctgtctctcgatctaatcatcgatctctctacctgtcaacccatctaactatccgtctaccgatctctctgttgatctatctatctctacgatatccatcggtccgtccgtctacctatctatctttgaaatctatcccaaagaaataccgaattcccgcttggatgcattcccttgactcctccctgttttcctgagaccaagtttcaagttcgaaatccaaattcaatttccaaatctcgtttcctccccggcgccgaatcccgccgcccccactttgaccgtgccggcccgcgctccgcgttcaaattcgaccgcttgatccaccgacctcgccgcccaacgcatcctcgccgttgccgttttcgggtcgcccacgaaaccatcgccccaccgccagccgagcgccagctcgtctgtgatctcccccttgcctataaatcctacccaccgagccccaaatcctccctcaacctcggtcgccgtcgcgcggccaaccccggagcaccgccgcctccttcgtcgccacggccaagaacgccgcgccgtcaccaaaccgtcccaccccgcgtcccttccttccctggtgcgcccgcttcggcgtcacgttcgtccccgtgcgccgccaacggccttcctccccttcccatcctcaaatcgccgccgacaccattcctcaccgattggtgagctccccgtccccttccccttaccgtacgccgaaccagctcgctgtcgccctcccggaactcctcgcgccccctctctgtttccccggccatgccactctcgatgctatgaccaccccgccgtgctctgttcccgccgacgccgcgctcggctgagcgccaccgttggccaccctctcggcgactccccgcgccaccacccgccttgagctcccttgaaccaccccaaacagtcgctctgcccgattcgctgccgccacgcatgaccgcgcgccgccgtcggccatcccctcgccgtatcctctcgtctccaccctcctggagccccctcgactctccccgaaccgccggcctagccgccggccttcttttttgttcccacgtcgtgccgcccgattcaccaccgcggcacacgggcgcgctctggcgtcggttcccccctttttttcgaacccgctcggcaacaccttcctcgggcccctcttgacctcccccttgctggcccgtggacaccggctctcccttcaattttcgcgcggcgcgcgccttttggttgcccgcccgccccgcgcacgagcaacaccggagaccatcagccttcgcgcccaacgcgtgtgcgtngcaacaccacaccgattcgatcgaaccatagcccgcgcccccttttccctcccatcgcgtatccacgtcggcaatccggcgagcttcgccaccgtcgccggccgccgtcgcgccccttctctccggtccgatccgtggaaccgattccccgcttcctcctctcgcttccagtgcctgccgcccactccgattcgccgccgttcgctggagcgcaccgagcgccgttggccatccgatgagccgcccggcctcctctcccttccctgtccgacgtggcgtccacctggacgccacctcagccgctgaccccaccagaccaagtcaacccctgcctagtcagccacccccccccccttctctctccccgctcgtgggcctggcccatcgaccagctccccctcctcggcccattgaaacaaaggaagtccatttttactccctccgccaaacacaatgaccaaaagtctatatctgctccctcccaattcacctctctctcaccatatgttggccccacatgtcaatgagtgataaaaggatattcttgagaatattcatttccataaatgcaataaatcatatctcctgctccataaaacatttcctatattccaaattccataaaatccttcctcttaatctggggattccaataattcaacccattggtcctgcatgtcagtgactgtcaataatattcttgagaatattatttctataaattctataagccatttctcgtactccaaaaaatccaatagatcatttccttgtccagaaatccaattaagcttccaaaatccatatctcctcaaccgctcgaccgattgactccgttctacttccagtagttccgtaaaattgatatcaatttaatggcactattaattagtctaaataggatctttctttcagtcttttggttaggtttttgattgtttgcgtatagttgcggttaccggattttcgtcaagcggatttcttgaagattcgtgaagatcaagaccctgagcaaggcaagccacctttgaacatattgagcctatatttgaacttaattaatttgcttgaaaaatattatgcattgataggattgcacttaatctatttgccccgtctgcaaggcagaccggtgggcctacccaacttgttgcatctgatccttccattgttaattgttatatcatgttcccttgtaactatctagttgcgcctcgatattcgtgcactctgtgcgagtatcgacggtctccttcaaacttaaaatctgtgtaacttcttgggtaaaacttggtttacaaaagctttggaaaacccgacgcctgggtcggtgccttgtgaaagaaaatgagttttaaaaataaaatttgcgacacaaggccattcctgggcggaatacttgtgcggtcgcatctaaggaccgattcctttggaattacatccgagcatacaatagtgcgaccacacgggtggaatgggacgcccctggctgagtaaatagctaatcaagggagccttgatgccaagagacatgtggattcaacggggtggtgtcggggagaacccccgggcttcctggcacagtatggtctgggacctaacctgttgttggtctgggactcctctcattggcatatggtaaccctgtgtcggctttcgaaataccttgtcgtgaaagccccaaagtcaccagacgtggctgttctgcacgggctgggtgaccaaggctagtaacgtcgtgtgggtatagtgtaccccctctacagaggttattaaactgttcgaacagccgtgcccacggtcatgggcgaatgtgaggtgattccttagcgtagtttttgttttaccctgttttatgaaaaggtgttaaggtttgggaaacctaatgcttgggaagcaattagctgtccgggggacagtgggaccggaagtccctggaagtgattggtcgtttggggaccactattattgggaagtttggaaaaatggtttggtttgggaaaaccagctttgaggccaactctgggagttgtgaaaatcttgataaataaatttgttacttctcaccccgactgagctgagacttgtctcgctctggttgtggaaagcacacacttagattgttgaaaaccttgaaaacaaaactgattgaaaaataacaacctattctttgaaacttgcattaaccacctaagttcccctggcttgctgagtacgtaagtactcacccttgctctctatataaatatagttctgccagctctgaagatgaagttgaagtgaagtgaagattagggtttcgtcctagaccccagccgtcgcctgtggtgttgggggttagtccgttgtttccgttgctgctgccgctgttggtgttgcctcgtccgtgtcgtcggttgtaatctcgggctgtcctgagttgcaacctaagttaaggtaaataagtcctctatttattctaaggattgcaatgattcatatttgtcaccgtgggtaccagcgctatgtcctgggactagtactgagatcgcggtttcgtaggaagcggttcgcgccgtttttcctacgacacgctcctatcaggtgccgttgtacggcgatgccggattggggtgtgacacatagcaactcctatgccccgcagccgttgccgccgcccccgctcccacccccggggttcgtcctcgctgttgctgatgccctccctacctcccatcagcattgccatccctaccgccaaccgccggatgcaccatcgctgcccacccaaccaccggatccattgccgccaagctctccaccgtcctccccaccaccggatccgccgctccctgctcctgtatgccgccggatccctctggtgctggccactcccgctcgtccgcccacttgccaccatcgttgtcgtcgtagccatcgccactatcatcgtggccgcggtggaggaagggggaggggggaggggatggccgcttgaggagggggcgagaagatatgaggagaagataagggagtggagtggagtgtggagaagttaggaaatgagatattttaagaggagagaataaagagagggaggggacgggtaaacggcttggtgccaggcgggcctattaagaagcctgcctacgaaaattgttttttcgcatgtggtctttgaaccacgctctcggggcagcgatttttgcaggcgggagcagtttaatttgccagcaacctcaaggggtctcatccgaaaaaatcgtttctatagtagcggtaattaatttagaaatatcttaatgtaaaatgtagtttgtgcgctgctgcctttaattgtccatgagaagacgcgttccaggcacgaacgtgaccggaacacacgacgctcacgctgcaaacatgcagacgtgctcatgcaaaaaatcgaaaatagacgagctacagtacagtacaatacatcacaggacgctggttacaactttaagcaagaacacatgaaatgaaaaggcataggcatgcaggagaggcgcgcgcgttctagctgtacgtagtgtgtcaggctgctagctagtgctgcaggtagacgtggatctcgacgacgccgccggcggcgaggctgtagtcgtagctgctgctggccatgtacccgcgcgcgagccggaaccggccggtgccgccgacgaccaccgactcgcgcacgccgacgccgacgtcgatccggcccttgatcgccaccgagctgccgcggtgctcgccggcctccatcaccaggtgcatgctcaggtccgtcaccaacccgccctccgacacccgcaccccgaacccctgcgccgtgcccacgcgcgcgctgccggcgtccggcccctccgtcagcgcgttgttcagcaccacgatgtccccgaactgccgcggcggcgacgagccgtcgacgatgtcggtggtggactgcagcaaggagcggccggagacgacgcgcatggcggtgggagccgggccggtgtaggcgtcgtgcatgtagaagtggaggtgggtggtggtggtggtggtggcgacggcgctgtcatggcggcgaaggaggacggcggccgcgatgaggaaggagcagccgaggaggagggaaggagacagggaggatgacgccgccatgatcgacgttatcgagcttgctttgtgtgtggttgctactggcaggcagccctcatatatacacacactatgtacgtactggtttatgatttgttagaatctagttttaaacttaaccaaattgatatttttttctccttgttttaaacgtgggtttatttattaagatactgactagaccacctttcttttgtttcgctttgttccagttgctttcgatccagtactacctccgtttcatttcaggttataaaactttctagcattgcccatatttatatagatgttaatgaatctagacacatatatatgtatgtgtagattcattaacacacacacacacacatatatatatatatatatatatatatatatatatatatatatatatatatatatatatatatatatggataatagtagaatatcttataatattaaacagaggaagtattagctaagtgcaaggaaatatagggtctgtttggggagcttaagattctgcgaagtagctggtcggtagccagcttatgagaatctggaaaagctgggtttcccagcttatagcttctaggctgtgtttagttcacactaaaattgaaagtttggatgaaattgtaacaatgtgatggaaaagttggaagtttgtgtgtgtaagaaagttttgatgtgatggaaaagttgaaagtttgaagaaaaactttggaactaaacatggccctagtttattttctggtttatacaattacagcttctcaaaatctagaccaaaagctgaactgtttgggggagcttctgattctggaagaaactgcagcagctagaagctctctcaaacagggtcaatccttgcatataatttttttactcctttcttgtcattttcgaaaagaaaaacttcgctttagttagtactactctattggttcttttgacgccgtcaatttttatatgcgttttaaccatttatcgtatttaaaaatcttatacaattatgcaaaaatagaagtcttaaatgataaaattaatcacaataaaacaaataataaaataaatgatattatagcatttttaataaaataaatgttttacatatgttaagtcaatgatgctaaagagatactatacacaagcatgatgtgtgggagtggtaataatatttaacaatgaaacatagagaggcgtttttaagggtggcatttctggttgtgtgcgagtccctcccgtaggggtgaaaatggagcggattcggacggatagtggtcataccatatcctaaatcattgaagttaaactttatccaccttacattacccagtgcaacacacaggcattgtgcttgtttaaagaaaaaaggaattagcaacatctatattagataagtttcattaaatttaacattgaatatattttgatgcaatatttgttttatattgaaatgttaccatattttgctataaatttggtcaaaattttaaaagtttgactaaaaaaagtcaaacgacttctaatataaaacggagggagtatgatttttcacatgcaggtctatttttaagatgtggtgcttttaacataaccgcctacgaaaatcgcaacaaaatataaaataatgggccgggtgatgggagtggcaaaactctcgcttaattatcctctcccccgtcccctcttaccctccatctccagtacagcgtggtagcgtgggaagcgggcttcggatccagtggagctcgatgaggagtacctctgtgatggcctccatcgcttctctccccctcccttgtgttgggattgctcactcacagctacaagtgttaatcacaaacacttttgtctctctggtgggaaatcacttcctctctctctctctctctaccgtatttttgccacaaaggcttctcaggtagacacacacaagcagcacaagatgcaagtttctgttgattcaaccacccacggcctcatcatttttctcattatatatagactcaaattacatgcaaaggataacaaccagccaattctcttgaccgggactcacgccatgcactaacaaactaaccctctatgcaaggctgcatgtacacctacatgcaagctaacaaccagaacgtgcatctatccactattgcgt

SEQ ID NO: 28571 - DNA, 673 bp, Oryza sativa
gttggtagaagttatgctatgattgccccatatgacgtagatggtaaccgtattacgtacccttctcttgggggacgaaactacaactctactacccctgttaaatttacaaaactagcaaaaccacttaaagtcggggatacagaggtttttgtagaagatgttagtctatggaacggacaggcaccgcaagactaccaacgtagtattatcatgtggggttataaaaactcgttcggctatacttatcccgatggaacgtatagtcagctaatgcagatgaggacatatgatattggtgcagttgacaccacagctaacaagattacgttaaacaagccatgggcagttgcaaacccaaatagttcagatgggattttcccagtagggcatacacttagcccaacttctgacggctccacatatttgtatttgaatggtcacgtaaatatacaagtacctactacgtacaccaagtacagccatttgattagtggctcttctgagtttgctaatacaacgattatcccagtagaaacaggttttattcaacttggattcttgttgaaccgtgatacaacaggtgaaaaatcttggctaaatggtttacgtctacgtgactatacagatacgtataaactaaacgatgacgttagagaaacacaagaaaacg

SEQ ID NO: 28572 - DNA, 4956 bp, Oryza sativa
tcaaatccaatttaaataaagcagtaaaaaaaactcaattaaaatgaacaaatgagagcagaattttgtcaattaaaactcaaatagatcatttttgcatgagagcgaataaataagacggacttacatagcgataaaataatgagaaattagatacatactaataataataataagagcataaatacctagcaacccatattcctgagttaggacctaatgcattcctcccatcaaatcccgactgactgtcgaataaatttcaaataattttactaaaaccctagactgacctaatttgacaaatctcacattaaatgagcgaccaagatttttcccttgaaccacaagaacagatcccaattttcccggaacaaatccaattgcaaagaacacatgcaatgaaaaggattgtcctacggtcaaggttggctctgataccaacttgtcacgcccagaaattcccgaatagaattccaagcagaatgtgcattaaaacccccgtctaggaccggccggggtacacaaacgataaagttgacatacagatcaacgtcttacaaacattataaaagtcttacataaatgcagcggaaaattaaaagataaatggagctaagccttaacttgaatttgcagcgggaacaccactccacaggcatcttagacgggacggacgaagcctactcttcggggaagccaccatctgacacgtactcaaactccgggttttggggaaaatagagttaggctgagtacaaccaccgtactcagcaagtcataccaaaatagggggtatgatgcagggtataatcaaggtatggctagaaaggttcatttgcataaagcgggcatttaaagacggtagttcaaagcagtaaaacagttgtagtaattaatcagtattaaccaatcactgtccaacgctacaccacgttgcaacaggcccaaccaaccacctgaactacaccagttcattagctaactaggggtgagactaatcacggtgaatctggttgaccgcccgtaaccgcgggcacggctattcgaatagttttactctgatcagaggtgtacaactgtacccacaagacacagccccacgacatgttaccgtgcgctgacatgccaccacgacataccgaaaagaggccgtgacaggacccttcgcataaccccctctagccaagcacaccacacctcaggtttcacccccgtccccagcgggcaacgggcagtcccctctcgtgcctaggtgaatccggaaggacagaggccgtcgcagggcccgtcccgctccatcacgcccacccttgcctggatgcgtcatctagaggaaagctacactacaagcccagccgttgcccacaatggcttgtggtaagtacgataagttcttccagggcatcccgcgaaccggtccttaattgctatgggcgcgaccatcaaaaccatgcacccacaacccaccatttaatatattttaattaaccaacaccggagcggtggcattaaccaacattattactagaatctgatatcaactcaataatgtattttccccattgtgtgttagttgaactaagcatggctaagtaatccctagtccaatatctagtcatgttatatccccaagctaacaaaggagcatggtacagaaatagcatggctgtaacagtaggtaaagatcccatagtaacattataaaacgatgcagtttttaaaggaaaacgatagagcatttgcaatataggatcaacatgttcaagtgacaagcatgacttgccttgctctgctgctggaggaacctcggcgactatttcaaagtacaccggagcgtcaggagagccggaatctaagcgacatacaaagcaaacaatgcaaacaggctataagactactgaaacagagaacaaaagcatttttaatggattttatgcatttttcttgatttactgcgacttgaataggcttaaacgaagctcggatgaattagatatgaattttagaagattcactgtgtttttactttaaacagaaaaatccttaattgatttattgcgcaatatatcccagggctgacgtcaacaagggagggacggcgccgacatgcgggccccacatggcagtgactcgggtggcggtccacggtggaccgggtccacggaccggggaaggaggcggcgcaccacgtggcgccgacgtggcgcacacgtggcagccatgtggcacgccacgcgggcggccgaaccgacggccccgatctacccgagggtagatcggatggcggcggggagcacgcggccggcgcgctcgggcggctcaagccggcccggcggccatggcgcacggcggcgctaacgcggggcggcggcggcagacggcggcgaccgatggcggcgtgatgagcggcggcggtgcgacggcgcggacggcgatagtggcggctaagcggctaggtggtggcgcggcggctaagtggcgcgggagagagagagaggaaggggagaggggaaaaggtgtctcaccgacggcgattgacgacggcaagcgacggagggcgatgacggcgacaggacaagctccggaaccacctagcgaacacggtgcaaggggttagagatgaagaggaaaatggaagagggcgaggacgccggccgaaggcggcggccatggcagtgctcaccggcgcacggcgcggagtgagttccggcggcggaatctgacaggagaggggtggacgaggtggcccgcacgacggcgaacgcgacgacgtctacggcgcggctcggcgcagcggcttgcgacggtagcgacgaccggagcggtgtcggcggcggcggaaaagaggacgacggcgctagggcgatgaagggcacgtgaacgcatggttgcaaacggaaatagagagaggagggaacggggaacctttatataggcccgcgggggtcgatcgtggccggggtgaccgcgattttgccggcgtagtgggaagaggtgggaaggacagagaggcgggattcaaaaattgaatcccggccgtctcgagcgcgggcgcgggcggtagagagagggagtgggcgcggggaaggcgggcatgagcggcgacgtgggcgacgtggcctagaatacgtgggagcgaggggtgacggcggttgcggtatgcggcggcgcggctgcaggtgggagacgggcccgacaggtgggccccacctgtcggtgaccccgggagagaggaggggctcgggcggccggctcagctgggtcgtggccttcggtcggcccagcggggagggggaggaggaagagaatgggccggcggcccattcgaaaaagaataaggggaaaaagaaaaagaaaaaggaggaaatgaattttcttgggattaaatattgcttgtgctcatttttgattggttaaaattatttctagagctatgaaaattccactaaaaatcttgttagcacatttcgacatgtagagctcaagaaaaattccacatgccaattccgattattatttgcattaatttatttagggtttcactcttgcttttacaccggtattttctcgagaccaattataaattcaattttggcttgggagaagaacttcagggtgtgacagttgcctcctgctcaaggacttaacaataagagccactatacagaggtaccacattgctaattaacataatgactaggtcagtccccattctagaaactgcggtcgcacccgttcgtttgacataagtacctggtgacaacttatatcgatcgagacagtactagccatccggaaatcatccaattcgtatgtcctgtcccaatctaagtataaaacattttaaccagattgtaagcaaaataagcaatactaaattatctgggtttctatggttgaattatgcatgtgaaagtagagtattgagtagaaaggttataaataaataacttgtaaaatataggcttaaacgatcaaaatgtgtatagtaacttgccttgctcgatgtcctgagattgactgatattatctaatgtgtcataagattcctcaagaccaagggttaaacatgtaaaattcaaattcaaaagggattcaaataaaatccaaaaataggtaaaaataaaataaaatataaaaatagcaaaagtggtctcaaaagatagagaatgattttagaagaattttggttcaagtttcactggaaatgaatctatattttaaaatatatgggcttctaaagtttgaaaatcaaattaaatgttaaatggtattgtgtgtgggtcccaccgatcagtctctccctctcttctcttcttcaacctccaactgttccccatttacggccggcggcgctagggttagggattatggcagtaataaagggggaaaggtgttgcggccgaggaggggaggtagatagggttccccggcgacggcgagcggcgccggaggggttaatttggtgtgtgagtaacctagcggctagggtggcggtgacatggatgagctgaaaaggtgatcggggtggtgagagttaggcatggctcagggaaggttcctagagcatctatgaggtgtctagaaggatttaagtagcttgccgacgttcggcaaggtatggaagatacttgctgacttgcgcctccattggcggtggtcgagctcacgtcggcagtcaagagggtgatgttagtgctaaccaattacgaaaatggaatctaaggagtatgtcgatggttaaaatggaagaactcaccgagataggttgaaacgacggattgcgaccggaaaaacctctcggcagcgaagaacagagcagagcaggggcggcagtgctcggctcggtgtgacgaggtgtcgacgcagagcttcggttaggctttagtatgctagaacatggttgaatataggtgttctatgggttggttagggtagagggtggatggagtg

SEQ ID NO: 28573 - DNA, 1171 bp, Oryza sativa
atcaattcagcgcgctgttttgcatcaaagttcactctctctgaagttgggaggggcaaaagatcaattggagtatggggcagaaggccataaacaatctcaaaagggcacttcttagtagtagaatgttgtgaacgattataagaaaactcaacatgaggcaaacattcttcccacattttaatattctttttcaaaacagccctaagcattgtagataatgttctagtcacaacctcggtttgtctatcagtttgggggcgacatgtagtagaaaataaaagtttagttcccaacttagcccacaaggttctccaaaaatgactaaggaattttgtatcgtgatcagaaactatggtgtttggcactccatgccagcgaacagtctcatgaaagaacaaatcagcaacatgtgtagcatcatcactcttatgacaaggtatgaaatgcgccatcttagaaaatctatctacaacaacaaagatactgtccctccccttctttgttctaggcagccctaaaacaaagtccatagaaatatcctcccaaggcacactaggaacatgcaaaggcatatacaaactatgagggttaaggcgtgacttagctttttggcatgttgtgcagtgagcaacgaacctctccacgtctctcctcatcttgggccaaaagaaatgatcagtaaggatatccttcgtcttcttcacaccaaagtttcccatcagccctccaccatgtgcttcctgcaataatagcatacgcacggagctagctggaatgcataacttattagctctaaacacaaacccattggtgagaacaaatttgttccaagtccttccctccttgcaatttaacaacacatctttaaaatcatcatcgtgcgcatattgctcttttattgtttacaagccaaaaattttgaagtcaagttgggatagcattgtgtaacgtctagacaaagcatcagcaatgacattttcttttcccttcttatgtttgatgacatatggaaaaaattcaataaattcaacccatttagcatgcctacggttaagttttgcttgacttcgaatgtgtttcaaagattcatgatcagagtgtataacaaattctttgggccataaataatgatgtcatgtttccaatgttcgcactagagcaaacaatt

SEQ ID NO: 28574 - DNA, 13080 bp, Oryza sativa
  unsure (1)..(13080): unsure at all n locations
acttctcaaggttaccaaataaacgtgcatctcgtagagcatcaaaaatagcaggcaaatgaccatgatgatcctctattgatctgttatatatgagaatgtcattaaaatataccaccacaaatctgccaatgaaagcacgtaaaacttcattcattaatctcatgaaagtactgggtgcattagtgataccaaagggcatgactaaccactcatataggccgaatttagttttaaaagctgttttccatttatctcctaacttcatgcgaatctagtggtaaccactacgcaaatcaattttagagaacacaagtgaaccactcaattcatcaagcatatcatctagcctagggataggatgaggatatctgattgtgatgttgttaattgctctacaattcacactcatgcgccatgagccatctttcttaggaactaaaagcacggggatagcacaaggactaggagactcacgcacataccccttgtcgagtaactcttgcacttgacgttgaatctcctttgtttcctccgagtgggtcctgtatggtacacggtttggcaaagaggccccaggaatgaggtcaatttggagctcaatccctcgaattggtggcagccccaatggaacttcctttgcgaaaacatcagcatactcctgcgaaatgttagtgaccggagaggcaaagaaatagagtatcctcaattggaaataaagtttgtttgcaaaccaaagcatagcaaacaacagtgtcagtgtcaacttcatccaaatctgattttgtttcaatgaaacaagatcccttcagcttaatctcatttttattattttgaatagagttggtggatttcttcttatgcttctcaagttcattagccacaatatgatgctagtatgctcctgtttttttgtttgctagctctagcaagttcattctttaaaataacttaaagagacataggatgtaacacaagtttttttccattatgcacaaaggagtattgattggatttgccaaagtgtaaggaatctttatcaaactgccatggcctacgtaataacatagaacaagcttgcatagacacaacatcatagttgattgaatcatgataagaaccaatggcaaaatgtactcttaccaatcgtgttacctttaccttgccgctgctattaagccattgaatatagtagggctgcggatgtggctgtgtgctcaatgcaagtttcttcaccatttcagcactaaattattgcagcttcatccatctatgatcatgcgacaagagcgttccttgatcacacacttggtttgaaacaaggtgtggcgctgattctgttcagccccttccatttatgcgcttagcactcgctgcaccacgaggctctcatagtcctctgcagcctcggccccaatgtgttcctcatcttggtggggcgcgtcgccttcccctgcattgttagttgcaagcaaagcataggtttcttcatctaaatcactagcggaggagtacccaccatcagctctcacgatcattacacgagtgcttggccagtccttgcgcacgtgaccaaagcccttgcagcgtaggcactgaatatctcttgtccttcctgataatgccactgatgatgagctcttggaagatgtagcagcaacccctcttgtgggttcactcgggcatggtgtagagtttgttgtagagggacgcaacttgttgcttgaggacgatggtgctgctgctcgagttgacggtgcagcagcgttggaaggggtccaagagctagcacgacctgcagaaatgttagtcctgaagccagctcttcgtccctgcacttccatttcagctttacaagcaagatgaaacaaacgatatattgaattatattctttgtaggctagaatgtcctgaatttctcggttcagcccacccatgaatctatccataccagcatcatcattttccaccaatccacagcaaagcattcctgtttgcaaagcttgataatactcttctacagatttgttttcttgtctaagttgttgcaatttatgcaacaaatcacgtgcatgatatgaaggaacaaatctagatcgcatgaatcttttcattgcatcccaggtttggggagtgttatttggattggaacaaacaaattcactccactaaatggatgcaaaatcagtgaactcactagtagcaaccctaacacgtttattctcaggaaaatcatggcaagcaaatttctgatcaatggctaactcccaagtaagatatgcatcagggtcatattttccatcaaagcaaggaatggtaaacttgatcttgcctaaagaatcatcattatcacgtgcctcccgccgtggtggagcgcccatgccatggcgctaccggcactgttgtcttcgttgacgaccaagtaccttctcatcatgctcggtgtcagcagcgtactctagttcttcccttgctgcgatgctgctattagcatcatggccattgtggttgcgcctagccgatccatcatgaccatctttgctcattctctccaatgtattcaagatacctgcaagagaagtgttcacagccacaagggacctctccaatgaggaggaaaacttggagttggtgtcaatttgagcagcctccaattgaccaaggcgatcattggcgaccctatttaggggtaggtatgacggttatacaatgcgaattgtcggaaatgccccgcaaccgccatcaggagatgatcaagaccgtccacgccaaaccccagcctggatggctgagattgtggttcggccgaacctcggctgaacctgggctagtgtcacgcccagaaatttagcccaaatttccagactattttgtgtattaaatccctgtccaggaccagccagggtacacaaaacaataagtaatatacagttccaaacgtaaataaagcgtaaaatacttacagaagatgcacttagtcctcacaccgaaacaaaagcagcagcagtggaaaaaggcgatcctagcggggcttcagcttcacttcacaggcaaaactcgactggggtctgagccttggtcttctaacctcgtcttcagctcagaagcactacacttctgnaaagggggaataatagcaagactgagtacaaccaccgtactcagcaaaccacaccaacgatgcagacgtgcaagggacaacaagacggttttgtgcatatttgcataaggcagttgtaaaacattttattgagcaaaatactaaaactgttgagtaattaaggtaatattaaatctccactgatcaacgctacaccacgatgaacaggcccaaccaacccacctgaactacagtgcattgagtcgattcattaaggtgggactaatcacggtgaatctggtcgaccgcccataaccgcgggcacggctattcgaatagttttactctgatcagaggtgtacaactgtacccacaagacacagccccacgacacgtttccgtgcgccgacatgccaccacgacataccggaaagaggtcgtgacaggatccttcgcataaccctctctagccaagcacaccacacctcaggtttcacccccactcctcgcaaggcagcgggcaatcccctctcgtgcctaggtgaatccggaagcgacagaggccgtcgcagggcccgccccgctccatcacacccacccttgcctggatgcgtcggctagaggaaagctacactacaagcccagccgttgcccacgctggcttgtggtaagtacgagaaattcttccagggtttcccgtgaaccggtccttaattgccatgggtgcgactagcaaaaccatgcacccacagcccacccttcagtcgcattttagttggataattatgaccatgaagcatggccagatgtctcgagcacgcagctcattctgatactaaaaggtctaatattgtaattatcccatcaactgagctagtggtaattaagcatggctaagcatatagttctagctaggtcacataagtaacatgagctagtcgatttattacccaatgttgacaaaggacatatatcaagtaaatatggcacaagcgagcagataggtaaaccctgatcccatgtaattagcaaaacacgcatatttatttgcaaatagtaaaacatttgtaaattgggatcaacatgctaaaggggaatgtgtgacttgccttgcttcttcactttgatcttccgaactcttttcctcgtgaccgcggacttccgaaacgacgagaactacacgctggcacgcaaaacaaggaaaaactctaataaaaaccaagaaaacggtatataaaaagtaaacaaacatgtagagctcaattttagatgaattttgcaagttgaatggctcaattcggagttcgaatgaattagatatgaattttagaaggttttgagccattaaattaatatctataattattaccaaattattgcgcaattattaaatattttcacaaaggaaaaggactgccgctgacgttagcaagagagggggccggcgccgacaggcgggtcccaggcatcagtggctcaagggggctcggtccaccatggaccgggaccacaagggcggtccaccgcccgtccacgggatggacggcccagatcggcccaagccgatcgggcggctgaggagagcggtggccgggcacgggcacagccggggctggcccgaccgaccacagagggcggcggcgcgcagtcaccagcaacggcggggggcgggcggcacagggagcagcggcgcgcagcgcgggaagcggcgagaggaaacggaggcagtgagggagagggaggtggcggagctcaccgaggggcacggcgacggcgagagcagccggcggagggaggcggcggcgctccacaggtcgacaatgagaaggggctcccggcggcggaaggcggcgatcgggcggcggacggggaagagcgggacgcggcgaagccggcgatgcgttgcggcggcagccagggtgaagccgaacggcgaccggaggcggaaaaaggcggccggtagggtggtatggcaggaaggtggttctggtggtggaggggaaaaatggatggcggccgagcttgccctcgcggtggtaaagctaatgccggccgcggggtggctgagagcagtgaggtgtggccggaggcgacgaccggagtggcggaggaatggtacggcttgggtgggtggtggaggtgatgactcggccacggattggtggaacgaggcagtggccggtgctctgcttggagcggcgaagccgacactggcggtggtgcggcttggcggtggctagcgtggcgaggagaggcggccggagttcggcggcaagcggcggagagaggttacatggtggggaggtggttccgatggcggttgaaggaaaccgagtggaggccggcgtgcggcgcgggatggcgaagctgatggcacacgcgatgaggcgcggcgacggcgggagcagcggcggcgcgcggctggagatcgccggcgagcggcggcgatggggatcgacgtggagagctcggtagagggcgtgggggactcgggaaaacggggaaaaaggaagaggaggccacgaggattgattttacagctcaagggggcgaggagagggccggggagcggcggatttcgagggggagtggggcggcgtcttgggggtggtggcggcggtttttcgcgggacggagtgggggaggggagcggggtcgtgggtgacgaggtcccacggtcgggcaggagtggtgcagggtggaagaagttggcgggaaaagcggtgacgtggggcggctcgggcggccatggcggttgcagccggctagccagaggaaggaggaggaggggccgtgggtcccacctgtcggccaaagcaagagggggccggttaggggaggaaaagaggacttgagggagagggaggggaggagctgggccggcggcccaaaggagggaggagggcggccgggccggaggtgaagggggaaagaatttgggccgagcccaaaagggaggaaggggaagattattttattttctttttatttaaattgattaaatgaactttgtattattataattacttcttgagctccgaaaattcacggcaaaatttcagagaatatttagggcacaaagaatattacaaaatattctcgcccaatgatttttaaaggaaatttttaattccctcaatatttcacttgattaaattgctttaacttttatttaatttctggaaaatacattatttaatgatttttaatcccaacgaaaatcggggcgttacagctaggcccatctggcctggctctttgcgcatcttcccccctgaccttctctacctatttctcaggattttgggttgactctcgggtattttgatgaagttcataacccatccttgtatggatacataattctcctcactttagtctagatttcctcccaacatcgaggtttatcacctgctgacggagcatgggggtcctcaccgggagaccgcgcaggcccccctttgccggttcggccgggggcgctaagtgaggttcttcgccctcgatctgaggaacgtccgcgagagaggaagtgcacaagacacgggcgacgtagacaggttcgggccgctgggaagcgtaacaccctactcctgtgttctggtggatctgtgcgtgaaggaatacagagagctggagagcgagccagagttcagggtctagcacccattccccttttttctcctccctccagagtcccctttctttttttcttttctcttttctctccagagtccccccctcttaggcctgggcaccctttttatctggtcaggggtcaccacaagggcctccagctgcctaagaaaggaaacatgctttttacaatgagggctagtctacagccggaagtgacctctgacaagcagagcacacgcctcctgcccgctcgcccgcttttccggtggacgcccatttcaaccttcatttaatggccagcgacttccttgccatacttgcgctgaagcctggaatggttctgaccgggactgacataccaactccaggagttagcacgccggctccggctagggacgagagccaggaagctctcatcattccgacgggacggggcgaggcgtgtgacaggccgcctgttgccacctaacccgcgatctgaccggtctgtgaccggtcacacaccgcgactggtcacagaccggataagcgtgcgctgcgccgcattaaatgcggcgtggcgcgctcgtccaacctgttataaatgcggttaggtgagccccgcagtgctcacctaactcacacacgtggcgccaaaaccacagggggtcggggcgtcgcagccctcggggccgaaacgggggcgccccagccctcagggccgaaacgggagcggcccgacccctcggggagacagagggaggggtggccacgtcaccctcgggcccgaccccccccccccccgagggggtcaggccacgtgggtgaccgcggctacccaagcctctagtcacgatacccctggccccatgtcaccgacagtagcccccggcgttacgccagggcgatcgcccccctcgagggaagcgctcgggcgtgacgccactccttaggcccggtgacaggtggggccggtccctacaggcgggcagaaacccagcggtcgcaaatcgcgcgcatcagcaagggaaaaccgaccgacaataatgagcggcttctttaagactgctacattactcgagcagcgcgcgaatcgggacgagccggttcgtttcgcctggagacatgatgatggcgcttttcacggttggcgagcgtagttaatgcgcgcacgatctgccccatctcaaccgccacggccgcacatctgccgcgtgcgccgcaaacgagcgagtgggttagtggaggcgtgggcgcgagaagccgggtatagcattggcaagggtgtaaagacgtcgaggaagggattcgttcctttcctctcgccactctcccccttgccttcgccacttgtgctctaactcttcgtttcctgtgccctacccttgccgcactcgctcgctctcaagctcctcctccgccggcgtcatggcacggagctccgcaccgctcgacggtagcgtgctgccgccttcccgcatcgtgagcgagaggcaggccgggctgccgcgccgattcatgccagaatccgccaccggccgggaggtggtcgcgctgggcgagggacgcccgacaccacactacccggggcggtccgtcttcttcctctctttcgcaatggcggggctggtcccgccattctctatttttttcatggatattctggagttttatgatctccagatggcgcacctcacccccaacgcgataatgacgttggccatcttcgcgcacctgtgcgagatgtttattggggtgcgcccatctctccggctgttccggtggttcttcaccgtacagccggtgtcgccgccgacggtagtcggtggctgctacttccagccgcgggggcaggtgctgaaccgctacattctctgcgtcctccgcaaaaagtgggatgactggaagagcgattggttctacacccccctcgccgacgaagcgcgcctccgacttccgagccagcccccggcgcaggcctccagctggcgggcgacggtagatctgggagacggctacgacgccgttcttgaccgcctggcgggtctgcgatcccaggggctcacgggggccatggtgttcggtgactaccttcatcgccggatcgcgctgctccagcggcgcgcccggggcgcctgggtgtacaccgggcccgaggactacgtgaggacccaccaggggcgcaaatgggacttggaccctgaggacttcaggatggtggtccaacgggtgctgaatctcagctccgtggaggcatccctcatcccccaaggggtcctccccatctgctgcgatccagagcgcgccaagatcctggccatcatgtaggtggtcggggcgtcgggggagcgggccccccgaggccacgatggcgcgggcgggagccgcaggagggaacaatctaccccgggagggggtcgtgcttctgggccccgcgacgggggcccgggggtatccgccctaccgacgcccgggggaagaggaagcaggagggtacccctcccccatctcctccccgagggggcggggcggtgcgtgccagcagcaggcgcccggagggtgctgtgtcgacgccgcagcccgagggggagcgaaagaagaaacggctccgcaagatggggggaccgagccatgccgggagagcctcatctcgcccccgaggtggtcgtttagccgacatccccgcaggttcgtccccgcgcccaccgcgagttttcaaggcgagttttcactcacccgtttctttttgtcttctggtttttcttctgcctaagcgagatcccgtcgcgccctccccgccattccaagtccagccggtctgaggccgaggagacggcgaccgcggaggcccggaggcgggaagctgaccggcgagaagccgcggaccgcctccgggaagccgaggaggctgcccaggaggccgtccgggttcgccaggctgaggaggccgctcgggaggaggctagactccgccgggccggggagtccgtccgggaggcagaggcggcgcgcgcacgccaggcggcctgccaaacccccgacccgactccgcccgaggcgacgccgacttccgaggccacccacgacgaggccgcgggcgcgccgctcgggcccgacccctcgggcgacgcttgggacgagccaggttcgggggacgcccccgagtccggcacgtcgatcggcgggccgagccgcgcggcacccacactgaggcggctctcccctctgccttccgctgccccactgagcgcggagcccctcctgcaggccttggccgccgcgaacagcacggtgctggacgggttaagtgcccagatggaggccctgcatgcggagcgggcggagctcgacgcggcgtgggcgcacgtcgaggaggggcggcgctcggtggaggccatggtggaggcgggccgcaaggcacaccgccggcacgcctcacagctcgaggcccgtcgtagggacctggcggagatcgccagggaggtggaggaggagcgggagactgccctcatcgccaccgccgtgctcgacgaggcgcgggacgacctccgcctccaatacgggagccgggcggcggagctagaggagaagctcgacgctgcccggggagtccttgacgccgccgctgcccgggaacggcgggcggcggagaacaaggcggcgtcccggcagcgcgaagaggcccttgaggctcgcgccacagcgctggaggagcgcgcccgcgccctggacgcgaaggagagaaacctggcggaccgcgaggccgcctgcgctaaagaggagtccgcactccgcctccgcgaggacgcgctcaccgagcgggggcgaactctcgaagaggccgagcccgcggcgcagcgactggcgaacagcctgttcctccgcgaggcagcgcgggaggagcaggcgcgccgcaatctggaaggcgcccgcgccgagagggccgcactggatcagcgggccgctgagctcgaggcgcgggcgaaggagctggacgcgagagcgcacagcggcggggcggccgcgggccacggcgacctagccgcccgcctcgcagccgccgaacacaccatcgccgagctgcaggcgcgctggactcgtccgccggggaggtcgaggccctccgcttggcgagcgaggtagggcccggcatgcttcgggcagcaggcgggcctctggggcgggcggtacgcgaagtacaccgccaaccaggggggcctcgcccagcgcctctcagagatggccggggccctcgagcggctccccgaggagctcgaggagacgatcaagtcatcctcgagggacctcgcccgggggccggtggagctcgtactggcaagctaccaggccagggaccctgacttctccccgtgggcagcactggaagatttccctcccggaaccgaggacggcgcgcgcgcgcaggtccgggattccgccgaccacatcgtccacagctttgagggtacggcccctcggctcgcgttcgccctcgacttcgacgaggagggcggtgacgacagtgcggacgacagcgacgacgaggccggcgacccgggcgcgtcggagtgagcccccaaggccccgccaatcttaataacttttccttcttcttccgaggccttcgggccccctttttgtatagactgatttaatctgcaatcaagtaaagaggaaatttctgcgtcagttctgtttgttgtgtgtataagacgaggatggtctgtgccgcggtccttctgtgtcttggcttgaacaagggctagtgcccaggtcccagcctcaaacggcgcgggtcggggctagtgcctggggagatccacgtgtcgagactggccaggccgggagagcggtgaccgagggttatggatgacccgattgtgggcctttgccgattcccccccggagttcaccacgccccgggaaacggctcggttctgggccccatttggcgattttagccggcccgggccaccgagggcagggtcgagcacgagcgtgctaattcaagccaagattcttcaaaaggaaacgatggcacagacacagtcctcaggaaatcgaaaatgcttttattgaaatacggaagagaaaaaagataagtatatgcatgtggtagcccccggccaaccctgcacgcccgggggggtgcggggttggcccgagcccgagacatgacacccgacccccactaggggtagaagcgacgaaggtgttcgatgtttcacgggttaggcagctctgtgccgtcgcccgtggccagccgaatggagcccggccgggggacgccgatcactcgatacggaccctcccacattggtgagagcttgctcagtccggcacgcgtttggacgcggcgtaggacgaggtcgtcgacgcagagtgatcgggcccggacgtggcactgatggtagcgccgcaggctctgctggtagcgcgcgccgcgcgccgccttcgctcttccaaatagtcgaggtcgtctcggtgaagctgatcttgatcagcctcgcaatacatggtgacccgaggggacctcagggtgagctcagatgggaggaccacctccgcgccgtagacgaggaagaaaggcgtttccccggttgctcggcttggcgtggttcggttcgcccagagcaccgctggcagctcctcgatccacgagtcgccgtgcttcttgaggatgttgaaggtcttggttttgaggcccttgaggatttccgcattggcgcgctccacttggccattgcttctagggtgggcggggtaggcgaagcagagcttgatgcccatgtcttcgcagtagtcaccgaagagctcactagtgaactgggtgccattatccgtaatgatacggttgggcaccccaaaccgaacagtgatgcccctgatgaatttaagcgcggagtgcttatcgatcttgatgaccggataagcctcgggccacttagtgaacttgtcgacagcgacatacaaatactcgaacccgcccggggcccgcctgaacggacccaggatatcgagcccccagacagcaaacggccacgaaagaggtatggtctgcagggcctgggccggccgatgggtttgcctggcgtggaactggcacgccctgcaccgccggatcaggtcgaccgcatcgttgagagccgtcggccaatagaaaccctggcgaaaggccttgccaaccaaggtgcgtgaggcggagtgggctccacactcgccttcatggacatcggcgagaagctcgacgccttgttcccgaggaatgcacttcaggaggactccgttagccgcgcgccgatagagggtcccttccaccagcacgtagcgcttgaagatgcgccggacgcgttcactccctt

SEQ ID NO: 28575 - DNA, 4597 bp, Oryza sativa
tgggcacgtgccgaagctctatcccgtcgaaatggcgctccatatgccgcacctggcgcacgtaagcgtccatctgcgggtcagagcactggtactccttacagacctggttaacgactaactgggagtcgcctaacaccaggaggcggcggatccccagtccagctgccactctgagccccgcaaggagtccctcgtactctgccatattgttggtcgcccgaaaatcgaggcggaccaggtatctgaggacgtctccgctcggcgaggtcaacgtgacccccgcaccggcgccctgaagagacagggaaccgtcgaactgtatcacccagtaggcggtgtgaggcagctgcgaggggcccgagctggcctcgggggcggagacgggctcgggagctggggtccactccgccacaaagtcggcgagggcctagctcttgatcgcgtggcgtggttcaaagcgcaaatcgaattcagagagttcgattgcccatctcaccacccgtccagtaccttctcggttatgcaagatttggccgaggaggtaagacgtaaccaccgtgacccgatgggcctggaaataatggcgcaacttcctcgaagccatcagaatagcgtaaagcatcttctgggcctgagggtatcgggtcttggcgtcccggagggcctcgctaacgaagtatacggcccgctgcacctttcggcggggccaatcctcttcgccaggggccgcatctccagggcgctcttcgtccgagaggccacgcggggcgcactcggcttctgtgccgatgacctcggggtcagagggcgacaggcgcagccttcccgcagtggccccggggccatcctgggggtcgggggcgcctggcaccgtcggacaagcaggcggagggccagctccgaccgtcgggggccttggccgccgttcggctcgggggcctctcctccctgctctctcccgggtcgagtcgacacagggtggggatgcgcggagtgagggttgtcctcgtcgcgctccacgaccaacgccgcgctgaccacctgcggggttgccgccaggtagagtagcaacggctcatctggctccggggcgaccaggactgggggagaactgaggtacgccttcaactgagtgaaggcctgctcagcctcctccgtccaggtaaacggcccggagcgtttgaggagcttaaataggggtagcgccttctctcccagcctcgatatgaaccgacttagggcggccatgcagccggtgacgcactgcacatccctaagcttgctgggggggcgcatccgctctatagctcgtatcttctcggggttggcctcgatgcctcgggcagagaccaagaacccgagaagcttgcccgcaggcacgccgaacacgcacttatcggggttcagctttatgcgggtggagcggagacttccgaaagtttccgctagatccgagagtaaggtctcttggttgcgcgtcttcacaaccaagtcatcaacataggcctcaacattgcttcctatctggctacccaaagaaattcgagtagtacgctgaaaagtaggacctgcattctttaacccgaaaggcattgtcgtataacaataagttcctatgggggtaatgaatgcagttttttcctcatcctccctagccatgcgaatctgatgataaccagagtatgcatctagaaaacacaaaaggtcgcaccccgcggtggagtcgacaatctgatctatgcgtggcagggggtaagggtccttaggacatgccttgttaaggtcggtgtagtcgatgcacatccgaagcttgccgttggccttgggaacaacgaccgggttcgccagccactccagatggatgacctcacggatgaatccggcctccagaagtcgcgccacctcctcgcggatgaaggcttgacgttccggggcctgccgccgcactttctgccggaccggccttgcgcccggccgcacggcgagacggtgctcaatcacctccctggggacccctggcatgtctgccggtcttcaggcgaagacgtcggcgtttgcccgcaggaaggagacgagcgcgtcttcctatttgtcgtccagaagaccaccgattcgtgtggtcttggacgagccgtcgcccagggcaacctccttgaccgggacctcgtcgcacgtgaccatccgctgccttggggcggccgggacggaggtgctgagcctctcgtcgccacccgcgggcttggacgccgcggcgaggtggtccgcgcgctgctccatacaagcaagcgcgactttgaggtcgccatggacggtgatggggccaccggggcccggcatcttcatctggagataggcgtagtggaccgccgccatgaacttcaccaacgcgggcctccctaggaccgcgttgtagggtagactgaggtccgccacatcgaagtccacccgctccgtgcggaagttggcggaaccaccgaaggtgaccgggaggtcgatatgacccagcggccaggtgtgccccggcgtcacaccgatgatcggctgggacggccggagcaccatccccggggccttgatggcgtcaaaggctgcgggggaaaggatgttgagggctgcacccccgtctatgaggacacgccccaacttcacattgcaaacggtgggggaaaccaccatcgcgatctgtcctccccgggcaacgcacggcgggtggtcggtctggtcgaaggtgagggcaacctccgaccaccgcgcccgccgcgtcgcctcatgggtaggggccgcggccagaagctctcgcttcatgtccttgaggctccggcgagaagcgtgagcgcacgctcccccatcgacggtggcgacggtggcctcaggctcctggaaccccaggtcatcgtcgccatcgtcgatgtcctcggcggtggccttctgcttggcctcacctcgccggttgccggtgggagccgccggggttttgccctcacagcgctcctgcttcttctcctcctcccacttcctcgtccgctcagccaaacttttgaccgcgcggcagtccgcgaggtcgtggaggaaggtgttgtgcacggtacaccacttgccggtcgggcgctccctgctgggagcgccggcctccttctttttgtcgctcacaggcctcccctttcggggggcccgcgaagcgccctcgacggcgaggacgtgaccctcgtcgtcggaacgggccgaccccttcttcctcttcctgtcccgccgccctgaccgagcggcggacccgggggcggccgaagctgccacaccagaatcggaggagttccaggtccaggcctcctccttttgagccacacggtccgcgagctcaaaaagctgcgcggtggtctggggctccttggaggcgatcttctcgagcatgcggttgcgccgtacgccccccctgaacgcgtagatcaccccgtgtgcggggatgcacggtatggtgttgcggacttgacagaaccgctgaatgtacgagtgaagagactcatcgtcccttcgctgtaccgcatgcaagtccgcttcttcgcctgggcgcggatatatgccctggaagttcatggtgaactgctggcacaaatccttccaagagtggaccgacgcgggtggcaagttcattagccaaccccacgcctgacccttcagggccatggggaagaaattcgccatgaccctgtcgtcacccccggcggcctcgatcccggtcgtgtagatctggagaaactcggcggggttgacgcttccgtcgtatttttcggtgatggtggggccggaaccttggggccaacggacgttccgaaggctcgccacaaaggctcgacagccggcaccgccaaccggggacacggggggccggcccccgtgcccggaccgaagtggcgctccggacgaggaagcgccctccgttgcgtgggcggcgcgcgtcgcgccgccgctcgatatcgaggcgggcatccggccccccacgcacatcttcttgggtcggaggcgttgacgagggaatggcggacgaacggcgggtaacggccgccgctcgccgcgccctccgcctcgacgacatggagccggcggcggcagcgccagaggcctcggtggcggaggaccgcccgccggcgcctaggcgctgctgcgccgccatgaccaagtcggccacgtcatccagccaacgtcgggctggagtctctggatcggggacgacgggcgggtgacgcaggagcgcgcccgcagcctggagcgcgccctggggcgtgccgccatcgccgtagacgaggcggcgacacgccccgtctcgccgtcctcccccgtcgcccgcgggcggtgaagtcgcggttccttcgaacctccccgagcgcctccccccgcccaagatttcagtgagagggggacggtggggtgcgagcccgacggcgcgggttctgctccccgtcgtcaccgctagcgttcggagagaggctgtgcgccactgcccgttcggccattaggctgagcgggagaagcttggtgcacacgaaagaggacgagggcttaaaaagacacgcgcgccccctacctggcgcgccagatg

SEQ ID NO: 28576 - DNA, 5606 bp, Oryza sativa
  unsure (1)..(5606): unsure at all n locations
cccccccccccccccgagggggtcaggccacgtgggtgaccgcggctacccaagcctctagtcacgatacccccggccccatgtcaccgacacctgcatatacatatacacgaacacttgtggaatatgtgagattaagcacctatcactatattggatgttttattatctgaactttatgcagatgttgtcggtatagaatctgcatttaacatccgccaacattcactaaggtttagggtaaaggaaataattagggtaggttaaaagagttctaaagaaataatacttgaaccaaaattaagaataaaaagagttcaaataacaatgattttaattttgctaatatagtcaaaagccagcatgatgcagtcaaattttagtttaaaatttgaggatgttacaaacctacccaccttaaataaatctcatcccgagatttgcttaggagtcttcaaaaagatacgggaattccaattgtaaataatcttcccgtttccaggttgcttggtcctctgtatggtgattccattggactttaaacaactttattaccttagtgcgagttgttctttgtgcttcatccaaaatagtagcatacaacataaagagtctcatgaaagaatcacatattcattaaccaataatgagttatctatttcaaggaacaatatcggataaatatgtaaatatagtatgtgatacaatcatctctatgattgcctctagggcttatcaccaacaggtatgatggttatggaacgcgaaaagacacttctgccctccaaccgtcatttaggagctcatctagaccatccacgcgaagccccagttcgaacggctgtggtagtggttggccgaaccatgggttcgaccaaacccaggtctggctcgacagagcccatcttcggcctgttgctccttctctgcgtcctctatccatttctgtgagtggaaagcccatttgaagatgttttctggtagtttttggcccactcttggtatggataggaattattcttcactcaagtctatttttggtccaactttggtggtttattacctgcatacaaatatacaccaacactcgtggaatatgtcagaatttaaccctatcactatgttggatgttttatttccttgatttatgcaggtattggtggcataaagtctgtcattaacaacagccaacagcctcatagttaaaatcctccattctcgcattagcaagttgcttttggtgcaaagttaactggcgggtatattgtcttgtgctaacccctgctcgagttcgctttgtattcttgcctttgtgcagtcatgaggagacggctctcccacttgctcaagggatccggctcccgatccaaccagtcgagcgatcgggcatctgccgacgtgtcaatggagaacactgacgctgtaccacagctcctgaccgacaacgacctcgatatcgttgacagacgagagaaacaagcctaccagatgctgaaggaccgatcattcgctcacaaccgagcgtacgatccaaagctactccggaaaacaagtatggatgtagattttagtgtcatttggagaaccatgggttggcacgcctttgcaacggtagacgagcttggctcttgtctactaactatacagtttctgtgcacacttaggctcttgtctactaactatacagtttctctgcacacttagagaagcagagggtggtgttactttttgacttttccgtaaagagtttaatcttttatgtagtggattgagcacacttctcggtttccccgaatcctgtagagtcgatttttggaaggcaacttccggttttgagaaaaacatattctgtgaagatatttctggtgcaccgatttataagaaacccagaaccaatgacatccataatctaactcttaggcttatgtacaaatggattgccatgtctctgataatgaattgattattctatatgccatggttcattagaaactattaagtgtggcggaaggggcggacgctgggcgtgtccacgtcggattttgctacagtagctacagtgcgaggttggatttttgcgaaaaagccctccggttcttcgtaatcaggtataggcccctcgcgtcctgtgtttgaagagaaaaaatcgcggacaggggcttcgttgtgatatgtggaagacgaggggctttttcgaaaaaatactcccactagcgcagacccctcaaaccctagccgcttgctctccctctctcgcgccgctaccaagcactggcgcttcgccttcccctcacgccgttcccgtcgcctcgcgccggcgacttcacccccgtcgncgactgcccatcgagctggcaccttcgactcccgcgtccccatcgccggccgagctgccgccgtccgtctcccctccgccctctcttcccccactctctccttctccctttccctctccctccgccgtctcctcccccaccctcgcctccgccttcccctcgcgccattgcctccgcctacgcagccgctgtcgtcgcgtcaccgtctccaagcgcctctgcttccgcatccccctcgcgtcgtcgccatcatcgtccccgtcgccctgcgccgctggcgccattgcgtcgccgtctccgaccgccgtcaccgagtgcagccgtctccgcctccggcatccgtcaacgacgaggtcggagcgccgacggctgcatcacaggcggcgcgaaaagctgagggcccaatcctggcggcgggactgccgcgaggttccggacgcatcaactcgagggggagacggcggagggagtgggggttgaggcgggcgcggtcttcgtcctcccggcgccagatctgcttctcatctccacaaggacaccccagcccaccactcatcggcgtcgccatggtcgtcggcgtcgccctcactgtcgccgtcgccaacagactgcgttaagaagccacttcaccaccagcagcagcaggggcatccaccgtacgccgcaccaatgccttccccttccctcccatctgtgccctctgggtcacaggtagtcgcttcatcggcagccgcgttgccgtcaatgtacaaggccaatgaccagcagcgagcaactcatggcaccagagacggcggtggcgacggtgactactaaactcttggcacaggagcttacaaaggatgtgcaggtttgtgtgagttgttcttttaaggttgccatgaggaatagttaatctcgttttttcccctatacaccatgaattgttgcacatcaacattgacagtgattttcatttttttattaatgcaatggagcaacctaactattataccaatttaccaggtgctctaatgccactgttggtgatgaaattttgagagaccctaatcttgccatgtttatgatgttctacagaacctgcatccattccatctaaaagaactcatcagctgggattgaagtactgatcagatctttttttctaggtgaactctagaagaaagttcgaaaaatgggacattgcaatcacaacattggaacctaatatcaacactatgctcattgccataggttctcccatttgtatagcatttagagatttctttttttataaaaaaattgtgaacaatttccataaactcacatcaaggtgtctcatgcagtgccaagtaaagaaagggactacaatgcttattcaaaggattatatgtcttccatagtgaagcagtcttgcactaatactagaagctgctttagagatggagacatcccatcaaaaatctgcaattacccaatgagtgagccattttttccccatgataacttactatttcagatatgtatttctatacatgtggcaccttttcattctagtgtttttttgactgggcttttcattccagtgttgtgcctgaggatcatataaatgactctgatcaatcctccacctaagctggttgctctgcttgctgtgaccatgccacgacatccgaaaacacagaggaccaggttggttagcatatttcatactcggtgccctctggaacnatcgatagagaatcacttctagcnatctgttatgattcatttccagatgcattaatctattctctttcttagtacttacttgggtattttaggttttcttggggcttagttatagaatagggttttggagtgggtttgtgaggggtgattgaaaagttgaaactcttttgccgcgaataaatctgcagtaacatgcctatcatttcacttcagagccaatgcatttgggtaatgtctcaaaatttgttttgtatttggtggtttcggcttttttggttgaaggaatctgcaatatatcatgcttccccaatgagtgagccattttttccccatggttacttaatatttcagatttgtatttctatacatgtggcaccttttcattccagtgttgtgcttgaggatcatataaacgactctgatcaatcctccaccatagctggttgttctgcttgctgtgaccatgccatgacatctgaaaacacagaggaccaggttggttagctatatttcatactcgttgccctctgaacaatcaatagcgaatcacttctagcaatctgttatgattcatttctagatgcattaatctattctctttcttagtatttttcttggtattttaggttttcttgggacttagttatagaataggattttggagtgtgtttgtggaaaaatttagaagcttcacatactggatgaatttttttagtagttagcgtattggttattggcagtcaaatttttttagtacaactggtaggaggatgagcttatatttggcactattattcaaaagatgttaatctcaatctcccattttactgtacttaatgtttcttaaatgttaaatacttaaaatgggactgcagttggtcactgatggttgcttgatagccataaggaaaagagagacaaaaataattaattcatgcagaggtttcagtcaattgcaaataatatgagattggttgacttaaaattgaggatggtgtggtatgatgagcctctgttgatctgatcattttcctttttcatgtcaggtttgacacctttggattgcataccagaattttccatgttcttcagctctcaataattcatcttcaggtaatatgatggtagtccaggtttttagatgatttgcatcaaggggtgaaaataaattgatcagcactgcaacattgatctttcttatgggttgtcgctttagctaccacaatgcttatttgcaagctcgtgatgtgttgcaaggtctagagtagtctagtgaaacctatgtcataagcgccacaattccaaaccgaacctcccccagtgtactgttcgatgtggctgctatagttcttttactaaaagtatgtaaatttatttgttctatggcttgtgtagaggagaaagggaagtgaggaaaatttgtaagtgaagaatttgacagattgcgacgggcaccagttatgctggtaattttcttgaacctgacactaatttcagggtacgtacattcttaatccaagccacaacaatgtctgagtggttttatatgtcgaccatctg

SEQ ID NO: 28577 - DNA, 7186 bp, Oryza sativa
tgaaatgctacctcacagtgttacatgattatgatgttctttcttctttcttttccttttggcatgataaaatgaaaacaggatagaagttggtttaattatgaaaaggccatggattttctacagcattatctgtggtgacttatttgctactcttcatgcactcaatgctaaccaaatgcatgaatagaatgagaaaatagtcccaggtatcgggaaactgtatcagacacatgcccattcattctaacaacatttcagtttgattctcaaaattcttcatgccatcaaagtaaatactatctgcactgtctcaaatcaactacaaagctgtcaataaaaaaacgacaaagaaagggaagaaatggtgaagatagagcttactacttattttaagcacatgtcttgattctcttgagggctcaatcacggacccctttggtaatttgtattcatccttgaaaagtgaaatgaaactgtggagaccaaggtgtcaaagacagaagaaacttgtgtagttatcattttaactcgacaaaggtatgctaagattggaacttacgcattaacaaaaaaaagtggaacaacattatttactaaatagagtgacaaacctgaaactataatatgatttatttttctcagctgatgattagttctgaatcagtattgctcttcttcacaaatgacctctctctctctctcagcatgatgacagcattatttctatacatgaggatattgtgtatccggataagaatagcattatttgtaggtaagacatataagaagtaaatatatttctaatttataaactgagaatgtattattaagtgctttaacatgtcatatgcagaagttgctggaatgctagataatcttgtcctcttttaaacatagcatgggaattatagtagaatcaagatgctttcctttgcttggtaaaaatgttttggactgcatttcagaactcagaccatcatctatttcagtgtaattacattattctgcagaaagacacacaaaactgtcatggaaatatggaatagatagttctatatttataaggcatatagttcttaattcatttaatcaagccgagtgctattttgtgtggttcatgaatctttgcattacctgtaaagctgtggtttatatatttctttgggagctaggttcgcttggtaatataattgactggtagtaatatacattggttgcactttgaatgtgctgagaatggggtcaccttgcatgcttttttatattcttaaataatgatgaattttcatgtgaatgtatgtatagcatccacattgttcatgtcactgattaggaaaaatgtattatttgttcatgtatatatcatttgttctgtgttactataggctggaggctatagaaaaatatttcagccttgaaacagtcaaggacattgtggaagccatggtgagtgatgcttcagttgttttatacttccaaatctctgggcatggtatgtgctccttttcatttgaacatgagtaaacagaatgctgttgattggtacaatagctttcaaggctacattttatttccatctcattatttactcaaatgaatctcgtggatatttttttttggaattatcaagtattttttcaaatatagtagttatcgttaccgttttggcatagattttgttccttagactaccttttagtttgatcttgaaggttttggttccatatagcatatacataaattttgcttatggttcaaaacttttaaggagatgttgtaaacttgtaatcaggaaagtgaagcatctaagttagatgaggattgttgtaccttggccatgaaatgattgagagagccctatccagttctgttgagagcctcacagtgtttggtaagtaaagaaaatagaaatgctcacactgccattgccgatggctgacagattttattatatgcctgtcctacagatgaattgcaagctacaaatgctttgctgtagatatgaattgcaagcttacagaaaaggttgtgcactgtgggctaaaaagtcccattaaccaggaaggtgagtgttgtttttctcctttaatataagaatttgctacctcaattttttttactcatgtcagcactgagatataatactgatacatggattgatgctgaattatatacatactccctccgttttttaatagatgacgccattgacttttcctcacatgtttaatcattcatcttattcaaaaattttatgcaaatgtataagatataaatcgcacttaaagtactatgagtgataaaacaactcataacaaaataaattataatttcgtaaattttttgaataagacaaatggtcaaacatgtgagaaaaagtcaacagcgtcatctattaaaaaacggaggtagtatttctctagcttttactcatacgattaagatttcttttaaatgtcaatatatcttctttttatgtatttaagcgtccctttgtgcttttatttttggtttgcaagttgtttatgtatttcatttaagaaaggtgtatggattacatgtatataatcctcgcaaaaaatgcatgtatatattgtggatttagccatctattttccctgctctttcatgctttcaaaagggccagcggtcacttggtattgtgtgggtgctctgcacatgactatttttataaatatgtaaatcatgtttgcgtatccctgcatcttatgctagacgttgattagttttcagcaaaaaattgggaagttatacttggttgaaatcagtattttgtcgatggttgtcataaatatatcaaaagttctaaactagaaaaaaaatggtatccccaaatctaaaatatttccttatgagttcacgttaaatgaaatggcctcatgcatatacagatgagtatctaatggaatgattcactcatttaccaaaaagatagtacaatattattcatcatagaatgctaccatcaccgccactatgtttttttatattagtaaaagatggatgagcctttggagacttattagttattaagttacttatgcttttctcactttcagcttgaaggatactaatattagtaattccacaaatgacacaatagatatgctacaattttggctccacttacactatcctgtatatggctacaaaactgcagctgtgagaagatagaatggcattacttcaagggtaaaatcctttttttttttggtttataacttgatgaatgtgattttgcaaaatactcctatatattgctgctacctcataaaaatacatccatggatcaatgttcctctagcactgataggcctagaaacaaggttgtccttttttcccttagtgtgtgcgcactatgataagatgttactattagggtattagtatgtacctgcaggtctgcaggttcttttgaatgtgatttaattagctaatgtttgctttcatttcaacctgtttacatttttcaggatgtgatgcgatgctgaatctaatattggaaagtcgagccctttgttcttcaattgtcctatttgcaaagattatgacctttaaatttgtcatcaattatttatgacaccaatgcattctcttggtgtatgtaccaaagcaatttgtacgcggaattacttatattttttatataatgaaagcattgtgttcatgtttgaactaatagtgtaacaaactgaggttttagtaggggatgctttgcattgataataaagtgcccattactttgtagttacatgggatatttgttacatagaatggattactgactcaagtctggtgtcattgatatacacaggagagttaatatagaatatatgatgttactaatatatttatcaattgattgatttagtacatggacgtattttagtgtatgcaggcagcgcgcaatggcgcgccctagcatctagtaaaattaaagtttctcctgtgcaacctatgagtaggcaatggttacaaagtataaagttccctgctccagttgatctgttctgtctctcaattgcctaaggtggtgagaagcgggtgttctacaatttttaggcgtaagggtaagcctccgtgcacatttacttaacatgagagagagagtactcaaactatgcacttgtacattttaaatataacaatggtagcaactcctgatcaacaaccaagtttattttcctttcgtcctttacttgggacgagcaaaggtttaagcttgggggtttcgttgacggttgttacagacaatatttgactgccaatagaactaaaataatgaagaattagctatgcttacaatgcatgtttgttttcaaataatatatttccacttgtacttggagaataacatgttgcaggaatttatcaaataaaataaagagaaattggagaaaacctcactcctaaacaagcaaatggatacggagggcccacatgtcaagtgtaaccgccggaaacagccttaactgccaaaatcgccatgaggtcccacctgtcagccaccctgccgaagctggaggcctgttgggccagcccaggttcggccgaaccctggcggcgtccaatcagcctagccttacacgtggatatccaagattgcttgctgatgatggttacaggggtaaaatcgacatttcgcatatcagtaaccgtcataccgaccctataaaaggaggagttcacttcacttctcaacacactcaagcaagctcaattcctcttcatacattagtattagtggtataatgctaagtgtagtagtatagaatagtgttcggagtcctcggagtcttcggaagagttttcggtatggctctagcagctcttgtaatctcttctgtaatactttccgtattaatgaaatactcttctttatatatcttcggtgctttgcttagtcttagtactggtcttactttatatctgcattatatgaattgtgtgggtagcctaccagagaggtgtaatggtgcgagtttaatgtctaatttatcagttgctctatgtcgggtgcacggctatagagtagtatttagtaatgttagcatggtgcttagattattaaatatcattaattgggcatatatgttgcaggacattagaggtgggccgctgatggtgatagctcagtatgggtatttctccacgttagtatatattcctaagacaaattcgaagggagggtactcctctatatgtagccccggttggacggccatgacaggttgtcgtaagtatctcgccaacccagggtggtctctcgaagtaccaggaggacactgttagggggtattggccacatgattgtatattagcagatgtaaactaagatttgagtgtatattagaagaatagtaatagagtgctttatgtttcttccacttagttaaacttattttactagtaatatgtccgtgctaacgctacgacattatttataatgtaaagcaaacaaccaaaagtaacaatatatgtttcaaaagttttctgacattatgttcaaacaagatcacaagtattaagcacaaaaacgtaaaagaaagaaaaaaatctaaataaataaattatgttctggagccttagcatcgacatcatcgttaagaactaaattagatacaatactattgcatcgtgcttatggagcattaatgtcttccatcttagagaaaacctacccatcaaaaccatcatcactaccaggcaaccatatgcctatcttagtaaataaaaaacaagctaacttattcgttaggaacctttggattctcccagttctctcctcaagcaacgatcttattgaatatgccaccatcgtaattctgatagacaattgtaatatataccattaggaataatacactgtagtgtagcaaaactgatgtctagactggagagataaaccttacctgaattcaaaagaaaaccaacttacagaggctacatataaattgtttataaattatatatgtttaaatctacaaatagtactactccatttctttttcacaatctttgccatgtactttcggcataaattcaatggttaattaatcggggtccaattacatagaagcatgaaaacaaacaatttgcttgaaaagttcaaaagtgaaaaattgaagctattagtgcagattaaatcagagcacaatgaaaaatccaaatacactccactaacccaatttaattgctaggctacctgtatggtagccaaacccctcagccattaaatgcttagacagatccctcgagagtagtagaaatccctaagaaaacatgcagttgtcggttgctaaattatgcttagcatcctaattacatacttacggcaacatgatgatggtgtttaaccacctcttgctattttccattttgcaccctttcattccttcgcatgcctccccagaaattggtgcagcaaacacgatcccatctacacctccatacagtcagattggttctttgacttcttctggaccatggctacattggtttctaaatttgttaaattcagaaatggtctctctgtatcatgtacatttgcttgttgaaattataagcacataatgatttaatttattccataaataaatcatgatattgcagatgtaaactagcatgaacgcatcattagatctacacatgtaaactaagcagtaaaacatgaacagatcaaatatgcgcaacatatcgaacacgtaccgaggtggtggaaagactggttgctcagcaggaactactcgcggttgcgggagtcgacgaaggcgcgcagcacgcgagcggagaggaaggcgagccgtagcgaacgaacagggagcagtcgcacgaagcgcttcccaaaaactttattgccgccttctcccggtgcaggacgtcgaaggcagaggttccggagacctgctctcccgatcgctggtgcacgccggcgagcgggatggagtagtctacgagcgacggcgcagcacagagtaggaggcaaatcctagattgatttcgcgtatgttacgtgaaggcggcggctcggtttatatagagataggtcgcttgatcagggcgcccgcacgatctctactccgtgtaaccgaaccggataagtcgcgcgtaacttatccggacttcacgccgttttcacgcaccgattttttggaatgtttcc

SEQ ID NO: 28578 - DNA, 10339 bp, Oryza sativa
aaaactgcaaaaggaggctgcatctgcgcaaggatgaggagcacgacgcgcctgcccttccctgccaggcgaggcgaggctagcgcgtgtgttccccctcttcctccaccacacatgcttcaagtggctaggagggcatcctcccttttaaggaggtcctcctctcctagaataagcaaggtggtcctaaactccacatgcatgccatcccatgaggtgggcttttgtgattttccaaataattaatcttcgaatgggtcttagcccatctattaattccaacaatcccccaccaaatctcaaaatcccactgagatttgccttttcaaatgtactgtttatataccagcggttcgatggagaccgattaaggttgaacatccacctagaactccaaactacacttactcacaacttgaacaatggactacgccttgaattgcaagtctcgtgcaagcaagtttcactcagagtcttatctagtactataccgtctgtagactacccctcgggtggagcgtataagtcatactcctaggtctttagtaagcttcctagaagattcacccaaaatctccatagactgcgatcaatagtcaagcttacaaaggtgagttctttcaagaatgctctgcaggataacatcttcgctaattaaagccaacagaactcattaagccataaccaacctaccttgcagctcacgagagtacatgcatcttcacttagagagggtatagattggtactctcctctagtttactaatggtttgttcttcccaggttctaattcacgggatctccgatcacatagactgggttaccaccattgtataactcacatgggtctcaaacccatctccttcgatgcattgtctatcacatttcgtgatagtcccttcgtgaagggatctgccaggtttctagcagtttggatgtaatctaacattataaccccggagtttctcaatttcctaacagacttcaatcgtcttttcacatgtctagacgatttcatattatcattagaactattcacttttacaattaccgtttgattgtcatagttcataaggatagccggcaccggtttttcaacaataggcagatccattagtagatcacgcagccattctgcctcaacagtagcagtatccagtgccgtcagttctgctttcatggttgacctcgtcaaaatgatctgtttgcaagacctccacgaaacagcaccaccacccagtgtgaagacatatccactagtggctttgatctcatccacatcagagatccagttagaatcactataaccctccagtaccgcaggatacccagtatagtgaagccccaattctatagtacctttcagatagcacattactcgctcaagcgcacgctagtgatcatctcccggattagaggtaaaccggctcaacttgctcacagcaaaggagatatcaggcctagttgcactagccaggtacatcagcgagccaatgatttgggagtattccagttaattcctagcaattcttttgttcttgcgaagcaacaagctaggatcataaggtgttggagaaggcttactatcaatgtagccaaagcgattcaagatcttctccacataatgggactacaagagtgtaatcccattctcacctctaattagcttaatgtttaagataacatcagctacttccaaatccttcatatcaaaattttgagacaagaatgatttaacctcatttatcacctcaaggtttgtcccaaatatcagtatgtaatcaacatacaagcacagaataactccctcacccccaccatggtgatggtacacacatttatctgcctcattgactgcaaagcctgcagatgtcaatgttttgtcaaatttctcatgccattgctttggagcttgtttcagaccatacaaagacttcaataatttgtacactttgccttcttgaccttcaactacaaacccatcaggttgatccatatagatctcctcatccagctctccattaagaaaatctgtcttaacgtccatttgatgaacgagaagaccatgtgaggctgctagggaaggtagcacacgaattgtggtcaatctagcaacagatgagtaagtgtcaaagaaatcttcgccttctttctgagtatagcccttagcaacaagccgagccttatacttttcaatagtaccgtcaggcctgagcttctttttgaacacccacttgcaccctacaggtttacacccatagggccactctgtcacctcccaagtcccgttagcgataatggaatccatttcactacggacagcctccttccagtagtctacatcaggagatgcatatgcttctgaaattgacttaggagtgtcatccacgtggtacacagtgaaatcatcaccaaaggacttagccgtcctttgtctcttactccttcgaggagcttcactgacatcctccttagtgacatgttcgtgtgtatgtttagtttgttctggtggtgtgatcgaactgggaattatttcagagggttggctcgaactactatgtgtatccttcattgggaaaaagctctcaaagaaggtagcatcacgagactacataattgtaccaacatgcatgtcaggtacatcagatttaactattaaaaatctataggcaatgctgtgatgagcatatcccagaaagacacagtccataatctcaggtcccagtttgcgcttcttcgttattggtacattgactttcgccaagcacccccatgtgcgcaaataagaaagtgatggttttctcccaatccatatctcatatggtgttttgtccttatttctattaggaactctgtttaacacatgattcgaggtcaacaatgcctccccccaccatgccttaggtagctccgcgatgtccaacatggcattcaccaagtcagtcagtgtgcggttcttcctttcagcaatcccattagactcgggagaatatggaggcgtcctctcatgtataatgccatgttcctcatagaataagtcaaactcgtttgagaaatactctccaccatgatcagacctaagtgtttttatctttctatcaagttaattttcaacttctgccttataaattttaaaatagtctagagccttgtctttcgttttcaacaagtacacatagcaaaatctagtagcatcatcaatcaacgtcatgaaatatcgttttccacccttcgtcaacaccccattcatttcacaaagatctgaatgtaggagttctagtggtgccaagtttctctcctcggcagccttatgaggcttgcgaggttgcttcaattgcacacaactatggcacttagaacctttgacaatggaaaacttaggaattaaacacatgctggaaagccgagacatcaagccaaaattaatatgacataaacgtgagtgccaaacattagcctcatcatccacactgccacaaatatggtttacagacttattgcagaaatcagaaagggaaaagcggaacaggcctccgcactcataacctttaccaataaaatatccatgtttagacacgactactttattagactcaaaaaccaacttaaatccgtctctagttagacgggagccactaacaagattcctatctatagaagagacatgctgcatgttcttcagctagacgatctttcctgaagtaaacttcagatctaccgtgccaataccatgaacagaagcatatgacccattccccattaggacggtggaacctcgtgcgacctgataagaagaaaacaatgagatgtcagcacaaacatgtacattggccccagtataaacccaccaattagtagactaattaactgaaaaaatagtaggtaaattaccatacccgcttccatctccagtgttgccaatggtcacattagcagacttagaagtctgccctacaggtgccttcatccccttgcgttgtggacacttcctagccagatgaccaggttggccacacacaaagcaagtcctctcatcctgattaggattgttattgttcttcttctgcttcttgaagttggtggtctattgagctttgtatttccccttgctcttgttctgggccttgtgcacaacattggcactggactgcccaccatcgcccttagacgcagcatctttttcccgagctttctcctcaacatcaagagacgctatcaacccctcaacggagtattcctgtctcttgtgattgagtgcagtaccgaaacttctccaagatggaggtagtttcgcaataatgcacctggccacaaatttgtcgggtaagacacacttaaggagttcgagttccttagccatggtttgtatctcatgagcctgttcgactacagaacggttgtcagccatcttgtagtcttgaaactgctccatgatatacagatcattgccagcatcagtagcaccgaatttagtattcagtgcatcccacaactccttagcgtcagtcaaatgcatatacacctcgaccagacgatcgccaagaacgctaagaatgcatcccacaaagagagtagtggcttcctcgaattgcttctgctgatcagcagtaagaactccttcaggtttgccagtactcacccagaagcatttcatagctgtcaaccacagagtgaccctgatctgccatctcttaaagtgcacaccggtgaatttatccggcctcagtgcatcggcaaaaccagccatagtaaaatcacagcgcctataataaggtttttggattgtagaaattataagcacataatgatttaatttattccataaataaatcatgacattgcagatgtaaactagcatgaacacatcattagatctacacatgtaaactaagcagtaaaacatgaacggatcaaatatgcacaacatgtcgaacacgtaccgaggtggcggaaaaaccggttgctcggcaggtactactcgcggttgcgggcgttgacgaaggcgcgcagcacgcgagcagagaggaaggcgagccgtagcgaacgaacagggagcagtcgcgcgaagcgcttcccaaaaaccttattgccgccttctccccgtgcaggacatcgaaggtagaggttccggagacctgctctcctgatcgccggtgcacgccggcgagcgggatggagttgtctacgagcgacggcgtagcacagagtaggaggcaaaccctagattgattttgcgtatgttgcgtgaaggcgacggctcggtttatatagagataggtcgcttgatcagggcgcccgcacgatctctactccgtgtaaccgaaccggataagtcgcgcgtaacttatccggactccacgctgttttcacgcaccggatttttcggaatgtttctaaaacaaaaacaaatccaaatttcccgcagcaaaacaaaactgcaaaaggaggctacatctgcgcaagagtgaggagctaattttgcggaccattcgacgcgtaacaacgtgcacgcgcgccgcctgcttggccaggtgagcgtgcgcgtgtgttccccctcttctctccaccacacatgcttcaagtggctaggagggcatcctcccttttaagaaggtccccctctcctagaataagcaaggtggtactaaactccacatgcatgccatcccatgaggtgggcttttgtgatttttcaaagaattaatcttcgaatgggccttagcccatctattaattccaacattgctttggtccgataagtatgtgccctaaaattttgagttatcaatatacaaaatgcattaccgatgatgtagacagggtttaggtgctgcagctatcaagacagaatctgtaccatttagcattctagcaatctagcacaggtaagaactcactaaatgagcatcactgatcaaaatgcgacagatcaaaggcactggttgatatcgcaccgtactaactcaacatagccacgcgtagctgaacacctgaaccgcgctgccaccggaggccacaagcgtacgagcaaatggaaccagctcccagaaacaccacaacaggtaaaatttcattaattttttcagggttagtctgatcataattttcagtataacgctctcagctggaagaaccttaggttgagtattgcatataagtatttatcatgggattagagtagtaccaaatcttaattcagatgataagagtgaacaggtgtcgatctgtgcaacattactattcccacacaatgatatcttcagaagcttctgaaacttgaaaatggtttgcaaagttcctgccaaggaaaaaataaaataaaataaaattttgccatcagtaacattggaaacaagagctctgtttgatcaaagtcacagacatctagcgccaacagtctatgaaggccaatatctgtagcacgatttgacaatgctcaaaattttagatctactaaaaattgtggtagcatgttctttccaataaaaagtacaattaaagcacaacacagagatcaattgaagtacaattaaagtacaacttatgctacaggacctaacaagaaacatggtttattcaaaggacctaatgcaaaccatccaattttcatttttacatatatagttgtatgtgacaagatgatatcaagggattgttgggaaataatctctcggctaaggaaaccgagagaaaatcacgcgatcctgttttccacccgttgaccagcgtgattagctcacgattaaatttccttaaatgcacgcgcaatagtcggtagcgcaaccaacgtttccttttggagcagcccccgattccctcagtgcaaaataaaaggggaggccggcccgtgagaaggtgacaatctcactcacggttccaatctccccgacatcccaaaaccctaatttcccgattctcagttgcgcaggaagggattcgtagtgctgttccgggacaatgtaagtggtgaccggaaggccgccgccaccccgcaggtgatcaccggtgacctcttcgggatcaagccggtgtactcactactacgaccacttctcctacaccgacaattcgcgaggtggttcgaggttctgcatctctacatccactccagactaagcgagaacaattgcaatggcttcaaacaacggtcagtaatcctaaattctgcattagggtgatcatgttaggccgaccggaaggccgccgccaccccgcaggtgatcaccggcgacctcttcgggattaagccggtgtactcactgctacgaccacttctcctacaccgacaattcgcgaggtggttcgaggttctgcatcctctacatccactccggaccaagcgagaacaattgcaatggcttcaaacaacggtcagtaatcctaaattccgcattagggtgatcatgttaggcttagcacttatgtcttagtagatcgcaatatctacagggattaccttgctttcaggcagatgttccagatgattagccgagggcgtggagctgcgttggttcagagacggtcgtggaagtggagcagctatcagcggagtaggcagtgatgcacaacctgatggaatacgcgtaggctacgatagcataaatcaaaattttctaccgcgtaaaccagaaaccatgcaagtattagatcataaatcgttaccactcgacacgctgcgtagcggaagaaagcgctaagaagtcgaaggaactttcgcgaagtagcgcgcgttgatgtagaggaagtagtcgatcgcaccggcttgaccttctcctcctcgtgcgttctcctcgccgtactcccacgtcgaccagcaccgaaaccaacggcgcctctaccggtatccacacgtacagggacggaacgccacgcgcagatgtgctagcacccgctcgcggctagggttttgctcggggaggggagtggcggctagagtttctcacatgatgcaatacctccgccgatcacacccctcacgaatatataggatccatgattcgggcctccaaggcccataggactcctatttgaatccctatccgaattaaactcatattggatctccatccaatccccttattccggcccattaagcgtgcgaccctgtagattcatgtacactcggctgtaacccgaaaactcctttcggtccacgtgacaatagcggtccctagcagaacgtattgacctaccgggcatacataaagatcatattggctgaacctctagtgtatacttgtatgatccactttgcctcacgatatcgattaagctcaaggctagatatgtgctatcctctaatcgctcaatcattcactcgaacctgtgatagattatataacttgtgattgactcatcaatcacctttggcatggccatgcatttccataatctacaacatcgaggggcccagagatatctctccataggaggggcaaatcccatcttgattattcatatcacactacatgtttcacagcatacccggaaactacttttataactacccaattacggagtagcgtttatcagtctctaagtaagctactacacatgttgggaaccatgataatctcaggtctaaggattcaacaccaacactaaatgagatcactgatgacacaacacatatggctcttgcggtgtctcatgttgggtctatccaacaacatgttccccaacatgtgttcacattattaatttggtatctctactagttgggtgcccgtgcattgcaacgggaaaaaaataaacagacatattaaattacattgcgtaaaatgcgtaaaatgctgttaaataatcattgagcctaaatttgttgtaacaaaaaccttaatataacatgaaccataaaaaccaatctagtcgcagtaaaggcttgtcatctacttcctccgtttcacaatgtaagtcattctagcatttctcacatttatattaatgttaatgctagaatgacttacattgtggaacggaaggagtagaataaatagccgaaaatgatctaactttaactcatgccacctattatttgacctcctaatccagcggtatgcaagaccaccattcctccaggacgcatcaacgcgtactttcatttgtatatgcagttccttcgaacacgtgagtaccacgctcctttcatattattgaggagatcaaactcataagaaaccatgagggcggatccaacattgtagagatggtgccacatgacatcaattaatttttactacacataaatgtaggtcagaacttgtacaatgtatggtttaaaaatatatattgccaatttctacagaacttatggataaacagaaacaaaataaggcttatgaatgaaaaaaaagaaaataattggctggtagaacattttagtatattcatagctagaaaatgtgtaacatagttctgatgttctatagatggcacatctcagttttgataatgaaaggttgctagcacgggtgcaaaacaaaagagtaaatcaagacacctcacagatactctagtctggcctaccaagtccaatagaattcataagcgaaaaatatatgctacaactacgtatgaatatacaagagaacacagttcgtaagtacattctatcagcttgcaattgagttccctctgtagatcagaatcttacctttttccatagggtgttttcaaagtttcaacttcatgtcaaaaaagagaggaaccattcaaaacaaatgatcatatgatatgttactgaagatccatttgaaaagaagttgaataaaaaaggaactaaatgaagcttactggcatcttcttccccgccagggtagggatgcaagcgggccgacccgcgagttcacttataggtcaaataaatcatattttatgggttttcgcgtcggtccagtttaccgcatcatagatatgaaaactcatttatagatcaaattgataggtaacccgttggtcaaacctgcaggttacgtactaattttgcctataagcgggttcgtggacaatgtcacgcctagaaattcactagtaatttccgaactaatttgtgtatagaatcctcgtccaggaatcagccgaggtacacaaactgacaatttaatatagaaatccatcataataataacgttacatacttacaaaacaaaagaaaatcagcagcggaataacggtctagcgatggcttcagctccactcccacaggcagctcaactggggtataagccaaacgtcttcttctggatccttttcttcaactgaggttgattgattattgcaaggtgagcatatgacatactctgcaagccacacagcaaatatgcaagtgcacaaggatacc

SEQ ID NO: 28579 - DNA, 15231 bp, Oryza sativa
  unsure (1)..(15231): unsure at all n locations
ccaggagctaagcaaattattaccagttatagcatcaataattactgtgagaggtgtgagactaatcacgaaaaacattgttcaacctgcccatgatcgcgggcacggctattcgaatagttttactctggccagaggtgtatcaccactgtacccacaagacacagctccacgacatgtcaccatgcgcctcaataccaccacggtaccttggaaaggaactgtgacagtacccctcgcacaacacaactcaccacagtgcaccattcctggatcataatcaccccctctacaaccagaggcatggactccccagcgaccctcatggacttctcgccgcttctcagtctggtgccccgcaatgaaccatgctatacgaaaggtaaatccgttgcccacgctggcttgtgcttggcacggtaaatatttcacaacaatagctcgtgaaccgttccttaattgtcatgagcacgaccttcaaaaccatgtgctcacaacccaccattatcaagttttaattatcaattaattatcataacacaattaaccatcgtgagctaccattaaatatagccataagtaacaatgtagtgtgattcatctcatttatggctaagcaattatatatatagcatttagctgaaccaatccaatatataaagtccaagctaatcaatttattacccataggaaaataaagtcatcttcggccataattaattgggaatggctcaccacccgatgacattcgaaaataatgcataagttgaaataaaacaatagctttagataggttcaacatgctcaaagggttgtttgagatctgtgtgacttgccttgcaataatcggtcttcaattaatcttcttgaacacttccgacgcactcacgaaccttcgcaacgacggaaacaacatgctaacacgaaaaacgaagaaaaagactaataaaaaccaaataaacagtacataaaaagtagacaaacatgtagatcatgattttagatgaatttagagacttgaaccacttaattccgacttcatatgaattagttatcaattttacaagataaatatgattttagccttatacagaacaggattaacaatgtcatgacgacatcattgccggcgatggagggtttaggcggccaagccgaggcaccagaagaaagagcacgacgaggggaactcactgaggggcggcacgacgatgaaaaacggctggcgatgagatcgggagtgacgacggggtaccgatcgatggtggcggcggagtttcagcgacgggagacgacaaccgaggggtggacggggttctcctcgcagctgcgatgccgagggaggctgcggcgaggtccggcgaccttggggtcgatgaggaggcttcgccggagatcaaaacaaggcggcaacccactggttcacggtgacggcaatctcccggcgggatttggcgcaaaagaaccggtggccggggtagagctgacccttgcgaagccgagggaggcgacggctcaaggcggcgttgaccagagaggcggcgcggcgctgctggagatggtggcggcgctggagagagagggactcgcagggagagacggctagggcacgggagctcgagctaggggttggaaacgaaagaggagagcttgggggttctatttatagccacgggagagagatatcgggcttggaacgcaaggaatcgcgtcgggaaaacctagggtttggtggagagataaactcgaaaacgaatccaaattcgcgtcgaattcaaagggataaaaccggatttttggggaaagagatagaggaggataaggaaacaagtcccctcaactaattttcggaaaacacgagagataaggccggattcggaggagaaaaaccgagccaactcggtctcagttcggctgtcctgaggttgaagatgaacagtagcgagggacgtaaagcagactttctccgagagcatcctctactaggccggattgaaggagggacctgaaatggacttcggaggagggataaggccagccgaaagggagggagaatgggccgagaactaaaggtgaacctttccagtttcggcccgaaaaggaaaaggggattttaattacttttccaattaaattaatcactgaaatgatccttgaattgttaaaaatacttctattgctcaaataatttcaaaaaaaatcctgaaagtacttgaacactataagtatttaacaaaattaaaatcagaccatttaatgattaatttaatatgtgaataattacttaaatgttgtttgtattattaaaattaagaattgagctccgaaaaaatcaaagaaaattccagagagtataatgcgaacttaataaaaattaaatccagccatactttatatttaggaaattttatttcccacatttaactttacttgtaaattaatgaacatttaatataaattctaaaaataatttattaaataatttatgaatcntagagtgaaatcaagtatgtggcagacaggcccacttgcacccctagcgaagggagaggcgaccacactggtgctgccacctcccccgccatctgcgtcgccgccttcccccaccatccgtgtcgcttctttcttcctcaacttcgccggcgccgcccaccacctactccgccaccttcctgaccgcgccacctgcccccgctattcgcgccgcctttctcgccatccgtggtgtcgccttaacccaccatccatgccgcttcttcttccccaacctcgccggggccgcccaccacctgctccgccgccttcccggttgcgccgcctccccacaccgagccgcgccatcgcaactgctgctgcctgctcctcattctaaccgccctcaatgtcgtggatggtaggggaaggcggcggcgccagcatggttgcccctccctttgcccttttatcctctcactcggctcggtctcagttgtgagtgcgtggtttagagagagagatggcagtgaggggcaaaaagggccaagaaataattatttagatgaaaaatagtattttgcaaatgcaacagacagcgaaaatggcattgtagcgaatgcccacaacttgagagtagcattcgagcgaatcctgtaaacaatacattattaattacatgctaaaaatgtaaatttagttgctactgactataggcagatttcatttcgttcttgaataaattctgtcatgaaaaggatatacatttagcatgaagagatgtataccgtttattagttgactatagatacgtgtacctacggtcagccaagtcagccactgaacagcaactgcccccctccagttgccaattctgggttagccaacatgccatgcaagttaagcgagcagagcagatcaaaaagaaggaaatggagtacacagtggagagtgattatctgtgggaagtgaatgggggtggtactgcttgagatactaacagttaccaaaatgaccaaatatatatttagtttctttcacatagaaacataattgctatgtaaatcaaaatgtatcttaatagcatgtgaggtggtatacaacagaaaattctattttaataaccaaatggacataacaatcatttagttgagccagcctgatgcaaaaattcactgctttcccatttgctcatgtactgtcatgttaagtcctaagggctgagtgcacgctacagaaccctataaagattaaataatcaaataccctcaacctagctccacaactcgagaattgaagtttcctaaatgacggtggtgttggaaatttagtcataatttggcatattttaatccaaaatattaagacaataaatataacatttgcaatattagtagatatagtgacagtgctacatgtatacaacttgagtatgcttaatatagaataagcatcagcatagacaagagaacacaataatattgcgaccgacagttgtaggaaacaaagaacgaacggtaagagtgaaacgttataccctgagaatggccctccgctggagtttgagacagtattgcctccgttggtgttgacgggaagctccttctccttgtctctagtgttgttgttgtcgccggttgtcaacatgttagtgaagatgatgcagagcagtcgcgcttgaagcgctacccaaaaacttgatcgcccacttacccgtgcaggttctcaagcggacggagtttcggaggcacctgctcattccgatcacccgtgcgcacgggatgaacagaaccggggaaacaaagagacagcgcaggaacagaacgagagtatcgctaaggaacaatacaggaggaagacacacactttgagagcctctgccttgcgttatatatagagagagatctccattaccgcaaaaataaatctaatttgttgtggatgttacaacacaatcaatctctcatttgttgtggagggtacaacacaatgaatctctcatttgttgtgaatttcattttttaatggtgacttcattctcgtttgttacaaaaccgaaaccgaagagcaccagcaagctctgcttggtcagccaccttccctcgctacgtccatggccgaggccgactcagcgcgtgcgcatgcgtgtggcagtccaaccatcacctcaaccggtcaacagggaatctccaatatcaccctatttaagttgaggttcttccacctaatttttcaaggtagtattattctctctaacattacttgtgggctcttgagattttaattaaattaaattaggcctagcccatttatttcaacaatccccaccaaatttcatggctcacaagaaatgttctcaaaactgaacctgttagttataccagtgttttgatggagactgttaggttgaacttccacctaggaaaagagttacaccagatcataactgaacaatggattatgccttgtaattgtcagttttgtgcgattcaggtttcactcaaacccttaactggtattgggctgtcgtttgcatcccctctgtttggagcgtataagtcatactcctggccttttcatgagtatctagagatcacccagatctcatagactgtgactagcagtcggagtcatataggcgtgttccttctaagatgttctgtaggccaacatctctgctttatgaaaagccactcggatcacattaaggtgtataccatcctaccatacagattagaagagaagtgcatcatgaagataagctcatttttgggtctcttctctcagttacccaatagtttgtttcgccatccaaattcacgggatctccaatcacaatggacaggtttccaccattgtgcaactctaagtgggtcttaagcctatctccctcgatgcacagtctatcacattacgtggtagcccctttgtaaactgatctggcaaatttttagccatctggacatagtccaatgctatcactccggagtttttctgctttctgacagacttcagtcttcttttaacatgcctggatgacttcatgttgtcctttgaactgttcactttaataatcactgtttgattatcacagttcatcaggattgctggtactagtttttcaaccaccggcaagtccatcaggagctcacgaagccatttggcctcaactgtggcagtatctaaagatgcgagttctgcttccattgttgacctcgttaagatggtctgcttgcaagacttccaggaaacggcgccccttccaagtgtgaacacatacccacttgtggcctttatctaatcagcatcagatatccagtttgaattactatagccctccagtacttttgggtacccagcgtagtgaactccaaagctcattgtcccttttagatagcacattactctttcaagagcatgccaatgatcatctcccggatttgaaacaaaccggctcaacttgctcacagcaaatgagatgcaggcctcgttgcactagctaagtacatcaatgaaccaataatctgggagtatctcaattgatcccttgctattcttcggtttttccttaatagcacactaggatcaaaaggagtaggagctgccttgcagtcactataaccaaagcgactcaggaccttgtccacatagtgagattgcacaagtgtaatcccaccctcatctcctctcagtagtttaatgtgaagaataacatcagccactcccaaatccttcatttcaaagcttttggatagaaagtccttgacctcctcaatcacattaaggctggacccaaagatcaatatgtcatcgacatataaacacaagatcactccctctcccccaccatagcgatagtacacacatttgtcagcttcgttcacaacaaagccaacatatgtaagtgtattgtcaaacttctcatgccattgcttaggcgcttgtttgagaccatacaaggacttcaacagcttgcacaccattccctcctgaccttctagtacatacccatctggttgatccatatagatctcctcctccaactctccattgaggaaagctgtcttaacattcatctgatggacaagtagaccatgagaggctgccagagcaagtagtactcgaatcgtggtcaagcgagcaaccggtgaataagtgtcgaaaaagtcctcgccttctttttgggtacaactgtcacgcccagaaattcacgaaccagaatttctaagctgaatgtgtattaaacccctatccaggaccagccagggtacacaaacgacaattgttgacatacagatccacgtcttacaaaaacataaaggattacaaatgcagcggaaaaggtaaaagcgagctaagcctgaagacttgactcctgcagcgggcgattccattccacaggcaacccttgacggcagcgacgaaaccaacctctctgagacggctccaattgagaagaacttctactctggtgtgggggaaaagagagcaagactgagtactacccactgtactcagcaagtcataccggaagaggaggtatgatgcaggatataaccaaaggaggctagaggttcttttgcataaagctagcatttaaaagtagtagttgaaggcagtaaaacagttgtagtaattaatcaatattaaccaatcactgtccaacgctacaccacgttgcaacaggccgaaccaaccacctgaactacaccagttcattaagctaaactaggggtgagactaatcacggtgaatctggttgatcgcccataaccgcgggcacggctattcgaatagttttactctggccagaggtgtacaactgtacccacaagacacttttccacacatgtcgccatgccccgaagtatcaccatgatactgcaaagggggaaatcgtgacaagaccctccgcataaccctcccctaaccatccacaccacgctaaggtttcacccccacccctcaaaaggcagtgggcggtcccctcttgcgccgcggtgaatccggcagctggacaaccggacaccccggccgacccaactccatcacgcccaccctcgccaccggtgcctaggaaagggtcgagctatacttcagatcaagcagttacccactcccgcttgtggtaagcacggtaagtctcccagggtttcccgtgaaccggtccttaactgccatgggtgcgaccagtaaaaccatgcacccacagcccaccattcagtgtattttaattaactaacaccattgcggtggcaacaatctaaagctatgccaaaagacaaagtctatgtaataatgtgatccccatttgtgtactagttgaactaagcatggctaagcatttcctaagccaacatctagtcattttgatacccaagttattaatggcatagggtaaccaatatgtggctgaggaataggacccatcccacattacattgtaaaagaatgcaacattacatagaaatgcgggatatttgtaaattgggtacaatatgatcaaacgtattgcatgacttgccttgctctcgaactgatgagacctcagcaacgtcttcgagagaccgcggatcgacgaaaaggccgaaatctacgcgacaaacaaagcacgcaagcaaaacatgctataagactacagaaacaggaaacaaaaccatttttaatggattctttgcatttttcttgatttactgagacttgaatggacttaaacggagctcggatgaattacttatgaattttagaagataaactatgtttttactaataaagaaaaagtccttaattaattattgcgcaataaagcccagggctgacgtcagcgaagggggggcggcgccgacaggtggggcccacgggtcagcggcttaaaggggagaggaagggggcgccggcaagcggggcccgcatgtcagcggctcaaggcggccggtccacgggaccaagggtccggatcggcccaagccgatcggacggtgaagggagcagccaccgggctcggcctcggcttcaagccggccggcaagcatggcgaacggcggcggcatgcggtcgccggtgacggcaaccagcggcgtgggaggcggcggcgggcggcgcacagaccggcggcggcggacgaaggcgatggcgagcgcagggagcggcagcgcgtgcgggacagatggaaggatggaggagaggagctcctcactgtgagcacggcggccggcgcgaaggatgaagacggcggcgatgaccggcgacgcggaggcacggacgggcagcggcgacaccctaggagaagatggagaggcgttaggagaggagacgacgaccacggcggcttgaattgccggccggagatggaggggagggaaaaactcaccggctcgcgaggggagaggcgctccggtgggattccggcgacgcgaggcggcggccgggaaagctcttgcggcggcgaagctaacggcggcggcgatttggcgcggcggcgactctagcggcggcggctcatggccgaaggcggcggcaagcggcggagctcgggtgtgacggcgcgggcgcggtagggggcgtgggagaggacggcaaatgggggaaacgagggaggggactcgggggagggtttttatgggcgagagaggggcggacgtggccggggagatggccgaaaccgccggcgacatggggaggagagagagagacggtgaggtgggattcaaaatgaatcccgcccacttcgtgcatgcgcgcgggcgggaagggcggaggagtggggcggcgacgtgggcgcgcggcacgggcggagtggggcgtggagaacggcgggaaacggcggcggcggcatgggcggtttcgacggcagcagttagagctccagctccaacggctggaggtgggagacgaccgacaggtggggcccacctgtcggcatcccagagagaggagggaggggcgcatgggccggcccaacaagaggaaggccgagcgggagagggatgggccgacggcccaagaaaggaaaaggagggaaaagaaaaaaaagaaaaagaagaaaggatttttcctgggatttaaaattgcactttagtgatttttaattggttaaaattatttccaaggctctgaaaatttcactaaaaatcctgttaatgcattggagcatggggaactcaagaaaaattccaccacactatttctgattattaagtgcatttattaactagggatttagctctaggttaattaagataatttcttcgggcaatttatttaaccaatttttaaagcaagcaaaagggggaaaacttcagggtgtgacaaacctaccccccttaaacggaatctcaaccccgagattcggaagagctggcgaagaggtgcgggtgggtggccttcaactcatcttctctttcccaagtggcctcttcttctgagtgatggctccactgaaccttgcagaatctgattgctttgtttctggtccttctctcgctggtttcaaggatacgagtcggcttctccacatacgtcaagtcttcctggatttcgatttgatccggacttgcctgttcctcaggaactctcaaacatttcttcaactgggagacgtggaacacattatggatgccaagcatgttggagggaagctcaagctggtaagcaacttcacccctgcgttccaaaattcgatatggtcccacaaagcgtggtgccaactttcctttggtttggaagcggtgtactcccctgagcggagtgacacggagatacacataatcccctgcttggaaaacgagctcccttcggcggttgtctgcatagcttttctgccgagattgcgcgattctcaatctttccctaacagctctgactttctcttctgcctcatttaaaacttctgtaccaaacaactggcgttcccctgtctgatcccagaagagcggagtacgacaccttcgtccatacagtgcttcaaatggtgccatctgcaaactagcttggtaactgttgttgtacgagaactcagcatacggtaagcttttgtcccatgctccaccaaagtcaagcgcacaggctctcaacatatcctctaggatttgattgactcgctcggtctggccgtctgtttgtggatggtaagcagtgctgaaattcaaccgggttcccaattcttcttgtaatttctgccagaactttgaagtgaattggcttcctcgatcagacacgatcttcttaggtacaccatgtaaacacataattcttgccagatagagttctgctaatttcttccctgagtaggtagtgtgcaccggaatgaagtgagccactttggtgagtcggtcaacgactacccaaatagaatcatgccccgatgacgtcctgggcaaaccggtgatgaaatccattcggatttctttccacttccattctggaatttaaagtgtctgtagcaaacctgctggcctttggtgttctgcctttactcggtgacagacgtcacagagtgctacgaattcagctatttcccttctcatgctgacccaccagaacttttctttgaggtcttggtacattttggtactgccgggatgaatggaatattgagtttgatgagcctcggttagtatcaggtcttttaattccttgttttcgggtacacacaatctttatcccatccagattgttccttgttcgtcctcaacaaaacctcgggcttttccaaccctcatgttctttttgagctctgctatttcaggatcacttgcttgagctatgcgaacctgctccaccagtgtgggctgtgcctctagggcagccacgaatccgtgctcaactataccaaggttcagatgttccaaatcacgttgaacctcacaacatagttgctctacccatgcaacattgcactagctcttcctgctcaaggcatctgcaaccacattagccttgccgggatgataatgtatttcccatatcataatccttgatcagctccagccatcttcgctgtctgagattcagatcaggttgggtgaagatgtactttagacttttgtgatctgtatatacctcacaacggttaccgatgagatagtgccgccaaatctttaaagcatgaacaactgcggctaattccagatcatgcgtcgggtagttgccttcatgaggacgcaactgccgtgaagcataagaaaccactttgccatcatgcatcaacacacatcctagcccctggcgagatgcatcacaatagacctggaaatctttcgtctgatcaggcaggattaagactggtgcagacaccaaccgtcgtttgagttcttcaaaactcctattgcattcagcagaccagataaacttttcttccttcttcaatagctgtgtcattggcttagcaattttagagaagttctcaatgaaccggcggtaatagcccgcaagtcctaagaaactccgaacttgagtgactgtccttggtggggtccatttggtaactgactccacatttgctggatccacagctactccttgagcattcacgatgtgaccgagaaactgaacttccttaagccagaagtcgcacttgctgaacttggcatatagctggtgctcttttaacttttcaagtaccagccgaagatgctgctcatgttcttcctcggacttggagtagataagtatgtcatcgatgaaaaccacgacaaacttgtctagaaattccataaacaccttgttcatcaaattcatgaagaaggcaggtgcattagtgagtccgaaagacataactgtgcattcgaacaacccgtaccgagtgatgaatgctgtctttggaatatcctcctcgcggatcctcaactggtgatagtctgatcgcaggtctatcttagagaacacagtagctcctttcaactgatcaaacagatcatcaatccttggcaaaggatatttgttcttgatggtgacctcattgagtgcgcggtagtcaacgcacatcctcttggttttgtctttcttctccacaaagataaccggagcaccccaaggcgatgtgctcgggcggatgtatcccttctgtaactgttcatcgacttgcttcttgacttccgccaactcgttggctcccattctgtaaggcctcttgtggatcggtgcagttccaggtaccaagtcaatccggaactcgatatccctttttggtggcattgttgtcagatcgtccggaaaaacctctggatactctctgactatgggaatatcctccagcttcttagtggttttctccactgctacctcttgttcttcaccagcagcctggtttaaactgatccctgacttctgcggcactggagactggaaggttaccacctctccttttgcattggtcaacttgatggtgcggctggcgcaatcaatcactcctctgtgtcttgtcaaccaatccattccaagtatgacatctaggtccttggattcgagaagaatgaggttggctggaaaaatcaacccttgaatttcaactgtcacagatgggcagtagtgagttgtggtcatgccacctccaggagtatgaactcgcattggtatcttaagcttcactaaagataacccatgtgcaccagcaaaacgcttggaaatgaaggaatgggttgcaccagaatcaaacaatattactgccggtgtcgagttgacggggaatgtgcccaatataacctctggtgctgactgcgcctcctctgcagatgcatgattaacacgggcctgaacgaacttgggtccagcacgtcttggcttcgagcactttccaaccgtgtgtccgggtttgttacaattgaagcagagttcgggtttttctcccaacctcttgggctgttctggcagagctggctgaactgattgagctggaatctttagtgaactcggagtagggttgaggctgtgctgctcacggttgttgtgactgccactatggtggttcttgttgaagctacccgggtggtagggacggtactgccggataatcatggtggaaggtccaccgtgatgtcccatcgtggaacgaggcttctgactcttcccctggggagtcctgaactgagctgccttcctcttacggtttactttgttacagtgctcctcctgacggatagccttatccaccagcttctcaaagtcctcataatctctagagatcaactggttaatcaattcatcatcaagaccagacagaaacttctcctgcctcttggcatcggtacgcacgtcctcaggggcgtagcgcgcgaggcggttgaactcatgcaaatactctataactgttctggttccttgttgcagggaacggaactctctcttcttttgtgccacaattccctcgggaacctgtgctttattgaaactatgacaaaactctgtccaagtaacttctgccccagttggacgggtcaccatgtagttgtcccaccaaatagaagcgggaccttgtagctggtgtgtagcaaaagcaaccttctcctgctcattgcattgcaaaagattcagcttcttctcaatggcatgaagccagtcatgggcctcgattgggttggtggtgcttgagaaagtgggcggcttgacacgaagaaattctaatagtttggactgaggaggtggaggaccaaactgcaggttctgttgctgctgctgtgcttgctgctgcacctgttgcaacacctgatggtactgttgctgcatctgttgcatcatcattgtcatcatctgagtctgattgtccaacacctgagcaattgttgggttcttaggcggtggggacggattgttgtcagatgcaccgttggcacgtgctccatcgatcggctcttcgctgccactggcattgttggagtcgcgtgaaccattccttgtctccatctgaaggggataggtagaaatatgagaaaaggaagaaaacaggggctcagaaactaatcttgcttatgaatttaagtgcaattatcttaatcttgattaaaacactgaaaaagaggcacgcaactcctaattgaggcagtcataccactgacacatgatatcgaccgccgactaacccacaagcaacaaacctaaacagaaaactagcaagcaaacagactaagaaggcaataaagctaagggcggcgactctgaagctcggagcggcgcttgcgatcgaggaataggactgacatctaaagtagacaagggataggaaccaattcatgctcaaatccaaattaaacaaagcaacaaatgactcaaataaatactcgagcatgatgatttttatgcatagaacatttttcatgaactcaaatgaggatactgatgcactggctaatcaataaattaatgcataaaataaatgcatagctataatgatacgcatgaaattgcccccatcaacctagacacgacttagtgcatatcacctgacaaattcccgactgaccgtcgaataaaccccaaatagatttttttttctaaaaccctacactgagctaaaaaaaaccgatccgaatgaacgaccaagatttttcccacaagccaaagaggcaaaaccccaaattttcctgaaacaaatccaagcgcaaaagggcatatgcatatgaaaaaaaaaggggttcagagggctcttaggtttccagttggcttgtgctacgggcaaggtcggctctgataccaacttgtcacgcccagaaattcgcgaaccagaatttttaagctgaatgtgtattaaacccctgtccaggacca

SEQ ID NO: 28580 - DNA, 9564 bp, Oryza sativa
tttttcctgggatttaaaattgcccttaagtgatttttaattggttaaaattatttccaaggctctaaaatttccactaaaaatcctgttaatgcattggagcatggggaactcaagaaaaattccaccacactatttccgattattaagtgcatttattaactagggatttagctctaggttaattaagataatttcttcaagcaatttatttaaccaatttttaaagcaagcaaaagggggaaaacttcagggtgtgacaacaacccttgtccacaagccttgccttgtacttttcaattgtaccatcaggcataagctttttcttgaaaactcatttgcatcctacaggcttgcaccgatatgaatgctcgatgacttcccaagtaccattagacataattgagtccatctcacttcataccgcttccttccaatagtcagtgtcaggagatgaatatgcctcttcaatggttcttggagtatcatccacaagatatacaacgtagtcatctccaaaagactttgcagtcctttgtctcttactcttttgagttgctacaatgttatcctcctcagaattttcctcaagcatttgatcaatgtgttctatcggcacaaagtgctcaggggataaaataggttcttgactagaagtgctaggtgcatttttcataggaaattcattctcaaaaaatgtggcatctctggactcagtaattataccaacacgcatgtcgggtactccagaatttactgttaagaacctatatcccacactatggatagcataaccaaggaacacacaatctacggtctttggtccaagtttacgctttttggctatagatacatttaccttggccaaacagccccatgtgcgcaggtgagggagatttaatttcttcctttcccattcctcgaatggtgttagttctttatgcatagtaggaattctattcaggacatgacacgcagtcaatattgcctcaccccaccattccttggaaagtcttgcagtgtctaacatggcattcaccattcagttagagtgcggttcttcttttcggctaccccgtttgactggggtgaatagggaggcgtcctctcatgaataattccatactcttcgcataaagaagtaaactcattggaaaaatactctccacccctaccagacctcaaccgtttgattttcctttctagttggttttctacctcagccttatagatcttaaagtaatgtaatgcttcgtcctttgttttcaataggtacacatagcagaatctagtgcaatcatatatcagtgtcatgaaatatttctttcccccttagtcaacacgttgttcatttcgcacagatcggaatgaacaagttctagtggtaccaaattcctcacctcagatgccttgtgaggcttgcgaggttgtttcgattgaacacaagtatggcacttagagcctttgactaaagtgaattttggaattaaactcatgttggctaagcgtgtcatacaaccaaagttcacatgacaaagtcgcgaatgccacacattggactcatcatcatcatcgcttacatggttcacaactttattacacatatcatccaagataaagcggaacaagcctccgctgtcataaccttttccaataaacgtgccatatttagatacgacacatttattggattcaaacacaagtctaaaaccatctctacacagtagagagccgctaactagattcttctttattgaagggacatgctgcacgttcttcagctgcacgatctttcccgaagtaaacttcagatcgatcgtacctacaccatgaacaaccgcaaacgatccgtttcccatcaacaaggaggaacctctcccgacctgataagaagaaaacagggaaatgtcagcacacacatgaatattagcaccagtatcaacccaccaatcaggggagtgacagacagagagaactgtagataaaatttaccataccccgatgttcctccgccctcactaataaccatgtttgcagacttcttgtccatgcactcaggacagtccttggcccaatgcctaggcttgccacacacaaagcaatctccttttgcctttcccttgtctttattcttaaaattgattgtagccttgggtttgacgtcaggtttgactttcttgttcttgttgtgggatgcgtgagggttcttcttctgtaccaaattagcgctagaacctccctcgatctttttgtcccggttgtcctttgccctcgtcttctcctcaacacccaaagagccaatgagatcagtaacgctgaactcttgcctcttgtgttttagagaagtaccaaagtctgaccaagaaggtggcaatttggcaataatgccacccgccacaaacttgtccggcaactcgcagttgttgttctcaagttcctttgccagcatctgaatttcatgagcatgttccactacagaacggtcatcgaccatgttgtagtcatagaactgctccatgacatacagctcgctgtcggcgtcggaaaccccgaacttggcctcaagagaatcccacatgtccttccctgaaggcatgtgcatataaacgtccacaatactgtcggcgtgcacactgatcaatgctccacggaacaagcaatccgcagcctcgaacttagcctcctcctcagggagagaggcggttcactcggtttgcctcgtgaagcaaagaaacattgcatcgccgtcaaccacaaaagtgcacgtgctttccatcttttataatttgaaccatcgaaagcatgtggttttagtgatgcagcaaagccaactaccgaaaaagacctatcaagtttttggattgttggaaatttggtcataattcgacatattttaatccaaaatattaagacaataaacatgacatttgcaatatgagtagatctagtgacagtgctagatgtatacaacttgagtgtgcttaatatagaataagcatcaacatagacaagagaacgcaataatattgcgaccgacagttgtaggaaacgaagaacgaacggtaagagtgaaacgttataccccgaaaatggccctccgctggagtttgagacagtattgcctccgttggtgttgacgggaggctcctccttgtctctagtgttgttgttgtcgccggttgtcgacatgttggtgaagatgatgcagagtagtcgcgcttgaagcgctactcaaaaacttgatcgcccgcctacccgtgcaggttctcaagcggacggagtttcggaggcacctgctcgttccaatcacccatgtgcgcgggatgaacagaaccggggaaacagagagacagcgcaggaacagaaggagagtatcgccaaggaacaatgcaggaggaagacacacactttgagagcctctgccttgcgttatatatacgtaaaatctaaactgagaggcttctcgctttagtcgtatcacgcgacgcatctcatagccgatcgatcgcgcctatcgtccatccacgtggccgcgctgtaatggcacaatgagaaggattgacacagtgtgtgccttgtttctcaatagacatgtatatctttttcctattcaaataaagttttctcttaaattacttatccgatctataatccgattacaccattgtgttcgttacaattaaatcttcacaacaagatcttacatgattatattacgatgaaaaaatatttatatttataaattacttttattatatatgtaagttacttttatcatatatatataagttacttttagatatgactaaattatttcttagtcatataaaagtaaattcaataaggtctaaaagtaatttacatatattataaaagtaacttaaaacaaaatggaagtaactttgtcacgacattagaagtaatatgtgatctaaaagatataagcttttttttgaaatgaatactaccagacatttgcccacagtgtaccttttttaaaagatataagttattaaagagattaaaaaaggatacatactattgcatttttcaagttcaaaggagagactagatggagtacaaaccagctaccactagctgtgtagtcacgtccaatgaaaaaagacatacattaaagttacactcttttttgttataagttacttctataatatatgcaaattaattttaggttttattgaatttatttttatatgtctaagaagtaatttagtgaaatttaaaagtaatttagatatactataaaagtaatttatgttttttcatcaaaatataatcatgtgagatcttgttataaagatttaattgttacgaacacaacggtgtaatcggatcgtagatcggataagtagtttaagataaatttttatttgaagcataggtggatagggtctcagctggtttagacaatacagctaccactagctgtgtagtcacatccttatatatatagagagagagatctccattaccacacaaataaatctcatttgttgtggatgttacaacacaatgaatctctcatttgttgtggaggttacaacacaatgaatctctcatttgttgtggaggctacaacacaatgaatttcatttgttaatggtgactttattctcatctgttacaaaaccgaaaagcagcaggcaggctcggctcggtcggccgcctcgcctcgctacgcctacggccgaggccgactcggcgcgcgcgcatgtgtgtggcagtccaaccatcacctcaaccggtcaacagggaatctccaatatcaccatatttaagttgaggttctttcacctaatttttcaaggtagtattattctctctaacattacttgtgggttcttgagattttaattgaattaaattgggcttagcccatttattccaacaggtggtataccaaaatgaactatcattttagacaaagagaccaacaggcacatgaatcatgcatgtagattacctcgtagtgtggaatcctatgtactcctcactcctaccagccatgagcaacggattcggccaagactccccttgatactctcacattagctggttccataaaagcatgagatattcccctgtagttgttcgtctacaagcagtcgaagacaatatggaaaatgtaaagttttaatggaaaaagagccatagtttaagaatgttcgaagaatccaaattccatccaaccaaatctaaaactgcatggataagcctccaacttctagaattttagcatctaaaatggctagttcaaccatacttaacaacgataaggtaagctacacagaaactatgtaaataaagtagtaacaaaagcaaaattggaaatttcagaatcaagacctcctaataccatggtgaatcatgatgatttgtgttttcaccaaagacagggattaaatcgtcttcgaagttcaaaccccactgttgccttgggcttggcctgtgatgccggtttcatcaacatatgtttggatccttgaacagcaaagcgagaaaaaagaatggtcaattccgtcaatagcacaatagcagccaagcacccaaatgcttgattggggcataagttttttttgtgtatgtatcctgagttagcagcagctcgatcttctacagacaatccaacaaatcaaataaaaatagaatcaattacctggaggatgacagggatgatggaagtcgacagcatgcctgctgaggttgccgttgccaccgcctatgcgctcttctcttccctccccttccgatcttaggttctcttccctcccttcggatcttagggtttgagcagtgacagcggtagggagagatgaagtaggaataggatatggggatggaagaggcggtgcaccggacggaggagaaagccgtagggttggaggaggagaggggctatgaggcaatggagtaggcgccggggttcacgacggaggtggcagcagcgcggcggatgaggcgccggggttcacgaccgaggtggcggcagtgcggcggaggagctgccggggtcgcgactgatgtggcggcagcgcggcggaggagccgccgagggcgcgacggcggcgctgggaaagcggcgaaggcggtacgaaggaggagtgacgggggcgtgcgatggagggggcagtgtgaggacagtgcgatacgaaggtgggggtggtgcgggacagcaggaggttatttgatcccttcgatctgtgggaggatcctgcgaggaatatcggcccttggattatacaggactcaccaacaccaccacgtattttttaagtagtaaagatactatgatctatgagacatgatcatcaattaatatatgtgctgatcatttaaccatatttgttccatatatgatgtttgatcagggatcttttagaaatagtaacaaacaacataaagagtctcatgaaagaatcacatattcattaactaataatgagttatctatttcaaggaacaaagttggataaatatgtaaacatagtatgtaatacaatcatctctatgattgcccctagggcatatcactaacacaacccttgcgcctgattgcatgcagtgaattttggtgaaggcgttctggaaatgatgtagtgttgcaagcgcctgagaaaaaaaaacaaaccacctcagagttcagagcgagctgacggctgcaccaccaccagtccatgcacccatcaatacaaagttcttgcttaacccaaaaagagattaaattgacctattaggacgtttgtgcccataaatcgagcctctctatgtatatataattgtagaaaatattttaattttgctcttagtatataaaccaataattcctgtgcataaaacaggacaagcttgtccacatcggcataacaagcaaatatggcaacccctcattctaaaaataaaatgacacatttttcagagaaacaacaggttcagggtcaaaaccagcccagcagaagggagtcaggcagctccatctcatgaaccaactgaagtttctcatgtcactggtactgcaaaagaatcccctccataattttctgttaaagtgtcagtggcaaatcaccataattttctcttaatcacaagagactaatcacaaaatgtgtacatcttcaaacttaatagctgatttgcaagcaacataatagaagagcctgacagccgcaccaccaccagtccatgcacccattaatacaaagcaagacaaatcatctggtaggggaggaggatttttgtaccttctatcggtggcggaggggatcggcttggtgaggacgagcccggcgactccggccgacggtgatatgggggcgtggaggcgggcgccctggcgtacatcgggggcggcgagggcaaactggcctggcagcgcggatcggtgcgatgggcggaggggcggtgcggacgagatcgtcatcggtggcggcacggataggtgcaatgggtggagggacggcggggatcgatgcgatgggcagaggctcgggggtggcgactgcgactccggtgcggatcagtgtgatgggcggaggggcacgagcagcaggatggcgaggcaaagggaatgctattggaaaggaaggggtggcgacggcggcgtgatttgtggggcgatgcgttggggggatgcggcagttgtagaagggagagggaggtgcgcgagagagggagggatctgggagggagggcgcgatctgggagacgttggatgtaactcagatgattttaggctgttggatgtgtgacatgatgaatgtgtaatgagtaaaaccatttgttcaactatagggtagatgttaaactatagcttagcttcgtgtcactgtgcccgtatattaaacttaacccctgcttagactttgataaatacaagtaatatatgtataaagagtattagcatagtctactcatattatcttcccttgggatcaaaaatacgataccttggaatatttttgggtgaaatactacaatggtatatcggtgcgcttgtggataacatctgtaaccagaaaatataccaggaccatttctgcgtcattgctaggaatgaatatttctagtaatgtcgttaagaaataccaataataccaaagggcaaaatgaactttatgataggaatttaatggtcaactaacaaaaggggtatagaagggattcaaactgaaatttaggggtatgaaagagaatgagcaaatctcagaggcatagaagggattgggcgaactttcaggggtacacagggaattttctgtgcaaaataagttaacacacctacattaacttattttagcatggagggagtacacggataaatcttatgtgacagtatcccttcttcacccctaacccgtcggccttcattaggtctccaacactatcctcatttaattagctagtaacagaaaaagtgttaaaacaacaagaaacaaaaaccgagctgattgccaaacactgatctacaccttccatcctataaaaaaaaacttaatcctaactaccgacctagatacgcatgcattcggattgatagataggattaatatttttcttggacggagaaagtaatacccaaaagataacccgagcttactgcgtgcaggcgaacaccgaaaagaatcactactagagaactgattgttgacggtcgttatcgaccaatttcgaccatcaatattactcaattaataaagactagctatgcttgcaatgcataatttgcaaataaaatatcaacttccactatatactatactactaacatagatgtaggagaagcacatataaatggagaagaatcgacagaaagtaaatggtcaatcaatcatacgctgtcgagatccagacttatggatgaatgcgcaaagaacacagaattcacacgatccactaggccttctggactgacgagacaacagggagacggcctgccgaaaattgggctgtttgggccagcctccccatctccgccgttgatcccaggttttggggtgtggatgtccaggatgcctccctcaacgacagttggagggcagaatgaacattttgcatcacctaaccgtcataactgccctatgtaaggacctcacatcctcactctctgcacacactcaagaagaagagctctctccctctctcaagtttagtagtatcctagtgctagtggagtagaaattataaaagtattcttagtcctcgggtcttcaggagaattttggtatgtctctagtagctttcctctcttcttttgtaagacttatggaattaatagaatattcttctttatacatcttcggtattttattccatttatattatctgagtgccggcttcattttatacttgtatcaatatagttgtgtagctagcctaccagagaggtgcaatggtgtgggtttagtgtccgattactcagttgatctatgtcatctcgggggatatatagtagtatttaataatgtagatgtggtgtctaaattattaagtatcactatctgggcatatatgctgcgggacagtagaggtgggccgctgatggtgaca

SEQ ID NO: 28581 - DNA, 4476 bp, Oryza sativa
tcccttgggattaaacaaatatgatacttggaatactccggggtgaaatgctaaaatggtatatccgtgcgcttacggatcatatttgtgaccataaatataccatgaatatttcttcgtcattgctgggaattatatttctagtaatgccgtttaagaaatatcaacactaatctttgcttggacggcaaaaatcacagttgcccaagttcgaataggatccgagactaaagaatatctttagccacgacaaaaatcacagttatcccggttcgaacactaactgggatttaagatcatttttagccacggttcaataattgtcaggccgtgtcaggcccccaacaaggactaaagatcatcactttagtcccagttgctgttaccaacccagactaaaataggaggatctttcatcctggctggtaacaccaatccggactaaacattgatcattagtcccggttcataaaccaacccagactaaagatatttttagctccacttggtgttaccaacccggagtaaagatgcctccagggttagtttaaaaataaagcatctctatccaagtcagatgtgtatactagagatgaaaacggtcggaaacggtatcattattttattatttttcgaaaacgaacggaaacggtcgaaaaatttccatatttatgaattcatctatttagaccctgtttgattcagcttaggattattataatctagattattaggagtaagctgaaacaaacaagtagattattatgctagattattataatctataagccggattactataatccattaatctcctctagagaagcttttttcagattattgagtggctaaagacctactacccttagatgcctctaataatccagagaaataaacaactcgtagcttattttatgtcattattataattcagcttagagtaatctaatttaataatctagattacaataatctttaagctgaaacaaacaaggccttagtgtcaacttcaatgccatgctgacagaaattaaaaaaaactaaattttgaaaacggtaaccatcggtaaaaatagtattattatattagttttgtggaaacggtatcaataccgtcgggaaattttcataccgttttcgtaacacgcgtgagggttgaggtgagagatcttgagtttgaatcccacatccgacgcgtttttttgacgtggtatgcatctttagtcccgcttatttcaactaggactacgaagggttggcaaccgggagtaaagctcccttccccaggagtgaatgcttgtttggttctatggctgatttttggggaaatttgtgcccaacccctactcgtcacgtgtgaaggaatcaggccgcatgtatggtgtggggccactctcttttggattgagacgacggttatgcaactttttaccaaccatggatggaggtttaaaaatagacttgaataattgtgtattccttatcttggtctggtcacttttataatgtttaggtgtgtttaattctatttgaactacactcttgttcgagtgttagattgtaataattggctgcagctctgtttagcaaaggccgggatgttatctattccattatctaaaaaataagtgaaggaatcatgccgcgtgcatggtctggggccactctcttttggattgagatcctcttccttaagtcagatgacattaaattctttgacatgtggacccatagaactagaaaaaaaacgggtaatttagaaccatgccattataattttgcaaagtttgagatatgccatcggtatctcaataacatgtaggacccacatgagtcaatgacatgtgggtcaggatggcatatctcaaattttgcaaaattataatggcatagttccaattttcccaaaaaaaaaaggatcccatagtaggcagaggctttggccatagccttgtgggctgtggtgcaaattctgtggaggcggccggtcaaaggcgaccttgtctacctgcgtgtggagtcgtggagctagacgacgtcacctcgcctcgtggtttggagtcaaacatcgaccggggtggatggtgcgcgccgcaaatagaagaggtggtgtggagtttacaaactctggaggaggctactccgccgcagcgcagctaacaagcaaccaagacgacatcaagcttcgccgctacaacaggcaatcgcggctacaccgctgcaacaattgaggaaaagaaagcagagcagcgctggtatccttttgtcgagaaacctagaaaccttttaagttgggcgggagcttatcgggcagcatttgcctggtggacgccgttttgctacgtctatacccagacgctgctcgtaacagtgaccacacctggacgatcttccaaatagcgtccttactattttgctaaataatgccaatgaattactaatgatttaatttcatggttattaattattatatataggaaacaatttcatggttatctatatacctaattaaaaaatacggaaggcttcctccctccgctttagtccgtccccccaccccccctgcccccacgccgccagccctcccatgcatctccgcttccgcctctctcccttccttccgacgcccccatctcttcgttgctgcacgctcccccaccctcgcggccctcttctcccttgcgcctctcctctcccgcctccctctctccctcatggcactgatgaaccctgagttccactcgacactcaagactgttgttggcccaatctttcgatgagtttagataactacgatttagaagaaacgttgatgacccgactacaaccgtacaagacgttacgttgtaccttagcgaccaatacacatctccatctttcattctttccgcgagttcaaggaaaacagaatcctctcgttcaggaatgtgttttgacgcacttatccggtcgtgttcgccaccagagctcgtcattatcgtttctccctctaccaagaccatgacattgcttgcccaattcctgctgttttggttttcttcattgccgaccaccaccatctatggacgagtcacatcgtgagacacatcctaccatcttcctcgccactgtttggtcataggagcaccgacacccatttcccctcctcttttgtttctcgtcttcagctagggaaggcaatgaacaatgtttttttttgacacaattccttcttggtctagcccaaagatgctcatggaacactcacagaccataggactatgaatagaacaataaaattctaatttatgtcaatgaaacatgcaccgttttagaattaatgtattggatttttcatttgtgggctaaaataagttttttcaatttctaactaatttaagttgttttttcacagtattagttttagcactatttgatccattaaaaattatcataatttatatttttctttgtattgaattctttataggtaaatgaaaaaatagggattaagttatgtaattttcatgatattgaattatcgttccggacaaaagttatttgtatgtttgtatttccttcgtcgtttatcccaactataatatatgattttggattttaatttatgtcaataaatattatttagaaaccgttgcaacccacaggcattatgctagttaattactcctcgtcccaaaatataacaatttttagcacttagagcaattttaatagtatagcccaccgttagctcaaaatcatctatagccaatgtaacagccaattcatacaatagttgcttactatactattaatacctggtcccacctgtcatacacacattatgtcttgtagtccgtgctgcagctggctacagatctgtagcccgctacttttctctctcttcctttatctctttaaaatatgtttatagttgacttatagcctgctattgtacatgctcttaggatttgtcccaaaatataacttcttcatcagcatttccttcctaaccaatcacaacccttcacttttcccacctacctccactgctcaaccaatcacaatctctttctatttaatgctatctatttttttaataaccgtgtccaactctaaaactgtctatattctgtgacggagggactattatatataaaaaaattcagcaacccctctcgggtcatttggttgggggagtttttaggagagattgagagtttagagggatgatgctattaattattctgtttggttgtgttaacaaccaaatttggtaatatcacactggtggagaaaccatctttcgtcggtcggccgatttccacaatagtcccggatgcaataaaaaccggggctaaagatgatctttagtcccggttcaaaagggtaacgggcatatttgatctttagtcccggtttgtgttaccaaccgggactaaagatcatcggttcgaatgctgtcaggacctgtcaggcccccccgggatctttagt

SEQ ID NO: 28582 - DNA, 700 bp, Oryza sativa
gtccttggcccaatccttaggcttgccacaacatagcattctcctttaccttttacgttgtctttattcttaaaattgatttgaagctttgggtttgacgtcaggtttgactttctgttctggttgtggaatgcgtaagggtttttcttctgtaacaaattagcgctagaccctccctcgttcttttggtcccggttgtcctttcccctggttttctcctcatcacccaaagagccaatgagatcagtaacgctgacctcttgcgtcttgtgttttagagaagtaccaaagtctgcccaagaaggtggcagtttggcaataatgccacccgccccaatcttgtccggcaactcgcagttgttgttctcaagttcctttgccagcatctgaatttcatgagcatgttcctctacagaacggtcatcgcccatgttgtagtcatagaactgctccatgacatacagctccctgtcggcgtggaaaaccccgaacttgtcctcaagagaatcccacatgtccttccctgaaggcatgtgcatatcatcgtccacaatactgtcggggtgcactctgatcaatgctccacggaacaagcaatccgcagcctcgagtttagcctcctcttcagccacaccccccggttcactcggtttgcctcgtaaagcaaagaaacgttgcttcgcggtcaaccacaaaagtg

SEQ ID NO: 28583 - DNA, 572 bp, Oryza sativa
cgcagtgaatttaagccatgatttatgaatgactacttcaaaagaacattgccatggcagcaagttcacatttacaatgttgtgctactgaaaaaccattttcatatattcaactatgattgtatgatgcagtgaaatgaaattcttatgcagtgccattcacgaggtaatgaacaaaccttgctctttgcatccgcagcaaacttatcagctactacaatatcagttggaagcaatagggagactccctttgacttggctttttcaataagcgaggtagccaattcgagcttgtcttcctccacaagagattttccaacagcgtatccctgagccttgtaaaatgtatagatcataccaccacccagtatgaggatgtcaacctttgccaaaagactctcaatcaccccaatctttgttgacaccttggatccaccaacaatggcagcaaatggttttttggggttggcaacagctccaacaagatagtcaagttcctagattggtgaggacagttactacaaaattttaaaaggattacatatttcaaaaaatctcaaggaaaaacagct

SEQ ID NO: 28584 - DNA, 867 bp, Oryza sativa
tttaaaacattttaaaaacaaaatgagggaaatcaaataacatttgagaatggtgagctcattttacctctttttcgctgcccgagtggatcgcaagttgtattgcgtgggttgcgtcccctgagacgcgtcgggaagctgcgacatgtctatctcctcagcgtctggggcgacgtagtcctcatcctcctcctcctcgtcgtcatcgtcgtcgctaggtggagtcggcgccttcccctttcccctcccttgcggaatgcgtgacgacgacgagccaccaacttcttcacgctcttctatcctgatggagtgtcgagcggtacttggacgcacggagtgaggtagtggtggtggtagtctccgcggttggtacacgtcgtccaattcaaccgacttgcaacctaatcttgctgcaagtttccggcacctttgacgaactttctgcagttcaaaaaaaaaagaagtttgttaggcataactcaagtaatgcaaagtgctaaataaattttacctccaaaacattgcggagtgtgttctccgtgtcctcaccacccctcggagcttggagggcatgccccatttcattcacactcctgaggagctctctcgactgaaagcgtgagaagatatatgttagggtctagggtgcaaatggaaataactttgacaaatgcaagaaaacttacgactctgtctctaagtggggcgtgctccatttgatatccaactctagtccggacatcatagggattccgtccctcatcggagtcgcggtcatcctctatgtcggcttccgtccaagtagggcggaggaacagtctatatgtcctatgcagccaacgaagatactctgagaaaagatgattt

SEQ ID NO: 28585 - DNA, 4703 bp, Oryza sativa
ctcatttgtgtggtatggtaaccattcaatctgcaaaagttgaagagatgtcgttggttagtatctcaattaaagaagtaaatgtctaactagaagtgatattggaagtacttacatgttgagactgtaagcagtccatctcattgacataatgcttgtatgccacatcccggtgagcatgtgcagtggcagtactctcaaaaaggtaggccactgtcttctccatgtctggctcattgtagggccaaggagtgaagctttgcctccacttaggccttccaaccggtagtcttaaccacatccacagctgaatcaatagcacacaaccactcatgttggatgatggtgcctgacgacaacaggcctcacagagctgtctatatgtccacgccaacactgctgagccccaactgaaacggcctagatcaccaaggttggcgaccaaaggaatccatatcgccgaagcaatgtcatccccagcatcaggaaacagaacccctcccaacaagtgcaagatgtatgcacgggcataacactcaacacgccatggctcagcgtcgtcgtcaagatgtgagaagttctgactcagccaagacaggggtattccattctgcttcttcttccccccttgcccctgctcaatgttcagtggaatgccaaacagctgctccacttgtgcacgccatccaggagtctctgtcctgcccgtcacggcatgcccccgtaatgggagggccaagatcatagccacatcctgtagagtgatggtcatctcaccattagggaggtggaagctgtgtgtctcaggcctccatctgtccacaagtgctgtcaacgcaggagcgttgaacactggcattcctctgctcacgaccaaggccaccccgagcaacccggccgcccttaggtacgggatgtacctatcgtcgaacagtgggggggcatgagctctgactcggagcggttgaagtacctgcattagcaattgtaaatcaattagttaatataatgtcaaatacacgctacagatacttatgcacaagtgaatcaatgccgattcataccctccccgcctcgatcgcagccccgcgatgatgggcctcgtagtacgcctccaaggctgggtaagtcggcggttgtctctcctcggccatactacatgaaaaagtaataaattcaccgttagttaccaatgtgacatatattaacagaaaatgaatgcgagaacatgagtaggaaaacaaattatttacctccctaacacatatattttttttggacttcttcttttttggacgcttaagacacttagttttcttgtgactctcctggtgacacaacgagcatctattttgcaccggcgcagcatcaagttgaacgcatgaaggtggtttccttccaaaaccacccagacccgaggtcatttcgttcttgaatcgtttcgatctcctcttccctcttgtttaaatcttcaactttcggtcagcaacaaattcttcaccatcgtacggtggccactgtgtggggtcgaggtatggctcaaagcgacttgcccatgtgttcacaacggctcttgaagagaattgatacggcattcggttggaagatttctcatcaattgcatgaatcagataaacgtgtataagatgtgagcaaggcatatggtagagcaatggcctttggcaagaacatgagttcccctcaccttcaactttgaaggctcttgcgccgaatctaacaccaccacgcgttatactacccctctctgtgacctcgtatgtctttttctgcttatcgaaacaccttgcagtgtgtttgttcgccttacttttttgcaccttcatcttactatcaaccttggtggaccaacgctgccctaactggactcgcttcaaagcttcatcacgtctgttcacaaagtagtcattgcacttcatgaacgtaaatgatactatggccgtcactgaaagcttacgaacaccaactagcacgctattgaactgttcggccatgttggttgtcatgtaaccccaccggcggccatttctatcgtatgcacgagaccacttatctttatccaacaactcatcttcaagccatttacgaggaccttcgggaatacgctgccttagtgcctcaacatccctctcaaatatccacttctcgtcaatctgacatatccttaggagctcttttgtctggtgcttgtccgcaccgcccttgtggaaattagcattgaagtgcctcatgcaccatcggtggtgaaccggtggcaatcctggaacaggagtcgtcatggcattcattataccagcatgtcgatctaagataatacaaacctccctatgcggcccaaccacaacccgtcagacaagatcgataaccagcaccagtctcgtgaattctctttctccaccaaggcaaaagctaaaggtacaagttggtcctccgcatcagctgataatgcagtcatcaaggcaccaccgtatttctcagttagaaaggttgcatctatagctagtactggcctacaatgcttaaaagcctcaatggaaggaccaaagcaccagaatgcacgcataaaaattttcttggtcactccatcaacgttgacaaccctatcagaatgagtatcgatgtggtagaccatactgggattcctctgcttaatggcttgcagcaaagtgggcaaacggacatacgcttcaccccattcaccgtaaatgagcttcatagcctcctctcgtgccctccaagccttgccatacttcaccctatactggaaaacctcaaatatatacaaagctaacgcagaagcagagagtgtacgttgcagttttatggcattgcataaactatttactatgaactttgatgtcagctgccggtggctccctgaaccttcggtagtagcacaactatgttccttacctacccgtgatatcctccacgttccactagactttttagttgcatggaccttccatttgcaccgtgggttttcacatttaacagtgtacctcctatttgcggcagaattgacaactcggtatggacgatggtgcacgatgacgtaatcctgaacccatagcttcaatgcgaccatgtatggaacttttaaaccctttttaagaccatccacttaaaatggttctgacaactgatctaggttgatgcggccatctagtagtgccccatgggcatgtgttaggtccctaaactcagaaatgtccggcttcctcacaaacaccttctcaaacgcacgacattcctctaatgctaacttgtcattattagtaagtggagggaatggacggtcatcatcagagtcttcagcaaattcaacatcatattgctcaacacttgcctcctcgtcaacatcatctctattgacttctactgagacagaatcgtgaccactactcaattcgacatcaaagtaatcatctggattcacatattggcctgctacttctgtcgggtattcagggttgactccgtacgatgaccaatgaacactcgccgacaaatgttcacttagatcaagcccctcttgtactaactcccttttcatctccctcgctgcatccacatcatgactaccacaatgtctctttgatggtcctgcctcccataaatcatttccaagcaaaggtctcttcttctctccttccccctccaagtcttctcgtaccaactcagtcttacttgcaccccctccacgacgagaataatatgtcacaaaattcttctcaacgcaatgataagaaggagatttgtttagatccaaattttctacggtacgaactaactttgatgcaaacacctctagagatctaaactgagactcttttaccaaatcaaagtaaacttcccattccaactgacctatcacatttaatatatacttatgcccttgaccaacatcgtatctcccataaaaacgaatctccacattatcctcggtccatccaagaacttctttcactcgtgaccttagttcatctagagttgggtgggtgggaaacaaaatggtcttcaataacatatcctcaaactcaacatgtgtaccaacataaggttccaccactctaccaccgtagtaaacacgaacaagtcaatccatctacaccaaaaaatcaaatgtaactttgcaacaaaaattaaatcttcattcctaaacgtagtccaaaccgacatattataaccaatgcataacttaaattatcccaaagctactactccaaaaaaatatttaattcacctacaactatcaacaagtttactagtgcattacacatcgaaatattaaaaatactccgtcatacaacccaacctagttctagttaactataatcaatttatataatgcaaccaaaattttctcaccttcatataattaatggttaaaagtttaacctatagactatagcatcaagtccatcaaattaaaattactttcatgcctcaaccataatttttatatccatccatccaatcaaaccatttaaaaattaacattaccacatatatggttaaaaaaatcgtgacaccaatgagttcattgcaaacatatagcactacaacaagccaatcctaagaacaaatgctaaaaatcacacatttgggtaaaaaaggggttctagggttgcccaccgatctacaaattcaccactaaaaacgaaaaaaaagaggggtgaatg

SEQ ID NO: 28586 - DNA, 1130 bp, Oryza sativa
ctagggcacgggcgctgcggcgggcgcggctagagaagggagatgacaggtgggtcccacccgtcagcgagagtgcgggcgggcccgcctgtcagcggcgcgcgcgcgcgcgggaaaccgatggtccgcgggagaagagagagagagagggagggaatgggccgagccggcccaagagggaaagggggggggggaaaagaacttcttttaggatttttctttttataaaaccttttcaactttgtttatttcttttcaattattatttgtgctctgaaaattccactaaaatttatttaagcattttaggcttttaggaaatatacaaaaatcctccaagcctcatttgacttttatctttgcacattttaattgttggaggctttcacaataaatttttaattattcttttgcacaattttgaggatgaattttagagtcgatttgggacgcgacaatgaggccgtagctggcgtgaggcataggccaccacataaccttcctgcatgagcacgcaccccaatccttggcgcgaagcgtcacagtacaccatgaagtccttgcgagtatccggcaagattaacactggcgaggaaaccagcttttctttgagagttttgaacgccttctcgcattgcgggctccacacaaatttctcttctttcttcaacaactgtgtcatgggtcgagcgattttggagaagttctcgatgaacctccggtagtatcctgccaaacctaagaaactgcgaatttgagtgactgtcttgggttgcttccaatcggtgacggcggtcactgtttcggggtccacagcaactcctttagcagatatcacgtgccctaagaatttgacttcggacaaccatgtcacgtcctgataaattcatcccgaaattaaaaatcattttctaaaaggaataatagaattaattaaaattcaaaaagaaattggcaaacactaaaatacgtacaagaaaaatccaaatgtggcccggggaatttttgttaaattctccttggtctaaaaggagccctcaaattttagtggaattttcagagcacaaattataattattaagaaataaacaaagttaaaatgggtttataaaaagaaaaatcctaaaaag

SEQ ID NO: 28587 - DNA, 9267 bp, Oryza sativa
acacatcatctggatcatattgaatcccagtttataaaattatgtggattaaaataatggcattatcgcttaatttaaattcccgcgttatcactgttttatttagccatgcctatttacctttgttatgaccatattattattgttattgttattattattaccttgttcaccctagacaaacaaaacctcaactagtgggcactctactcatagtaccactaggataattttaggtagatgcttcgcaatttaattaggtaacattaggtggttttacaactatagactttgggaaatattcatatcacctggatactttggaatggttggctattgtggaattggtttcacaccgctccttcctttcaaaacccctaaaatggttttgggctgggctaggggtgcatggttttgatggtagcacctcggccgtataaggaccggtcttcgggcctctgttgcaaagcactaccgtactttcacatgtctagtgggtaaggcttagtttgtggctcagtctagtcataaacaaaagtacacggattggagatggatgaagtcgggggtcgatggacattctccagggcaaatgaaggctacacgagctgcgggcccgtagtcaagatgtcattgcagagggttggtgccctgctgctaggggctcagtcctgcctgcctgtcccgggggttccggccgtaggcgggattgggtcggtactcttgtctatggctaggatgggttggaaactatgtcacgtcttccgtctgtataccgtggtggtatgtggcacgtggttgcacgtgaggaagatgtgtcttgtgggtaaagatgtacacctctgatcagagtataatctattcgaatagccgcgccctcggttatgggcaagccgagcaatgtacccaagttagtgttttaatccttaaaacctgcttatcaactaaaatgtggaatggttggcctgggttggcttgggacgagctgggacccagggtcgggttgccagttcggtctgaatcatcataggccttgggttaaggcaggttcgtgtgggttcacggccttgattaataacattgtatagttctaggatcgcgtttgcaaaatagctttgtgcaactaaattttctttaaatgctgattactgcaaccctaaccctttatagtataattcccttgtactcccttgcatttattctgcatttgtgggtgtgtcttgttgagtacggtggttgtactcagtcttgctcaatttttcccaaccccagaagaggagttccttgaagatgaaggctttggtgtctagctcgtgcctgccgtcaagcgcctgtggtcgtcgccctagtcttccgctgtttcccgtttgtctttgtgtgctgggccttcgctgcccgtgtaataaatatatttacgcttccgcttgttaaactctgatttgtatcaactgttggtgtaccttgcctcctgggacaaggattaatgcacgcacgtaaggaactcccgttgggttatttccggtcgtggcaaggagtttggatgggccctgcgacggcctatgcggcttccggattcacctaggcacgagaggggactgcccgctgccttgcgaggagtgggggtgaaacctgaggtgtggtgtgcttggttagagggggttatgcgaagggtcctatcacggcctctttccgatatgtcgtggtggcatgtcggcgcacggaaacgtgttgtgcggctgtgtcttgtgggtacagttgtacacctctgatcagagtaaaactattcgaatagccgtgcccgcggttatgggcggtcaaccagattcaccgtgattagtctcaccttagtgtaatcttttaatttggatagtttaggtggatggttgggcctgtcgcaacgtgggttagcgttggacagtggatgtttaatattaattaattgttacaacggtttaatctttcaatctctgtttataaatgctcgctttatgcaaatgaaccactttagctcttctttgataactccctgcatcatacccctattccggtatgacttgctgagtacagtgggtagtactcagccttgctctatttccccccgatcccagagctcgagtatgtgtccgatggcgggttctccgaggagtaggcttcgtccgtgccgtcgaggatgcctgtggagtggtgttcccgctgcagttcaagtcaaggcttagctccagttttcttttgttttccgctgcatttctgtaagacttttatgatgtttgtaagacgtggatctgaatgtcaacatagtcgtttgtgtaccccggccggtcctggacgggggttttaatgcacattctgcttggaatcctattcgggaatttctgggcgtgacaagttggtatcagagccgaccttgaccgtaggacaagccaaatggaaaaacctaagagccctctgaatccttttcattgcatatgttctttgcaattggatttgttccgggaaaattgggatctgttcttgtggttcaggggaaaaatcttggtcgctcgtttaaagtgagatttttcaaaacgagtcagtctagggttttagtaaagctattgggattcattcgttagtcagttgggatttgatgggtgaaatgcattaggtcctagctcaggaatttgggttgcaaggtatttatgctttatttgttattattagtatgtatctaatttctcattattttatcgttatgtgagtctgtcttatttattcgctctcatgcaaaatgatctatgcataaaatttcgctcttattcgattcccttatttgagtcttttattgctttatttacatttggatttgagcatgcattgatcctactcctttgtattctctagatggccggtcacccacccaaccaccgtggagaaggcatgattgacttcgtggcagagttggcacgcatgacactggtggtgggctaccccaatgcgccagaatacacgacgattcccccgctcagtggcgaacttcctcaccgtgtccgcttggaggtccacggctacgtggggacttgcctcgctaatatggcggttgaggcgtcaggaggcacagcggatcacgcttgtcaggaggcagcctacttgatgatggccagactgcgggagcgccacaactacatcttccacgacacggcgtaccgcttccaccctcgtcgagcccacggtgacgacgtcagttccttccgtccgacagctggcgagaacgacaccacctttggtcacatgtgtactgtgatgaggggattggacaggatgcactcggacctgcacaaggcgaccaaggccttgaatgatgggaagctcatgaggatcgtcgctctgaaggatgagatagcgcgcctgaagaaggagaatgctcagttgaagggtcttccagcaccaggaggagtccggatccgcactacgcctcgtaagaggacgactgcacccgtgcgcatccagctcgcgcccaggaacccagttccgaccgcagctcctgcagcacctccagttccgcccgcagctccggcagttcctgcagctccagctccagctcccgcgttcgatctctccttcgccctagcatcagccgccaggggtccagccagtggtaccggaggttggttgtctgctactcccagtggcagccgcgaccgcagcagcagcagctccaggggctgagagtcgggcagcggcgagacttatctgccaggctccaggagtcgttcagagggacctggtgatgagcaggaggacgccttcgactccaccgaccgcaggagccgttccgagcattaggctcgttttccattagtttaccgactgtctagcttctgcttgttagtttgtgtgtttaggttgcttgtttggggtcagtcgacggtcgatatcatgtgcctatgatatggctgtcttaataaggatttttgtttgctcttttaagtgttttaattcagatcagaacaattgcagttttaattcctttgtaataaagcttagttcctgagcatctgtttttcttcttttccccgtctgcttttccctccagatggtctacaccaggactggcaaccgcacgacaggcgagggcagcaacggcgaagaacgcgttgatggtgtgcaccccaacagcgattccggcaatggtccgccaccacttcccgagaatccgacccttgcccaagttatggcacatcagactcagatgatggcagccatgatgcagcagatgcagcagcagcaccagcagatgcaccaaaggatgatgcagcacgccgaacagcagcaccagcagtttggtccccctccccctcagtccaagttgccagagtttctacgcgtcaggccacccaccttctccagcaccaccaaccctatggaggcgaacgactggctccatgcaatagagaagaagctgaatctcctgtagtgcaatgatcaggagaaggtcgcttttgccacacaccagcttcagggtcccgcgtcagcttggtgggacaaccacatggccacccgcccaccgggtactgaagtcacatgggcagagttctgccgtagcttcaggaaggcacaggtgccagatggggtcgtggcacaaaagaagagggaatttcgtgcactccaccagggcaacaggactgtgacagagtacctccacgagttcaatcgcctcgcgcgatatgcaccagaggatgtccgcaccgatgccgagaagcaggagaagttcatggcgggtctggatgatgagctgaccaaccaactgatatccggggattacgctgactttgagaggctggttgacaaggcaattcgtcaggaggaccaacgcaacaagatggacaggaagaggaaggccgcacagttcagggcacctcagggaagtcaccagaggccgcgcttcactcccggacagcagggtggacctaccaccatgatcgtccgtcagcaccgcccgttcaactccagcaactttcaccagggctctagtggcagtcagaaccaccatggaggtcagcccaaccgcggtgcagctccacgcccaccaatggcaccggcacagtcaggcccgcccgcgcaagccaagaaggagactggagcaaaaccagggtcctgcttcaactgtggcgagcttggccacttcgccgacaaatgcccgaagcccaggcgtgccgggccaaggtttatccaggctcgtgtcaaccacgcatctgcagaggaggcacaaacagcaccggaggtcgtactgggtacgttccctgttaactcaatccctgcaacagtactttttgattctggtgcaacgcattctttcatttcaaagaaatttgtggggaggtatgggttaaggaaagaagagcttagcacaccaatgagagttcataccccgagaaatagttcaacctcagtcagttttagcccttcagtgctaatagaaatccaaagatcaccatttctagccaacctcattcttctcgaatccaaagacctagatgtcattcttgggatggattggctgaccaagtttaagggggtcattgattgtgcgaatcgcacagtcaccttgaccaacgagaagggagaaaccgtggtgtacaaatcaccagactcaccaaagcaaggagtctccttgaatcagattgaagcggaaatcccagtggacaccgtggagaagaacttgagaaaattggaagatatacccatagtctgcgagtatccggaagtgttccccgaagacctcactaccatgccacccaagagagagattgaattccggattgacttggcaccgggaactgctccaatctataagagaccgtacagaatggcggccaacgaattagcagaggtcaagaagcaagttgatgagcagctgcagaaagggtacattcgaccaagcacttcaccttggggcgctccggtcatttttgtggagaaaaaggataagacgaagaggatgtgcgtcgattatcgcgcacttaacgaggtcacaatcaagaataaatatcctttaccgcggatcgatgatttgtttgatcaactgaaaggagctagagtgttttctaagatagacctgcgatcaggctaccaccagttgagaatccgggaagaggatattccgaagacggccttcaccactcggtacgggctatatgagtgcacggttatgtctttcggacttaccaacgcacccgcattcttcatgaatctgatgaacaaagtgttcatggaatttctggacaagtttattgtggtgttcatcgacgacattcttatctattcaaagtctgaagaagaacatgaacaacatctccgtctagtactcgagaagttgaaggagcaccagctatacgccaagttcagcaagtgtgacttctggttgacggaagtcaaatttctgggccatgtcattacagctcagggtgtggcagttgatccatcgaacgtggagtcagttaccaaatggaccccaccgaagaccgtgtcgcagattcggagttttcttggacttgcgggttattaccgtcgattcatcgaaaatttctccagaatcgcccgacccatgactcagttgcttaagaaagatgagaagtttaaatggacagccgagtgcgataagagcttcgaggagctcaagaagaaattagtatccgcaccagttttgattctgcccgacccgacgaaagacttccaagtctattgtgatgcatcccgtcacggacttggatgcgtcctaatgcaagagggcagagtggttgcgtatgcctcgcggcagttgcgtccacacgaagggaattatccaactcatgacttggaattggcagcagtggttcatgctttgaagatctggaggcactatctgattggcaaccgctgcgaagtatatacggaccataagagtctgaaatacattttcacccaaccggatctaaatcttcgacaacgaagatggttgtaactaatcaaagactatgacatgagcattcactaccacccgggaaaggccaatgtagtggcagacgcattaagccggaaaagttactgcactgccctatgcaccgagggcatgtgtgaggaattgcggcaggagtttgagcatctcaacgtgggtattgttgaacacgggttcgtagccgctctggaagcacggcctacgctcgtggatcaagtcagagcagctcaagtaaatgattctgaaatagtagagctgaaaaagaatatgagagtcggaaaagcccgggatttccacgaggatgaacacggcacaatcaggatgggagaaagattgtgtgtacccgacgacaaggaactgaaggatctgatactcaccgaggctcatcagacccagtactccattcatccaggcagcactaaaatgtatcaagacctcaaagaaaagttttggtgggtcagcatgaggagagaaatagctgaattcgtcgcactctgcgatgtttgccagcgagtgaaggcagagcaccaaagaccagcaggtttactccaacctcttcaaatcccggaatggaaatgggaggagattggaatggactttataacgggactgccccggacatcatcgggacatgattcaatctgggtagtcgtggatcgactcaccaaggtggctcactttataccagtacataccacctatacgggaaagagattggcagaattgtacctcgcaaggatcatgtgtttgcatggggtacccaagaagatagtatccaaccgaggtagtcagttcacctcaaagttttggcagatactgcaggaagaattggggacccgtttaaatttcagcacggcctatcacccgcaaactgatggtcagaccgagcgagtcaatcaaatcttggaagatatgttgagagcttgcgctcttgattttggtggagcttgggacaaaagcttaccatatgcggaattctcgtacaacaacagctaccaggccagtctacagatggcaccgtttgaagctttatacggccggaagtgccgcacacctctcttctgggatcagacaggcgaacgtcaactgttcggaatagaagtattagcggaagcagaacagaaagtcagaatcatcagggaaagattgaggattgctcagtctcgacagaagagctacgcggataaccgtcgaagggagctcacttttgaggcaggagattacgtgtatcttcgtgtcactccgctccgaggagtacaccgttttcagacgaaaggcaagctggcaccacgcttcgtgggaccatacaaaattttggaacgaaggggagaagttgcttatcagctagaacttccatccaacatgatcggcatccatgacgtgttccatgtgtcccaattaaagaaatgcttaagggtacctgaagaacaggctgattcggaacacattgatatccaagaggacctaacatatgtggagaagccggttcgtatacttgataccagtgaaaggagaaccagaaacaaggtcaccaggttttgctgagtgcagtggagtcaccattcagaagaggaagcaacctgggaaagggaagatgatttgaaagccgcccatccgcacctcttcaccagctcctccgaatctcagggccgagcttccgtttaaggggggtaggtttgtcacaccccgaagttttccccccaagccaaaattgtaatttataaatgaccccaagaaaatgcaggtgaaatcaggagaaaaccctaagaaagtaatgcaaataataatcggatttgacatgtggaatttttcttgagttctatatgtcgaaattcattaacaggatttttagtagaattttcagagctctagaaataattttaaccaattaaaattgagcaagcaatatttttaattccagggaaaatcctttttctttttctttttctttttcctctctttttcctttttttttcgaatgggccgccggcccattccctcctttctttctccccctccctgctgggccggccgcaggccgaggcccagccaggccgccccgctgcgtcctctctcggggtcgccgacaggtggggcccaccagtcgggcccgtctccctcctccagccctggttaatattgcgcaataaatgatttaaggttttttcttttatagtaataaacacagtgaatcttctaaaaatcataactaattcatccgagctccgtttaatcccattcatgtctcagtaaatcaagaaaaatgtgtagaatccattaaaaatggttttgtt

SEQ ID NO: 28588 - DNA, 707 bp, Oryza sativa
cgatcggctttcatgccgatccgagcccggggggctgccgccgccgccgtccgtccgatcggcccgagggcgatccgggccgtcggtcccgtggatcggcggtggatcacccgcgtggtcccggtccacggtggaccgccctccccgtgccgctgaccggtgagcccgcgggccgacgcctcctctttcctccccgtgccgctgaccggtgggccccgcatgtcggcgccgcgccacccgtgctgacgtcagccctggttaatattgcgcaataaatgatttaaggttttttcttttatagtaataaacacagtgaatcttctaaaaatcataactaattcatccgagctccgtttaatcccattcaagtctcagtaaatcaagaaaaatgtgtagaatccattaaaaatggttttgttctctgtttcagtagtcttatagcctgtttgcaatgtttgccttgtatgtcgctagattccggttcctccgacgctccggtgtacttcgagatagtcgccgaggttcctccagcagcagagcaaggcaagtcatgcttgtcacttgatcatattgatcctatattgcaaatgctctattgttttctttcaaataccgcatttgttttgcaatattactatagagatggttacctattgttacggccatactattttgataccatgctcctttgttagcttgggttataa

SEQ ID NO: 28589 - DNA, 1635 bp, Oryza sativa
aacctccggaacaggcaggcaggattaagcccctagcagcagggcaccaaccttctgcaatgacatctcgactaccgggccgcagctcgtgtagccttcatttgccctggagaatgtccatcgacccccgacttcatccatctccaatccgtgtacttttgtttataactagactgagccacaaactaagccttacccactagacatgtgaaagtacggtagtgctttgcaacagaggcccgagcttaatccttatagtggccggggtgctacttcccacaactggcatgcacccaaaccccaccgaaaacaggtttttaggggttttgaaagaggaagagaggtgtatgtcaaattccaccataaaccaacaattccatagtgtccagatgatatgagtattcccaaagtctagagttataaaaccacctaatattgcctaattaatcagcgaagcatctacctaaattcatactagtggaaccatgaatagaatacccactagttggggttttgtttatcctagggtgaacaaggtaataatatcaatagcaataataataaggtcataacaaaggtaaataggcatggctaaataaaacagtgacaacgcgggaattttaaataaagcgataatgcattaatttaaactaaaataattttataaactgggattcaatatgctcaaggatgatgtgacttgccttgctcagagagaacggccttccgaaccttcggcgacgaccacgaaccacgctttgggaacctccggaacgacgaaagctacgcgaagcacacaagcaaagctacaagcctataaagaagcaataacaatacataaaaaacaaagcacagggttctttaggttataacaaacattaagagacttgaacggatcgattcggagttcgtatgaccaagatatgatcatccgaagtttaatgctgtatatatggcgatttgcggattattataattaagctttgcaactataaaaaatgtggaagcgctagcctggaaaagacaggaaggctgcgctgctgacatgcggaccccacatgtcaacctaaaggaccgcggtagaccgggtacacagagacggtccacgggtcgacggaagcggatcccgtgtgtcaaccgaggcgagtggccgacaaacggactccactagacaccacacggcctgcacacgtggaaaccacgcggctaccgagcgggcacactaacgcggacactacacggtcaccacccgcacgcgtgaacgactaccgacaccggtacacgggtaccggggccgacaaccgcacaacgagcacgggcgacaccgaaaggacgaggacggggcagcgagggagagggatccttaccaccacgcgacgaggcgcgggaacgacaacgacgaacgggcgcggcggagacagacgggcacaacggagacgaacggcgaggggacggcttcggcggcgatccttggacgaaggcgagacacggccggcacgaggcttgacgacgcggagccgaggacgaagacgatgacggggctgctgcacacttgacgaaacgcgggcggcggacgagaacggctcgacggagggacgaacgccacgacgaccgggaacgacgagaggacgacga

SEQ ID NO: 28590 - DNA, 9094 bp, Oryza sativa
  unsure (1)..(9094): unsure at all n locations
caattcatttgctgccatacggtagggtcgcttgtacagaggagtggttcctggagcaagatctatccggaactcaatctctctcttgggcggcataccgggtagttcttccggaaacacgtctccgaactctctgacgatggggatttctgacagtcctatctgatgaagttctgaactactgacagaggttgggggtgcaaagaaaacaaccggttgttccggccctcggtacagagtgacagtgcgtcttgcacaatccactactccttggaattgagccaaccaattcatcccaaggatcacatccaagttcttggtgtctagaagaatcagattgtcacaccctaaaaattttaaatatataaattgttgtttaattggaatttttagaaattaaattaaaagcctacaagctaaaccctaattttctaggaaaattttcaacataaaagtgggctagataaaattttattaaatactatgcttgctcctctattttctagaattttctgggaattatttgagcaagggaagtatttttaataattgaaacaacatttcataaaatgttttattcaaaaaagttcaaaagttcccccttcttggtccttgggccgatttcggcccgtctctctctttcctctctctcctccgcgcgcggcccaagccggcccagccaagccggccgcgcccgcgcccctctctcccggaggctgacagatggggcccacctgtcagggccgtcttcaacctccggccgccgccgcgccgagccgccgaaccctagcgccgctttcccgctccaaatccggccgaatccgagcccgattccttcgattgagttaggggttttgttcctctcaatctcctctttcttttcccccaagaatcaaagaaatccgttgaggattcgatccgaatcgaactcattttgatttatctctaaaaaccgagttcgtgttcttcccgatccgattcctctcgtttgcggcttggtctcttcgattcgagctcatataaaccttccccgtgatctcctctttcgtttgcccttttcccgagtcctcccgtgcctcctagcgccgccgcgacgcgtcgcacgtccgccgccgccgccggccatcttcggcatcgccgccgtgccgtctccgccgtcgcctttggtcgccgccaccgccgttaggtgcgccgtgaggagaggaagctcgtccgcccctccgtttgcgccgccgatcatcggagctccctcgacgccgtcgacccgagccgccgcgccgcctcttctcgtcgccggccgccgtcgtgcatcgtttcttgtcgtggtgagtaccaatgagttcgtctcgtcgcccgctacgcgttggtgccctccaatcccgccgccgaagtccctagcgccggcgagctctccttcccgagccggccgccgtcgctgacgtcatgccgacgtcaaccctagggctgacgtcatcagggccagggctgacgtcatccttctctctttttcctttttctcgattttcaaatagattaaaactttggaaaatcataactaaataaccgtagatccgttttaggtggttcaagtttctaaatttttctaaaatcaagatctacatgataaaaatatccacatgtactgtttatgcttgtttttgtactgttttgttgattttatttatttgctttagttttcgacgttccggaggagagcgtttccgttgaggaaggttccgaagcgtttgtggaagctcaaggcaagtcacacagatcccaaataaccctttgagcatgttgatcctgtttaaagctattattttatttcaactatgcattgttttcgaatgtcatcgggtggtgaacttttcccagttaattattggccgaagttgactttattttcctatgggttataatttgattagcatgaaccttatatattggattggttcagctaaatgctatctataggtttgcttagacatgcctagaaacattagctaattaaatgggttaattataaactatgttatactattatttaatgatggttattttaatggtagctcatgatggtcaatcgtgtgatgataattaattgataattaaaacctgattaaggtgggttgtgagcatatggttttgatggttgtgctcatgacaattaaggaccggttcgcgagctactgttgtgaaacatctatcgtgccaaccacaagccagcgtgggcaacggctttatcttttgtatagcatggttcattatggtgtgccagactgagaagtggcgagaagtccatgggggtcgctggggagtccatgccttgtttataagggggtgattatgatccaggtacggtgcactgtggtgaattgtgttatgcgaggggtattgtcacgactcctttccgaggtatcgtggtggtactgaggcacatggtaacatgatgtggggttgtgtcttgtgggtacagtggtacacctctgatcagagtttaatctattcgaatagccgtacccacggttatgggtgagttgagcaatgtttttcgtgattagtctcacacttctcattaatggtaataatgtagtaattaatttatttcctggtttggaatggttaattcctggtatggagggttaatttgttcaactggggttggttgatcaaatgtggttgggcctatgcaacacgggtgtgttgtatggtgtttatttaatattgattaattattcaactgttttacttctctcttaaatatttgttaaatgctgttttctgcaaatgagctatattatgccatcctttgctatcctgtgcacttgcatatttgctgtgtggcttgttgagtatgtcatatgctcattcttgcaatattcattcatcagaggaggagtacttcagtgaaggtgatgatctggaggaataggcttgttctggttaagttgcctgtggagtggagttgccgtcgctgttccgtagtttgttttagttttgttttccgctgcgtagaatgttgtttttgtttgagaggaactatctacctctgtaataattttattttgcgaatatttaataattatttgtactctattatcaatattgtcattgtgtgcctcggttgattcctggacgagggtttaacacacatgtaagcgtttggaattttggatagaaattccgggcgtgacaagttggtatcagagccaccttgaccttaggataagccaaatggtaaaccttaagtaaccttcaaaatattttggaaaaaaaaaatagaactgctcttctcttttctcttttaaattaactaagttggcagcatatgcaaggttatgcacaaaatttattgaaattcaaattcttttcttttaaaagcaaaaagttgttcttctcgaaatatttttttttctctttaccaaattttattgattggtcggcactgtacatttattatggtatcgaattaatcatgttagcactagtactactgatctttcctatggtgacactgtaccgtgcttataatagatcataattatttcagttttattttaattatttgtcaaaaaaaaatatatttgtttctgtttaaaaagttaaattctaaaaatatattttataaaatagctttgtatgtgtcttttcttctattttcttcctttttggtcaaaaatcagttaaggttagctgcaccaactagacttagctaacttaaaatatgctttaattcttctcttctatgtctctttagatgccgccccgttcaccaagaaatttgatcgaggtgttaggactcgtcagggagctgaggttgatggcttttgaagtaggctatgaagttgctcccgagtatcgccagattccccatgaccccgacgaggagaaatgtcgtgttcgtgtgacattggctagtgatagtgaagatcttccatcttttaagtttgaagctggaggaagatcgtactgccatgcttgtcaagaagtagctttggtggccattggagagttgcgtcaacactttgaagaagaattggattcatcagctttccagtatcatcctcacaagcctcatggtcaagactatggatcttatacctgtcctgatggcgaagagagtgctactctgatgcatgtggtgcatatgcttagtgctatggatacagtaagtgtggagcgagacaaagcagctcatgacagggaaaattggaatcgaggcaagatttgcaagttgaagagcaaggtgcaccgtctacagaaggaattagctgaacttaagggagagatgccgccgccaacatccaagcttcgcctcactgcaagaaagagaacctgtccgccccctcgtctccagttagcttcgaagattcgcgtgatgggtgaagctgtgcccgatcgtgctgaacctgtcatcgacatcataagtgatgaggaagaggaggaagatcctgaagaaagagagccagctactccagaggaagaagattcatcgcttcgttccgacgcaaggtggaagtagtcgtctagttagatcgttgccttagatcgttgtgttagattgtttgcttaagtttgcttgtgagtgtgtgggttttagttgttgcttacatcatgggggggatgtaacagcatgagtctagttctttgcttgtcagagtggtgaggtagtgttaatgcaacttaaatgtaatcctacacagttaagagcaatatagaaatttaaattaattaaataactccgttctaagggtgtctctctgtctttctttccttttgtctctgcttaccgtcagatggtgaacacgcgcactggaagtggaagtggaagtggagctaataacaatgagggagaacctacgctagcccagattttggcccaacaaacacaactgatcaatctgttagtgcagcaggcacagaatcagcagggaaataatcagaaccagaatccaccccctcctccccaaaataagttggcagatttcttacgtgtcagaccccctaccttttccagcacaaccaatccagtagaagcaggagattggctgcatgcggtggagaagaagttggatttgatccagtgtactgagcaggagaaagtttcatttgcttcgcatcaattgcatggacctgctgctgaatggtgggatcattttcgccaaggcagggctggaggagaacctatcacttggcaggagttcacagctgcttttaagaagacgcatataccgtcaggtgttgtagctctaaagaagagagaatttagagcactcaatcagggatctcgttcggtcacagaatacctccatgatttcaaccgtttagcacgctatgctccagaagatgttcgcactgatgaagagcgtcaggagaagtttttggagggactgaatgatgagttgtcttatactttgatgtctacggaatttcgggatttccagcagttggtggacaaggcgattcgtcaggaagacaagtataaccggatggagcagaagaagcgcagggctgctcaatttaaggcacaacagggcagtaatcagaggccgcgactcgttactggacctcaagttccatcgtaccctcaaggaggatcttcatcagttgtccgtccccagcgccagttctacaacaacaatactggtaatcgtggcaatgacaaccgcaatgtggttgctcgtcctgcagcaacttcagttcagaaccagcccgtcaggaaggaacagggaagcaagcccgtgatatgcttcaattgtggtgatcctggacattatgctgataagtgtccgaagcctcggcgtgtgaagaacgttccagcccccgaacaactccaatgttccagcaccgaaggcgcgtgttaatcatgttgcagcagcataagctcagaatgcaccacatgttgttttgggtacgtttcctgttaactctatacccgcaactgtgctttttgattccggtgctacacattcctttttgtataaaagttttgcaagcaaacatgggatggaagttgttagtcttgggagacctttactagttaataccccaggcaaccaagtattttcgacacagtattgtccttctgttaccatagaaatagaagaagttcctttcccgtcctctcttatcttgctagaatccaaagatctagatgttatcctagggatggattggttatctcgtcacagaggagttatagattgtgccaaccgtaaggtgactgtaaccaatagcaatggggaaattgtttctttctttgcatcctctcctaaatctcatggtgtggtcttaaaccaagttactttacaagagattcctatagtgcaagactacccagatgtgtttccggaggatttgccaggtatgccacctaagagagatatagagtttcggatagacttggtacctggaactaacccaatccataagagaccgtacagaatggcagctaatgagttagctgaggtgaagaagcaggtggatgatttgcttcagaaaggatacataagacccagtacttcgccatggggagcgccagtcatctttgtggagaagaaagatcatactcagagaatgtgcgtggattatcgagcgctgaatgaggttactattaagaataagtatccgctacccagaatcgatgatctgtttgatcaattgaaaggtgctacagttttctccaagatagatctccgttctggatatcatcaacttcgaatccgtgaggaagatataccaaagactgccttcacaactcggtatggtttgttcgagtgtactgttatgtcatttggactcactaatgccccagcctttttcatgaatctaatgaataaggtgtttatggaatatctggataagtttgtcgtggtgtttattgatgacattcttatttactccaagacgaaggaagaacatgaagagcatcttcgtctagctttagagaaattacgtgagcatcacttttatgccaagttcagtaaatgtgaattttggttgtccgaagtgaagtttcttggtcatgtcatctcatctggaggagtggcagtagatccaagcaatgtggagtcagtgttaagttggaagcaacccaagacggtttcagaagttcgtagtttccttggacttgcagggtattaccgcaggtttattgagaacttttcaaagatcgccagaccaatgactcgtctgcttcagaaggaagtgaagtataagtggacagaagattgcgagcgaagtttccaagaactgaagaaaaggctagtgtctgcgcccgtattaattttgcctgattcgaggaaaggtttccaagtgtattgtgatgcatctcgactcggtttgggttgtgtgttgatgcaagaaggaaaggtggttgcttatgcatctaggcaattacgtcctcatgagaataactacccaacgcatgacctagaattggccgctgtggtgcatgcattgaagatttggcgtcattatctttatggtaaccgtacggagatatatacggatcataaaagtttgaagtacattttcactcaacctgatttgaacatgcgtcagcgaagatggttagagttgattaaggactatgatatggaaatccattatcatccggggaaagcaaatgttgtagccgatgcccttagcaggaaaagctactgtaatatgtcagaaggtagatgtttaccttgggagttatgccaagaatttgaaaagttaaacttgggaatagtcagcaaaggttttgtggccgctttggaagctaaacctactctgtttgatcaaattagagaagctcaagtgaatgatcctgatatctaggaaataaagaaaaacatgcgaagagttaaagccatcggttttgtagaagatgaacaaggtactgtgtggttaggagaacaattttgtgtcccagaaaataagnagttgaaagatactatcatgaaagaagctcatgaaactttgtattctattcaccctggaagtactaagatgtatcaagacttaaagcaacaattttggtgggctagtatgcgacgtgagatagcagagtatgtggctctatgtgatgtatgtcagcgggtcaaagcagaacatcagaagccagctggtctgttacaactgttgaagattccagagtggaagtgggaagaaatagggatggattttataaccggtttacccagaacgtcgacaggacatgattctatttgggtagtggttgataggttgacaaaagtcgctcatttcataccggtcaaaacaacctatacgggacataagcttgcagagttatatatggccagagtggtatgtttgcatggtgttcctaaaaagatagtgtcagatagaggtagccagtttacttcgaagttttggcagaaattacaatcagaattgggtacccgtttgaatttcagtactgcttatcaccctcaaacagatggtcagacggaaagagtaaaccaaattttagaagatatgttgagagcctgtgttttagatttcggtggaagttgggataagaatttgccgtatgcggaattttcctataacaatagttatcaagctagtttgcaaatgtctccgaatgaagcattatatggtcgaaagtgccgtacgccgcttctttgggatcaaaccggagagcgtcaagtttttgggacagacatattgcgagaggcggaagaaaaagtgaagattatccaagaaaggttgcgcgttgctcagtcgcgtcagaagagctatgccgacaatcgtcgcagggatttggctttcgaagaaggagattatgtgtatcttcgggttacgccgttacgaggagttcatcgtttccaaaccaaagggaaattggcaccgcgttttgtgggaccttttaagatcgtgagtcgaagaggtgaagtagcctatcagttagagttgcctccgtcaatggcgggaatacatgacgtgtttcatgtgtctcagttgaagaagtgtttacgtgtaccaacggaggaaacagatcctgatcgtatagagcttcaagaagatttaacgtatgttgagaagccagtcagaatcttggaagtaagcgagaggaaaaccagga

SEQ ID NO: 28591 - DNA, 616 bp, Oryza sativa
ggagctccggcggtcggcgggcgaagcgaatgggcggacggggtcggcgacaacgcgcttaagccgatggaggtgacgccgagtcgggaggaagcccggagcgacgttggcggcgaaccggaggtcgacggcgacggctgagagagaggtgcacggcgcgagcactaatccgactgcgaaagcgatcggcgagcggcggaaacggaagacggagctcgggggacgattatatagcgtcgggagggggagagcgcggccggagaggaaggaaaccggcgcggagatctcggccgccattgatgacgccggcgaggattgcgggcgcgatttcggacgaatccgagggagagagagaggggaaagaggggggaaagagggagggaatcacggggagtgatttccccctctttattgcgcgcggggacggcgtgatgcggcggattcggcggcggcggcggcgctagggcacgggcgcggcggcgggcgcggcgcgaggagggagatgacatgtgggtcccacccgtcagcgagagtggcgggcgggcccgcctgtcatctgcgcgcgcgcgctgtgagggcctattggccgcgggtgagatgagagagggggagggag

SEQ ID NO: 28592 - DNA, 905 bp, Oryza sativa
tgacggccgggccccacttggcagccgcggggcgcgcccgaagtcgtcctcgccggcacggccgacgggggacggcgctcccgcgccccgatggtcaccgccggcgaccaccggcgcggcggatcggcgcccgagagagcggagaggagaggaaagagaaaggggcggtccccggctcacccggggacgacgaggacggcgaaaacgacggccggagcgaaggaaagcggcggcgcggttcgggacggcgaggacgacggtgctccggcggtcggcgggcgaaacggaggagcggacggggtcgacgacgacacggcgaagccgatgggggtgacgccgagatgggaggaagtccggggcgacggcggcggcgaaccggagctcggcggcgacggcggagagagaggacgacggcgcgagcacgaatccgacggaaagagcgagcggcgagcggcggaaacggaggagggaggcacggggagcgattatatagggttgggagggggagaaagcggccgggcgagggggaaacggccgcgaaagatgcggccgccattgatgccggcgaggtttaggggaaagattccgagcgaatccaagggagagagagcgggaaaagtggggggaaatgtcgagggaatcacggggagtaattccccccacttcaatgcgcgcggggacggcgggatgcggcggattcggcggcggcggcggcgctagggcacgggcgggcggcgggagcggcgggaggacagggatgacaggtgggccccacccgtcagcgagggtggcgggcgggcccgcctgtcaacggcgcgcgcgcggggaggaggccgatgggccgcgggggagaggggagagagggagggagctgggccgagccggcccagtaggggaaggggggg

SEQ ID NO: 28593 - DNA, 3647 bp, Oryza sativa
ggagggaagctgggccgagccggcccagtaggggaagggggggaaagaagactttttaggatttttctttttataaaaccattttaactttgtttatttcttaataattattatttgtgctctgaaaattccactaaaatttgagggctccttttagaccaaggagaatttaacaaaaattccccgggccacatttggatttttcttgtacgtattttagtgtttgccaatttcttttcgaattttaattaattctattattccttttagaaaatgatttttaatttcgggatgaatttatcaggacgtgacaaatccaccccccttacaagaatctcgtccccgagattcgaggaggctagcaggaagataggtcggacggtcttctcttcttgtctgacttcttccgtcgcgtcttctataacgaacttgcctagccaaacttctccactctggactgcttggctcgatctcctgttgcggatggaaccttctcttcacctgacttgaaccagggtgcaccttttagctgactcagactaggttgcggtagtttaatgatgcttccgttccagaacttctcatgattcatatcttcggagtcaacctcatacaagttaccacttcatgtcatgcgtcaacactagcttgtcattactaggataccatgtttgtcatcatgagaataccatgcttgtcatttacttctagcttgccaccaactgcctcatattagctttcctggtctccgggtgctaactacttctgctattcgatgcaagggtcaaccactctaactacaagttatgcttcccaagagaaccaatttatcccacttgacatgctttgacgtcttcccgaatgactttgctgccggacttgttattgcctgatcgtgatcctgccagacctgaagcttcgttgctagaggtgattttaatctgacctctgtagactatcttcgaacatatcacttggttcataactgggaatagctcccacgaacaagcagctcggattcactttctttacattccgtttacttcccattattatcttcaggttgtcctcagttagcattcaacgtattcctttacacctttaaccttgatgtgttctttcccattgggtcatctcccaagacatggcatttcctggtaaccggtgcttgcactttttactccgtgtagcatctgatactgagttgaggatttcactccttgccttcatagaaacacttttacctaggtcatcttgcttacttaatgacaaggtgactgttgcggggcaattactatcaggggtcttccttgagcgatgcagagcatgtttctgtttatcaatcacctttcggcctactttttttcatgctggagaacatctttgccaatctcttttatcgatcatctttcggcttatctctaacaggtggtattctttaatgtggattgcggacgcttctggggacgatgaggtccttcggcttgctgcctttcagtgaaaccttgatgtggttcgtcaaaaagctgcactgactaccttcagggaaatacattgcttgctatctgtatctatgccactagggtttaattgccgatggtcatctttagtgcttcctcgagatggggagcatccaaattgttcttctgccatatcacctttgacccttttctgataccagataaacgaattaccaaccatcgactactacgttctcaaatattgatgtctcctgggtcttcttaactgtttgcaggtatatccgaacttattaatgtagagccatggtgggtaccctcatgggtttcatccaacaatccttatcttgatctgtaaaaggcgtatccaaactcctatccccaactactgtctcattggctttttaacccaacacagtttaattggttttcttttccatcaacaggttggttattaactcgaggttagaacatagttcctctgaaatgagaccctaggtctcctttgacagtaaacaattatacacctaatcccatatcagcatcttctgaaagagtcctcatagaacttgtttttattacacatttctcccatattacaagaatacgaggcactgccttaatcaaaaagggaaggtgcttaacatcggtacattgcatcctcaacatgaatcatccataagcatagcaagctcactgtttatagacatgaatatatttatttattacaggattgctgcaaactttcgattacggtgataagtagcgaactgaaaatcacaaacatggctactcattctgattctgaagaggtatagctggcattgttctagtgactgcatcatccttgattggttctgtgatgatgtgataggactgcatattgctatcattcacaggagaagcttccttctgattgctggttgaagcgaataacggtcttctgcttggtatcgccctcctgaggttgattgccctttgctcggcctggagtaggtcggggagagacacaacttcttccatcgacgacaattctttgctgaggctgtcggtgcagagaatggttggtgctgaagatattattgccatgatttattgcagagttaggtggagcaggaggagcattggtgctgtggatgatatcgtcgaggttgctgttggagctgactagctgatgagacaatcgtagggttgttcgttggatttctgcggtcttggtcaacaacacactgagttggcaatccttgggcacatggtttgtaccttcgcacagaaaacatgtgaccttgcgagtgggacactcccctggtgaatggtcttcttcatagtgagtgcagagtgtgagacacatgctagcaacgtgtccagtttctccacaacgggtgcatgcctttgatccgaagaagacacatctgaaactcttagtccaaacaaatgtctctttggttgatcacttgattttcttcgccatcaagcgctaggttatttgattcataacagattatgagcttacggaaatgagaccctaggtctccctaatcaacaacaaaatatacacaactcacagcacttgcaatcttaacatggatccttcataaacttatcaaactccttcataatctcatgtttctctgttattacatgattgacggggaacaactataaaacataagtatttgaacactgatataagagtattatggttgcttctgactagcgctaggcttaacaggtactgcatttgctccagtgaccacttggcgattggcatgtctgcttccttaacaggtactacagttgtaacagacaataactttcttacgctcgggttcttcatcttgtacttgatttcttggctgctgtgctggaacatccaaagatacaatgccgatactggcctctgtcttgtcaactgatggctggggctgaaattgagcattgacaccttgtggtaatgcactcgctggagttggagctgttgcaacgcgggctataagactgcttcgggatgcatggatgacaattcgctgaggagcaagcttctgattgcagggagttgcgtggactgacgtgctggcaactatgtttctcggttttgggcacttgtcggcgaaatggcccattccttgacaattgaagcaacagatatcttcccggactcggcatttt

SEQ ID NO: 28594 - DNA, 2779 bp, Oryza sativa
agaatatgcatatgagctaatggaaaatgaatccctacaaacctgtgttatctttgctcttacggaatcgtttaaccactgaatatggtaaggatgtggatgtgtatatgtggtcaagccaagcttcctgaccaaatcagaactcaccaaattgttgtagctacatccatcaatgatcatacgtgcacgacggttgttgatgacaaagaaaatctgaaacaaattatggcgttgcaacctctcaggctgctgtacctacatgctgagcacccgctgcacaatgatggtcctgtaggccgttgtgtcatcacgaccaaagacttcgccatcctcatcctcaacttcttcttcctcctcttcctcatcatcttcaacattggaggtggtgatgtagccaacttctgtagcaacatatgcccgttgactagggtaatctttctgcacatgcccaaacccctagcaacggtggcactgaatgcgtcccgtcgaggcgacagatgaggcactcttggcaggtacctgcgaagaacttttacctgactctgctggtcatgggggaggtggttttggtgctgcagaaactccagaagcagctggttgcttgcttgttggtaggggaggtgcccggaaagagacggccttgggcagtcccgcagatggcgtcgtgcgaggagtgtatgtactcgccctgttcttgccctgctactcacgcccctgcaattccttctttgcaagcatagcaaactgaaacaactagttgacagagttaaattccttataatcaactatgttttgaatttccaccctcaaaccagaataaaaacgacaaatggcatcctcgatcctctccactatgccacagcacttcaaacccttttgtagctcaccatagtaatcctgtacagacttatccccttgttctaaacgcatcagtttttttgcgtaaatctctatgataagatggaggaacaaatctattgcgcatagctaccttaagttcttcccaagtagtaggtaaaactcccccgtcagataacccatcccaccacatgatagcaaaatctttgaactcactactggcttgtcgaactctatgttgctcaggcacaaggtggacattaaacttttgttctactatcatctcccaatcaaggtatttctcagcatcataatatcccgaaaaagatggtattttaaacttaaccttagcataaggttcatcgggcacacgattattattaccttgttggtagtggtgagtgccaccgatacctgtgcggtttgtccaagatgatgttgtagtcgtgcttccttgtagcttgtgcattaacattgccactagaatcatacaccgtgtcttcaggatgaccatcatcgttgctgccgctcactttctcaacggaaggttatgtgtctccaacgcaacaacccaatcagttagcatggatatccgcttgtccagcctctccatgtggtttaggaagccaattttattgaaagcatcttggacagcctttgcaacggcctccatcatgtccttttgagcattttcttggaaagttcgtgtaacatcctgaaaattcccgacaataaaaatcacttaaattttgaactttttaaaacttttgcatcatgctggttgttatggttgatattgcttgccgaaatgtaaataatcacaaagaaagcaaatccaaacaaagggaaggttaattactaatttaatttatagatcaaatattaaatattcgaaccatgctgatagcttgatgccatgattagctaaaagaaacagtaaaatcaaatctaaatcatttgaatccaatctcacatgaaatataagaacacatgaaatgatgatcactagtataatgatcgtgtttaaaaataagtaattcaccggaatatatagattgatacttagaacatttcaccgagtccctcatgacatgaaaatcactcatataaaataatggtcatataaataaattaagcattatatataaataagaatatgtgagtgtttaattaaacaattagattaatgttgtaccgagtctcaatttatatttatagaatgactagatccacgtaaaatacattgttatacaaataggttcattcgatgtgctattgcaataataatggccacattaggatattttaattaattttagaaccctcaaagcctccaaaattatctaggttaattttataattagacctcatttaaataatgcaatagaaatatatatatataaataaaatatgggtaatattaaaaattgagtaaactttcatctaaattatcacatctattgggtaaacatcaattgtgtgaaatctagaatttatgggacaagttttaataggaaatatgccctaaaattggataaataggaaaaagtcactgttcattatggcctaggtgctcgatgtggttccatagccctgcccctccactgctgcgccgccctagccggcctcgagccccgcccgtaccggcgccgtcgctatcccgtcgcctgtcgcgtcccaaaacgactctaaaatacatcctcgaaattatgcctagaataattaaaatccgtgtgaaagcctccaacaattaaaatgtgcaaagttaaaagtcaaaaaaaggcttggaggatttttgtatatttcctaaaagcctaaaatgcataaataaattttagtggaattttcagagcacaaattataattaagaagaaataaacaaagttaaaaaggttttataaaaagaaaaaccctaaaaaaa

SEQ ID NO: 28595 - DNA, 6325 bp, Oryza sativa
taaaatttatttacacattttaggcttttaggaaatatacaaaaatcctccaagcctcatttgacttttatctttgcacattttaattgttggaggctttcacatgaattttaattattctttgcacaattttgaggatgtattttagagtcgttttgggacgcgacactccatcacgcccacccttgcctggatgcgtcggctagaggaaagctacactacaagcccagccgttgcccacgctggcttgtggtaagtacgataaattcttccagggcatcccgcgaaccggtccttaactgccatgggtgcgaccagcaaaaccatgcacccacagcccaccatgtgattcattttatttaaccaacaccaaagcggtggtactaatccaacattaccattagaactgacagtctaaacattaatatgattttccccattgtgaactagttgaactaagcatggctaagcaaccctagtcctaactctattcatgttataacccaagctaacaaaggagcgtggtatcaaaatagtatggccgtaacaataggtaaccatcccatagtaatattgcaaaacaaatgcggtatttgaaagaaaacaatagagcatttgcaatataggatcaatatgatcaagtgacaagcatgacttgccttgctctgctgctggaggaacctcggcgactatctcgaagtacaccggagcgtcggaggaaccggaatctagcgacatacaaggcaaacattgcaaacaggctataagactactgaaacagagaacaaaaccatttttaatggattctacacatttttcttgatttactgagacatgaatgggattaaacggagctcggatgaattagttatgatttttagaagattcactgtgtttattactataaaagaaaaaaccttaaatcatttattgcgcaatattaaccagggctggaggagggagacgggcccgactggtgggccccacctgtcggcgaccccgagagaggacgcagcggggcggcctggctgggcctcggcctgcggccggcccagcagggagggggagaaagaaaggagggaatgggccggcggcccattcgaaaaaaaaaggaaaaagagaggaaaaagaaaaagaaaaagaaaaaggattttccctggaattaaaaatattgcttgctcaattttaattggttaaaattatttctagagctctgaaaattccactaaaaatcctgttaatgaatttcgacatatagaactcaagaaaaattccacatgtcaaatccgattattatttgcattactttcttagggttttctcctgatttcacctgcattttcttggggtcatttataaattacaattttggcttggggggaaaacttcggggtgtgacagccacccgcgcccttaggtgcggctgacgcgtgggacccacggcgccggccggtgtgagcccgggtgcgcccggtccaccgtggaccgtggggctgccgcgtgggccccacccccgtggacccggtccgcgcgcccctcccctcggctgacgcaataaatccatttttttaaattaaaatttaaatgaagaaattcgcaaatattcatttaaagagcatataaacttcaaatggccataacttggccatttgaactcggaattggaccgttcaagtctctaatttttccttaagaagtcaagaacccatttttgtgctttgttcctgctggttatatggagtttattagagtaaaagccttttcttttccgttggtcgtgttgacgctgcagcttcggatgatccgctcttcgtggaagttgaagccggcgtttgggaaagcgagcaaggcaagtcacatcatccttgaacatattgaatcccagtttataaaattatgttgctttaaattattgcattatcgctttatttaaattcccacgttatcactgttttatctagccatgcctatttacctttgttatgaccttattattattgttattgttattattaccttgttcaccctagattaaacaaaaccccaactagtggacactctactcatggtaccactagtatgattttaggtagatgcttcgctgtttaattaggtaacattaggtgattttacaactttagactttgggatattctcatcacctggacactatggaattgttggattattgtggaattggattcacacctccccctctgttcaaaatccccaaaatggttttaggctgggctcggggtgcatggttttgatagtagcacctcggccatataaggaccggtcttcgggcctctgttgcaaagcactaccgtacttccacatgtctagtgggtaaggcttagtttgtggctcagtctggctataaacaaaagtacacggatggagatggacgaagtcgggggtcgatggacatctctaggacaaatgaaggctacacgagctgcggcccggtagtcgagatgtcatggcatagggccggtgtcctgctgctaggggctcagtcctgcctacctgtcccgggggtttcggccgtaggtgggattgggtcggtactcttgtctatggctagggtgggttggaaactatgtcacgtctcccgtctgtataccgtggtggtatgtggcacgtggctacacgtgaggaagatgtgtcttgtgggtaaagatgtacacctctgatcagagtttaacctattcgaatagccgcgccctcggttatgggcaagccgagcaatgtacccaagttagtgttttaattcttagaacctgcttaacaactaaaatgtggaatggttggcctgggttggcttgggacgagctgggacccagggtcaggttgccagttcggtctaaatcatcgtcggccttgggttaaggcaggttcgtgtgggttcacggccttgattaataatattgtatagctctaggaccgtatttgcaaaatagctttgagcaactaagtgtcttttaatgctgtttactgcacaccctaaccctttatattgtaactcccttgtactcccttgcattttattctgcacttgtgggtgtgtcttgttgagtacggtggttgtactcagtcttgctcaatttttcccaaacccagaagaggagcctctggaagatgaaggctttggtgtctagctcgtgcctgccgtcaagcgcctgtggtcgtcgccctagtcttccgctgtttcccgtttgtctttgtgtgtgctgggccttcgctgcccatgtaataaattaactatttacgcttccgcttgataaactctgaaatgtatcaactcttggtgtaccttgcctcctgggacaaggaataatacacgcacgtaaggaacgcccgttgggttaattccggtcgtgacaagttggtatcagagcccccttgaccctaggacgagccgtagatcccaagccttagcaatattttcaaaataaaaatcctttgttatttgtgaaaatcctctagtctctctctgtcctgctgcttcatttatcgccaaaatctgacctttaaaatgttgcatttctttttgtttttgtttgtagatggccagcagcatcaaccgtcgtggtctggacctgactggctttgttttggagctgcggggcatgtgtgttgtcctggggtatccgcatggagtggactaccagggcaagcagctcccggagcaggagggtgacgatgcagagccccacgctgcttgggaggttactgcagtgatcctcactggctcacccgagaggacttcgttggcagtcaccgcgggtggagattctttctccgccgcttgccagaacgccgctctcctcgccatcggcactcttcaccagcgctacccggacgagttgcagcactcgccctaccgctaccaccctcgccgcggaggagcccgcgactacgccaccttccgggatgctagctcggaggatgacgctaccatcatgcacctggcgcgcatggtggaggcgtacgacgcggctcgtatcgacttccatcagatggtgcgccgtgggatggtcgagaacaacatgaagatcctggagctgcgtcaggagaatctgcagctgaagaaggacctagacgcagtggaggcgcagctgctgtcacgtcctgataaattcatcccgaaattaaaaatcattctctaaaaggaataatagaattaattaaaattcgaaaagaaattggcaaacactaaaatacgtacaagaaaaattcgaatgtggcccggagaatttttgttaaattctccttggtctaaaatgagccctcaaattttacttgaattttcagagcaccggaaataattattaagcaacaaaaacaattatcaaagtttaataaaaagaaaaacctaaaaataaccctccttcctcctttgggccaattttggcccaaagtcctccctttttcccctcggcccgcggccgaagtctccctctcctccctctccttctctccctcctcctcttgggcctcctcccctcccggcccagctccctcccctcccctctctctcccgggcctcctctccctcctctcctcctgggccgcctcggcttcgcccggcccaagccgagccgcgcctcccgcccgtgccgcgcgcgtgcgcgcgctgacgccgcgcgcccgaccgcatggggcccacgcgccaggccggtcgtccccttcctcccgcccggcccccttcctctctctccctcccgtgcgaaccctagcgccattcctccctcaaatccgcgcgattcaagcatgggattcccaaattgattagggggaattaatcccctttccctcctctctctttcccccttaatttccccttgaatggtgcccccaatcgccgggaacggccgcgccattcccggccgccttccattgccgccggccggcttttccgccgccgttccccgctcctcccgtggccggctccctcccctccgctataaaatgggatcctcatcctccgttctatcgttttaaccccatcccgagactccccgtggtccctagccatctccccgccgtcctcctctctctcccgtgccgccggccgcctccagccgcctctcccacctcgccggagcgccgtccggtcgcgccgtcgcctcctccagcgtcgccgccacctactcttcgccggcctgccctccattttccgcggagacccccggagctgcgttcccgccgtcgcccttccctttcctccgcgtcggccgcctccagccgcctctgtctccctgcctgagcgccggttgacgtcgccaccacctccctcggctccgcgacgccgccctcatccccggcatcacctcctcctcgcccgaatttcgccggaacaccgtcgcccgcgccggcctctccttcctcctcgtcgacgtctcctccggcagccccttccgccgcgcccgtgcatcagccggcgctgccgtcccctccctcggcgtcgccgcatcgccctccaccccggctgctcctcggtttcgccggaacgccgtcgccgcgccggcctctccatcctcttcgtcgcctgcgtcctttcggccgcctcttcctcctccccggctcgtcggcttgccgcaccactaccatcttcggcatcgcagccgcgacgtcgtcctcggcctcgcctcccctccgaccgaacaccgccggtgtccgtcgtcgtcttcaccgttcatcctcgccggctcgccgcctcgcggcgccgccttcgtcgtcggcatcgcagcagtgtgttccacgccatcctcgcctccgtgcagccgctgtcggctgccctcgtcgcctcctcgccggccccggtcgtcgtcgtcgtcgtcctctcgtcgttcccggtcgtcgtggcgttcgtccctccgtcgagccgttctcatccgtcgtccgcatcagtcaagcaagccgctgcagccccgtcctcgtcttcatcctcggctccgcgtcgtcaagcctcgtgccggccgcgtctcgccttcgtccaaggatcgccgccgaagccgtcccctcgccgttcgtctccgttgtgcccgtctgtctccgccgcgcccgttcgtcgttgtcgttcccgcgcctcgtcgcgtggtggtaaggatccctctccctcgctgccccgtcctcgtcctttcggtgtcgcccgtgctcgttgtgcggttgtcggccctggtacccatgtaccggtgtcggtagtcgttcacgcgtgcgggtggtgaccgtgtagtgtccgtgttagtgtgcccgctcggtagccgcgtggtttccacgtgtgcaggccgtgtggtgtctagtggagtccgtttgtcgg

SEQ ID NO: 28596 - DNA, 4956 bp, Oryza sativa
tgcaaagttttattataataatccgcaaatcgccatataccagcattaaacttcggatgatcatatcttggtcatacgaactccgaatcgacccgttcaagtctcttaatgtttgttataacctaaagaaccctgtgctttgtttttatgtattgttattgcttctttataggcttgtagctttgcttgtgtgcttcgcgtagcttctgtcgttccggaggttcccgaagcgtggttcgcggtcgtcgccgaaggttcggaaggccgttctctctgagcaaggcaagtcacatcatccttgagcatattgaatcccagtttataaaattattttaatttaaattaatgcattatcgctttatttaaattcccgcgttatcactgttttatttagccatgcctatttacctttcttatgaccttattattattgctattgttattattaccttgttcaccctaggataaataaaaccccaactagtgggcactctatttatggttccactagtatgaacttaggtagatgcttcgctaattaattaggcaacattaggtggttttataactttagactttgggaaatctcatatcatttggaccctatggaattgttggcttatggtggaattggacatacatctctcttcctctttcaaaacccttaaaacctattttcggtggggtttgggtgcatgccagttgtgggaagtagcaccccggccactataaggattaagctcgggcctctgttgcaaagcactaccgtacttccacatgtctagtgggtaaggcttagtttgtggctcagtctggtcataaacaaaagtacacggatggagatggatgaagtcgggggtcgatggacattctccagggcaaatgaaggctacacgagctgcggcccggtagtcgagatgtcatggcacagggttggtgccctgctgctaggggctcagtcctgcctgcctgtcccgggggttccggccgtaggtgggattgggtcggtactcttgtctatggctaggatgggttggaaactatgtcacgtcttccgtccgtataccgtggtggtatgtggcacgtggttacacgtgaggaagatgtgtcttgtgggtaaagatgtacacctctgatcagagtataatctattcgaatagccgcgccctcggttatgggcaagccgagcaatgtacccaagtcagtgttttaattcttaaaatttgctcaacaactaaaatgtggaatggttggcctgggttggcttgggacgagctgggacccagggtcgggttgccagttcggtctgaatcatcgtaggccttgggttaaggcaggttcgtgtgggttcacggccttgattaataattttgtgtagctctaggatcgtctttataaaatggctttgggcaactaagtgacttttaaatgctgtttactgcaaaacttaacccctatattattatccccttgtacccccccttgcattaattatgcatctccggtgtggtttgctgagtactgtggttgtactcattcttgctcaatctttcccctcttcagtaagagaagctttggagaagatgtcttaggtggagtcctggcttataccccagttgagcgcctgtgaagatggagccgtaggcccgctagtccgctgctgtttatttttgattgccaggcctgaagcgcctttgtaataatgtaaatattatcgatataataaagatgtgccttttgtatcatgtttgtttggtgtaccccggcttttcctgggacggggattaatacactagcgttcgggaaaaggcaattttcccggtcgcgacagaggacgtccaccttcccgcctctcaggaagtggctccaacagcataaaatcatcatgcaataacccatcccacacaagttaagaatttagagtctagccaagtgtaatacacgtcccggtgctcaataaccgcgagcacggctattcgaatagatttggtttactcacactgcagtggatgtacactttacccgcactccgcgactgcccaacacatgagccacgtcccaacacatgagacgcgtcacggcaaagcttttcgataacctcgcattggcagtacccactccatgaacttgaaatcctcatgcactctaggcgtacacggtttctagcagtgagaggagttctggcgctcccgggaagggaaaaacacacacattcctacgttgcttcttgtcgttgaacccagtccctcatgattgttctcttatgggtatcctcatgcagtattgctaagccagcctctgaccatccggaacgggcatccgccattcacctggccatccgaaccgggcatccgccagcagactgcttgccgcatcacacacctagaagaagaccactacgcagggatactgcctccgctcggctatctaatccgctaggtctatacccattcgagaagtacggttgtacggggggcgtttcatgcttaacttcatggctcggtccttaattgaccggggacggtactagccttttccagataccacccaaatcctccgtccgccccagtcgaaaacagttgtttagttttatttctcctttcacaaatcatgtcatcaatatcagggcaatgtggtgctcatgtctccacatgccgcatctcaattaccttcccaaaggtaattgctcaagcatatagcatttgataaatatgagtatgcatgattctagaatagcatttctatgcattcgtcatagttgactagggactcatacgtaaacatggttacgaaggaataaggggtaaacaataatcaaggcatggcataatcgcaagtaggatgttcatcattgcatgcaattttatttgtaaacaaaacaatttcgcaattgggatcaacatgttcaaggaatagtgatgacttgcctgctcaggatagtccttattcttgatacaatcgtgatcaaccttcacctcctggaagctacatacgttgcctcacgactaaccgatatacaaattctataatacgcgagaaaaaccgatattcaaacaacaatcgaatatgtacaaacaaaatatagttgttggggtcgaacctagggttgctcatactactcgtgtttgctaatggattctaatcaagctaagaaataaggtttcttaatctttatgttgtcatcatggtcttttcaggagttaaccaacatagcatttatgggatacatatttggctaatatgtggtttagtctagcaaatggctatatatgcatctatctaaatagaacggttatacactagaggttctgttgccggatggattttggatcggtcaaataattactgtgaatcatttctattattatgaacatattttatttgtcacaataaattatgaaaggttaataattatccatgctctatatgttacacttgtgaggctaataatattatagttacagattatcccatcacataattttacaatgaataatcttaatttacaattgaacttaggttatattaggtcaaggtctataattaggatttatccaccatacatgttcatcatatattctctttaattttaatacgtacaatcaagcaatttaatactacaccgtatagctataatgggttgtgcagtatatatgtgtgcacaatatcttaatattgaatcatttactgaatagttgctatttactataggctatatagtacatgtgattttaagtggatttatgagtgagttaccgtctatcaacttaagggttgatttccaatctaaacatatactattgtataggaaatgccgttaactaacttcatgcgggtgattttagtcacactagctctgttattatctctcataaacatgttattatccctcataaacaagttgaagactcatctacgtgtgttcaaatttagtcacaaagtatgaggctaaacattatttatacaatttggacgtcatgagtataattatattcacatatattaataaatggcactagtatttcctatgctttaattaatttgaaacaatgctcctaattagtttacataggttttatagcgagaaagcatgttaaagacaattatttgacatctactctactgtacaatatcaatcctatttatgagcacatttttaagttaactattatacatcatcttggtattaactatttcctaatttaaatatattttcgtaaatagtgaattatataccattggaaatcttatgaatttagatgaatttaggttcaagtttcactcgaatcggagctaaaacgaataagttacgctagtttaaagattcaaatttgaattaattctaataattgtgaaatggtactgttcctaattcatttatttttaatacaaccttatccacaagctatagtgactgacaggtggggtcttcctagtttcttttcttttattttatttttctttctaaaggaatccatatgggcaaatgacaggtgggcccgactcctttgactagggtcaaaccggccattaaacccggtagggcccgcatgtcatagactcgagaccataaaacttctataattagatttttaaccacccggacccacatgtaatagacacaactaataaagattaagaaggggattactattcaccaattacgtggggcccactctaatctctcttctctattcttctttctctctctctcctctgtttcctctcttctctccctctctcacggccgagcggcacggtgtggctaccagcgacgaagggaggagggagggcttaccggaccggtggcaacggcggcggagacacagcggcgaggtgcggcgcggcggcgacgaggcgccggggcacagcagcggcagcgcggcggcggaatgcggcgtcggtggaggggaagaaaaggggaaaaaggggaggagaggggaaatggcgtgggta

SEQ ID NO: 28597 - DNA, 7618 bp, Oryza sativa
cacgggcttgtcacagcctgattttcgtttaggatttataaattatctaataaattattaatagaatttatattaaatgttctttaatttacaagtgaagttaaatgtgggaaataaaacttcctaaatataaagcatggttggatttaatttttattaaattctccatgattaattatactctctgaaattttctcggattttttcagagctcaattcctaaatgatacaaagaacagtacattaattatttaatcattaatgatctaattataatttttaagagcttttcttgtttaaaaatccttaaattataaattgttgttcaaaaggaattattagaaatgatcttaaaagcctaaaagagaagatctaattttaatttgttaaatctcaatataaaattgggctagataaaattttgttaaatacttctcctgattctttagttcctagatttttctgggatttatttaagccaatcaagtatttttaataaatggaattccatttcatgaataatttaaatagaaaaatgtttttaaatccttcttttggctttgggccgaaaggggcccaaaaccttcctctctctctccccggcccagtcggcccaatcagccagcagccgtccgcacgtgcgctccctttcgctgacaggtggggcccacctgtcggacccgtcgtcaacctcgcgccgtcgcccggccgaaccctagccgagccgcgccaccgtctccttccaaatctgtcacgcccggaaattcactagtaatttccgaacttatttgtgcataaaatcctcgtccaggaatcagccgaggtacacaaactgacaatttaatatacagattcatcaaattaactaatacgataaatacttacttaagaggcacttagtcctcaccatgaagaaaactgcagcggaaaataaaatctagcgaagctccggctccactcccacaggcagctcaactggggtataagccaaacgtctactccttctggatcctttttcttcaactgaggttgattgattattgcaagaatgagcatatgacatactcaacaagccacacagcaaatatgcaagtgcacaaggataccaaatgatggcataatataggctcatttgcaaaagcagcatttagcaaagagttaagagtagtaaaacagtagagtaattaatcagaaattttaatcaacactgaacagcacacccatgctgcacaggcccaaccatcctgaacaaccatacccggctgtacagatctaactacaaaccaggagctaaacaaattattaccagttatagcatcaataattattgtgagaggtgtgagactaatcacgaaaaacattgctcaacccacccataaccgcgggcacggctattcgaatagttttactctggccagaggtgtaccactgtacccacaagacacagcctcaacatcatgtctaccatgcgtcgcgatactggaaagtacccgaatagaggctgtgacaataccctccgcacaacacaactcaccacagtgcaccattcctagatcataatcacccccttataaaacaaggcatggactccccagcgacccccgtgggcttatctccgccacttctcagtctggtgctctgcaatgaaccatgctatacaaaaggtaaagccgttgcccacgctggcttgtggttggcacggttaatgtttcacaacagtagctcgcgaaccggtccttaattgccatgagcacgactctcaaaaccatgtgctcacaacccaccattaatcatattttaattaccaattaattatcataacacgattaaccatcgtgagctaccattaaatataaccataaataataatgtagtacatatgattcatcccattagtgagctaatgtttctaagcatggctaagcaattatatctaacatctagttgaaccaatatatataaagctcaactagtcaaattataatatcccaaggtatcaaggaatagagtaatcaatgcaaacaggccataacaaaggaataggttcacaccacccggtgacattcgaaaataaatgcacagttgaaataaatagagaatttaaatataggatcaacatgctcaaaggattgtgtttaagatctgtgtgacttgccttgcaataatcggtcttcaattaatcttcttgattacttccgacgcactcacgaaccttcacaacgacggaaacgacaagctaacacgccaaaacaaggaaaaagactaataaaaaccaaataaacagtacatataaagtaaacaaacatgtagatcatgattttagatgaatttagagacttgaacggcctcattccgatttcatatgaatttattatgaattttacaagattaaatctaattaaagcccatttaaaaagaattaaataaatttaattcaatttatggataattttaatatgtagatatttattttatataatttttgcaacttgaaccacattaaactaagttacaatgaattagttatgaatttttaaagattaaatcggattaaaacacttatatggattttaattgaattatgacgcaataatgaattattttttaaaaggaaaagaggtttattgcgtcagcggctagggtttgcggtgaaccgggtgcacggcgacggctcacggaaacgaacggccgagatcgatccatccaaaacggacggccgagatcgatcggttcacgacgggtctacgggacagcgacgatgacgtcagcaacgacgtcagcaccggcggcggctcggcaacgcatgctcgccggcgaacggcggctcgacgacgcgaacggagggcaccaacgggtagagggcgacgcggcgaactcaccggtgaccaaaacaacggcggaaaagcaacggacggcgccggcgacgaggaagaaacggcgacggtcttcgggtcgacgacgacggcggtgctccggcggtcttcggcggcggcgaagcggtggacggggacggcgacgacctcgcgaacccgatggtggcgacggcgaccgacgacggctgctgcaacggcagcgcggcgcggctgaaccgatggcaacaacggcgacggctagggctacgcggaggcggcgctagacgcgacggcgggctaaggcaaaggtggcagcagatagaggagagctcgggggtccttttaaaggggcaaggaggcggcggcgaaggcccacggcgaccggcgacgcgaaggaaaggttagggttagaggagagagatgaatccgaatccaactcaaatccaccggtttccaaagaaaattagccgatgtttccaaaagagaaaaagaagaggagatctcaaggatcatttgccctcaatcaatttgaccggaaatagagaggggcgacggaatttggaagggcagcggcggcggctcgggcgcggctcggctagggttcggccgggcgacggcgcgaggttgacgacgggtccgacaggtgggccccacctgtcagcggcaccgagagagagaaggaagcgacggcgggtcgggccgactgggccggggagggagagagaaagagagaggttttgggccgactttcggcccaaagccaaaagagacttttaaaaacctttttcaatttaaattattcatgaaatgcaattccatttattaaaaatacttccttagctcaaataaatcccagaaaaatctaggaattatagaattaagcaaagtatttaacaaaattttatctagcccaattttatattgagatttagcaaattaaaattagatcttctcttttaagcttttaagatcatttctaattattccttttaaacaacaatttataatttaaggattttttaaacaaggaaaagctcttaacaattataattagatcattattgatcaaataattactgaactgttctttgtatcatttaggaattgagctctgaaaaatccgagaaaatttcagagagttgacttaatcatggagaatttaataaaaattaaatccatccatgctttatatttaggaaattttatttcccacatttaacttcacttgtaaattaaagatcatttaatataaattctattattaatttattaaataggttataaatcctgaaacaaaaatcaggatgtgacaaaatccggctgccccattccttctccggccaaatcatttgatgggaaataatctcctcgatctcctcttccttttctattttaaaaacttcggctaatttcgtttggaaaccgacggatttgagctcgattcggatcgacttttctccctccaaccctagctttccatctcgccgccgatcgccgtgggcctccatcgccgctcgctagcccctttataagcatccccgggacctcctcttttcgccgccaccttcgccctagcttgccgccttctctagcgccgcctctgcgttgctctctgcgtcgccgccgccggcgggtgtctagtcggtcgccgtcgtcgcttcggtcatcgccgtctatcgccgtctccttcatcagcatcatgaggtcgtcgccgtttccgtccaccgcttcgccgccgccgaagaccgtcggagcgccgccgactccgtcgccccgaagctctccaccgtcgccgtcggtccagccgcgccgtgccgctgttgcagccgtcgtcttcggtcaccgtcgccaccatcaggatcgcgaggaggagcagcatctcgtccacctctccgttgccgacgtttctcaccgaagcaccgccgtcaccgccgacccgaaggccgccgccgctcagcctcgccgccgtcgtcatccgtcatcgtccgccgccatccaagccactggtgagttcgccgagtcgagctctacccgctggtaccctccgtttgcgccgtctcgccgccgttcgccgtcgagcacgtgctcccgagtcgccgccggtgatgacgtcaccgctgacgtcatcgtcgccatgtcccgtgaaccgcggtagatcaagttgatctcggccgtttgttttggatagggtagatctcggctgtccgttccgtagaccgccgctgtgcacccggtccaccgtgagccaagcccgctgacgcaataatcctcttttccttttcaaaaataattctttattgcgtcataattcaattaaaatccatataaatgttttaatccggtttaatctttaaaaattcataactaattcatcttagctcgggtttagttggttcaagtctctaaagttgtataaaatgatctacatattaaaattatccataaatagaattaaatttattcaattctttttaaatgggctttaattagattaaatcttgtaaaattcatatttaattcatatgaagtcagaatgaggccgttcaagtctcataatacatctaaaattatgatctacatgtttgtttactttatatttattgtttatttggagtttcttagtgttttccttgttttgcatgttagcttgtcgtttccgtcgtttcgaaggtttgtgagagcgccggtagtgttcaagaagattaattgaagaccgattattgcaaggcaagtcacacagatcccaaacacaattcctttgagcatgttgatcctatatttaaattctctatttatttcaactgtgcatttattttcgaatatcaccgggtggtgtgaacttattccgttgttaaggccagtttgcattgattactttattccttgataccttgggtttttataatttgactagttgagctttatatattggttcagctagatgttagacataattgcttagccatgcttagaaacattagcacacaattgggataactaatgcttcactattatttaattatggcttaatgatagcacacgatggtcaatcgtgattggttgattaattaatgtgtcaactaaaacttgataatggtgggttatgagcacatggttttgatggtagtgctcatgacaattaaggaccggttcacgagtttcggttgtgaaacattaaccgtgcccaccacaagctagaatgggcaacggctggacactttgtataacaaggctcactgcggagcaccagactgagaagtggcggagataagcccacgggggtcactggggagtccattcctctggtttttgagggggtgactacgatccaggaacggtgcactgctttgggttgagttatgcgaggggtcttgtcacaatcactcaacatggtgacatgtctggcctggcacggtaacatgctggtgggttgtgtcttgtgggtatagtggtacacctctggccagagtaaaactattcgaatagccgtgcccgcggttatgggcgggtcgaacaatgtctttcgtgattagtcccacactattcattaataataatgtggtaattgatgctaattaatttagctcctggtttggaatggtatattcctggtttggagatagatctgtgcagccgggtatggttgttcaggatggttgggcctgtgcagcatgggtgtgctgttcagtgttgattaatattgatgattaattactctattgttttacaattcttactgtttgctaaatgcttcttttgcaaatgagccctatattatgccattctttggtatccttgtgcacttgcatatttgttgtgtggcttgctaagtatgtcatatgctcaccttgcaataatcaatcaaacctcagttgaagacaagttgcgaaggagaagacgtttggcttataccccagttgagctgtctgtgggagtggagccggagcttcgctagaccgtaattccgctacagttttcttttcttttgtaagtatgtaacgttattatattgatgaatatgtatattaaattgtcagtttgtgtacctcggctgattcctggacgaggatttaatgcacaaattagttcggaaattactagtgaatttccgggcgtgacagggctcaagggcgacggcgacgcgatggagtgcggcgcggcgataggacggcgcgcggcgcggctgtggagtcgacgggacggcgatggcgacggcacgcggcgcgctgatgatgacgacgtgacgcgcggaggggtggggctcgaggcggcggcggcacgcgcggcgcggcagcgggatggcgacggcgacggcgcggcagcggcggtgcgcggctcggagcgacgatgggacgcgtcggtgacggtgcgtggcggcacgggacatgagacgggacgcgtcggcgacggcgcgtggcgacgcgcgataggcggcagcggcgacgcaacggaatgcggcgcggcgcggggcgtgaggcgatgggacggcggcgcggcgacgcgacggcgacagtggcgcggcagcggcgatgtcacgaccggaattaacccaacgggcgttccttacgtgcgtgtattattccttgtcccaggaggcaaggtacaccaagagttgatacatttcagagtttatcaagcggaagcgtaaatagttaatttattacatgggcagcgaaggcccagcacacacaaagacaaacgggaaacaggggaagactagggcgacgaccacaggcgcttgacgggaggcacgagctagacaccaa

SEQ ID NO: 28598 - DNA, 6148 bp, Oryza sativa
tgtgtcttgttgagtacggtggttgaatcagtcctgcttattttcccaagcccagatggaagttccttaaagatgaaggctttgtgtctagctcgtgccagccgtcaagcgcctgtggtcgtcgccctagtcttccactgtttttcgaagtctctgagtgtgctgggccttcgtcgcccatgtaataattttatttacgcttccgcttgttaaactctgaattgtatcaacttttggtgtaccttgcctcctgggacaaggaataatacacgcacgtcaggaacgcctgttgggtgatttccggtcgtgacactcatgaaggcaactaccctacccatgatttggagttagtcgcggtggttcatgctctaaaaatctggcggcactatctcattgggaatcgctgtgaaaaatatactgatcataagagtttgaaatacatcttcatccagtcggatctgaatcttcggcagagaagatggttagagctcatcaaggattatgatgtgggaatccactatcatcccggtaaggccaacgtggtcgccgacgctctaagtcgaaaaagccattgcaacactcttaacgtccgtggcattccatccgaacttaatcaacagatggaagccctgaacctaagcatagttggtcgcggattcttggctgcgttggaagccaagcctaccttgctcgatcaaatccgcgaggctcagaagaatgatccggacatgcgtggactcctcaagaatatgaaacagggtaaagccgctggtttcacagaggatgaacacggcaccctatggaacggaaatcgggtatgcgttccagataacagagaacttaaacagctgatacttcaggaagctcacgaaagtccttattccatccaccctggcagtacgaagatgtacttagacttgaaggagaaatactggtgggttagtatgaagcgggaaattgcagagttcgtggccctttgtgatgtgtgccagcgtgtcaaggcaaagcaccaacgaccagccggacttctccaacctcttcaagtaccagaatggaaatgggatgaaattgggatggatttcatcaccggacttccaaaaacccaaggtggatatgattctatatgggtagttgtggaccgattaaccaaggtagctcggtttattcctgtgaagaccacctatggagggaacaaactagccgagctctagttcgctaggatcgtgagtctccatggcgttcctaagaaaattgtatccgataggggaagccaattcacctctcacttttggaagaagctccaagaagagctgggtacccgattaaatttcagcaccgcgtatcacccgcagacagatggacagatgtcacatcctgattttcgtttcaggatttataagttatttaataaattattattagaatttatattaaatgttcattaatttacaagtgaagttaaatgtgggaaataaaattttctaaatataaagcatggatggatttaatttgtattaaattctccatagttaattatactctctggaattttctcggatttttcggagctcaattgttaattttaaatcatacaaagaaaagttcagcaattatttaaatattaaattaatcattaaatgacctaattataattgttaagagtttttcttgtttaaaatccttaaattataaattgttgtttaaaaggaattattagaaatgattttaaaagtttaaaagagaagatcttttcttttaatttgctaaatctcaatataaaattgggttagataaaattttattaaatactttacttgttcctctattttctagaatttgctgggaattatttgagcaagggaagtatttttaataaatgaaacatcatttcacgaattattttaattgaaaaagttttaaaaaccttcctttaagtcgttgggccgaattcggcccaactcttcttttcctcgcgcggacgaaccggcccaagccggcccagccgacgccgccctcccctcctcctcgggtcaccgacatgtgggacccacatgtcgggcctttcttcctcctccagccgccggccaggccgagcccgagtcagccgaccgagcccttttccgcctccgattccgccccgatccctcatctccgagtccgattgttatgggggttttgatcctctcgttctcctctatctttcccttcaagaatcgaagcaaatggttgagtatcttgcccgaatcaaactcgttttcgagtttatctccaaaaccgagttttgattttcttggatcgattcctctcgtttggagctcaaactcttcaatccaatgctataaatagcttcacctcgtcgctctctttcgtttgccctctctctcgtggtctcccgtgcctcttagctgccgcgccgcgtcgccctagccgccgccgtcgccggtcgtcgtccagccgctccgcgccgccgtttgcgccgtcgccgccgcttgccgccgtcgcctttaggtgcgctagggtgaagggaaccttggccgcccgtcccccttcgccgccgaccaccggagctcgccgccgacgtccaacccgagctgccgccatcgtccttctcgtcgccggccgtcatccgtcgtcgttcgtcgcgttggagagtaccgttgggttcgcctcgtcatcctctacgcgtaggtgccctccttttccccggccaaggcccctagctccggcgaggtggtcgccttagccggccggccatggatgacgtcatgctgacgtcatcatcctcttttcctttctttttcccttcttcttttaatagtttaaatctttggaaaatcatatctaaataaccgtagatccgttttaggtggttcaagttgctaaatttttctaaaataaagatctacatattaaaattgtccataaattgaattaaatttatttaattctttttaaatgggctttaattagatttaattttgtaaaattcataataaattcgtttgaagtcagattgaggccgttcaagtctcataattcatctaaaattatgatctacatgtttgtttactttttatgtactgttcatttggtttttattagtctttttcttccttttgcgtgttagcttgtcgtttccgtcgttgcaaaggttcgtgagtgcgtcggaagtgatcaagaagattaattgaagaccgattattgcaaggcaagtcacacagatcctaaacacaatcctttgagcatgttgatcctatatttaaattctctatttatttcaactgtgcatttattttcaaatgtcactgggtggtgtgaacctattcctttgttatggccaatttgcattgaatgccttattccttgatgccttgggtaataaattgattagcttgaaccttatgtattggtttggttcagctaaatgtcatatatatatatataattgcttagcaatgcttagaaacattagctcattaatgggatgaattatatacactacattattattatggttatatttaatggtagttcacgatggttaatcgtgtgatgttaatgaattgataattaaaacctggttaaggtgggttgtgagcatatggttttgatggttgtgctcatgacaattaaggaccggttcgcgagctactgttgtgaaacattaaccgtgccaaccacaagccagcgtgggcaacggctttatctcttgtatagcatgattcattatagtgtgccagactgtgaagtggcgagaagtccatgggggtcgctggggagtccatgcctctggttgtagagggggtgattatgatccaggaatggtgcattgtggtgagttgtgttatgcaggggataatgtcacagcctctattcgggtactttccagtatcgcgacgcatggttgacatgatgttgaggttgtgtcttgtgggtatagtggtacacctctggccagagtaaaactattcgaatagccgtgcccgcggttatgggcgagttgagcaatgtttttcgtgattagtctcacacctctcacaataatcattgatgattaactggtaataatttgcttagctcctggtttggagttagatatgttcagccgggtatggttgttcaggaaggttgggcctgtgcagcatgggtgtgctgttcagtgttgattaaaatttctgattatttactctgctgttttactcctcttaaatgttttgctaaatgctgctttttgcaaatgagcctatattataccatcttttggaatctttgtgcacttgcatatttgctgtgtggcttgttgagtatgtcatatgctcattcttgcaataatcaatcaacttcagttgaagaaaaagaatccaggaggagaagacgtttggcttacaccccagttgagctgcctgtgggagtggagccggagcttcgctagattttattttccgctgcagttttcttcttggtgaggactaagtgcctcttaagtaagtatttatcgttttagttaatttgatgaatctgtatattaaattgtcagtttgtgtacctcggctgattcctggacgaggattttatgcacaaataagttcggaaattaatagtgaatttccgggcgtgacaacagaccgagcgtctaaatcagatcctagaagatatgcttcgcgcatgtgtcctagatttcgggaagacctgggataagagtctcccctatgccgagttctcctacaataacaactaccaagccagcatacaaatggcaccttatgaagcgttgtatgggcgcaaatgccggacaccgctattgtgggatcaagttggggaaagccaagtgttcgggactgatatactgagagaagctgaagcgaaggtcagaaccatttgggataatctaaaggtggcacagtcccggcagaaaagttatgcagataaccgtcgccgtaacctggaattcgcagtggacgattttgtgtaccttcgggtcacgccattgcgaggtgtacacaggtttcagacgaaaggaaagctcgcacctcggttcgtcggtcctttccgtatcattgctcggcgcggagaagtcgcttaccagttggagctgcccgcctccttgggcaacgtgcatgatgtgttccatgtgtcgcaactcaagaaatgtcttcgagtgctatccgagcaggccgactcagagcaaattgaagttcgcgaagacttgacctacgtggagaggccagtgaaaatcctggacaccatggagcgcaagactaggaaccgggtaatccgtttttgcaaggtccaatggagcaaccacgccgaggaagaagctacctgggagcgtgaagacgagctgaaggcagcccatcccgatcacttcgccagttcttccgaatctcggggtcgagattccgtttaaggggggtaggtttgtcgcgtcccaaaacgactctaaaatacatcctcgaaattatgcctagaataattaaaatccgtgtgaaagcctccaacaattaaaatgtgcaaagttaaaagtcaaaaaaaggcttggaggatttttgtatatttcctaaaagcctaaaatgcataaataaattttagtggaattttcagagcacaaataataattaagaagaaataaacaaagttaaaaaggttttataaaaagaaaaaccctaaaaaaagttccctttccctccccctctccctcttgggccggtccggcccagctccctccccctccctctcctctccccgcggcccatccggcctctccccgcgcgcgcgccgctgacgggcgggcccgcccgccaccctcgctgacgggtggggcccacccgtcatccccttcctcccgccgctcccgccgcctcgcccgtgccctagcgccgccgccgccgcgaatcccgccgcctcccgccgtccacgcgcgcaataaagtggggggaaatattccccgtgattccctccctctttccccccatttttctctccctctctccctcggattcgtttggaaacctctcccctaacctcgccggcgccatcaatggcggccggatcttccgcgcccgttttgtcgcgaccgggaaaattgccttttcccgaacgctagtgtattaatccccgtcccaggaaaagccggggtacaccacacaaa

SEQ ID NO: 28599 - DNA, 8403 bp, Oryza sativa
cttgaggcatcaatgtcctgacttatgaccttattgcctttcttattgtcagccatctgttgcaaagatttggagagggagagagggaaaacaaaggggagagacagattagaaactaaggataggaccttaacagatctaagtcttttgctgttatgatgtatgttaggcttattctgcaagttgattaagcaaacaacctagcatggttacatcaccacccaccgatgcaaaccacgcgctacacacacaagcaaggaaacacacgactaacaacactaccctatagggcggcttaggttctgcgacgggttttccaagatcttcactcctgcttcacagctggcttcactacttcctgcacttcgctagcggatcctgcagtcttccggagcttcgggaaacaactgacgacatcttcttcttcgcaaagctgaccatctagtacttagttgaaatccgaagaaagaaaagagtaagccttttgcaaatagcattaggggaaggagaaaaagaggaactttcgcaaataattttacttataaaatatgtccttaggttttatccatttggcttatcctacagtcgagatggctctgataccagcttgtcgcgaccgggaaaattgccttttcccgaacgctagtgtattaatccccgtcccaggaaaagccggggtacaccacacaaacatgatataaaagacacatctttattatatcgataatatttacattattacaaaggcacttaaggcctgacaatcaaaaataaacagcagcggactagcgggcctatggctccatcttcacaggcgctcaactggggtataagccaggactccacctaagacttcttctccaaagcttctcttactgaagaggggaaagattgagcaagaatgagtacaaccacagtactcagcaagccacaccggcggatgcatgattaatgcaaggggtgtgcaaggggtaataacatagaggttaagctttgcagtaaacagcatttaaagacatttagttgctcaaagccactttgtaaacgcgatcctagaacgctacaaggttattaatcaaggccgtgaacccacacgaacctgccttaacccaaggcctatgatgattcagaccgaactggcaacccgaccctgggtcccagctcgtcctaagccaacccaggccaaccattccatattttagttgttaagcaagttttaagaattaaaacactaacttgggtacattgctcggcttgcccataaccgagggctcggctattcgaatagattatactctgatcagaggtgtacatctttacccacaagacacatcttcctcacgtgtaaccacgtgccacataccaccacggtatacggacggaagacgtgacatagtttccaacccatcctagccttagacaagagtaccgacccaatcccgcctacggccggaacaccgggacaggcaggcagaactgagcccctagcagcagggcaccaaccctctgccgtatgacatctcgactaccgggccgcagctcgtgtagccttcatttgccctggagaatgtccatcgacccccgacttcatccatctccaatccgtgtacttttgtttatgactagactgagccacaaactaagccttacccactagacatgtggaagtacggtagtgctttgcaacagaggcccgaagaccggtccttatacggccgaggtgctaccatcaaaaccatgcaccccgtgcccagcctaaaaccattttaggggattttgaatagagggggcggtgtgaagccaattccacaataatccaacaattccaaagtgtccaagtgatatgaatatctcccaaagtctatagttgtaaaaccacctaatgttacctaattaaaagcgaagcatctacctaaaatcatactagtgataccacgagtagagtgtccactagttggggttttgtttattctagggtgaacaaggtaataataacaataacaacaatgataaggtcataacaaaggtaaataggcaaggctaaataaaacagtgataacgcgggaatttaaataaagcgataatgcaataatttaaatcaacataattttataaactgggattcaatatgatcaagatgatgtgtcttgccttgctcgctttcccaaacgccggcttcaacttccacgaagagcggatcttccgaagctgcagcgtctacacgaccaacggaaaagaaaaaggcttttactctaataaactccacataacagcagaaacaaagcacaaaaatgggttcttgacttcttaaggaaaaattagagacttgaacggtccaattccgagttcaaatggccaagatatggccatttgaagtttatatgttctttaaatggatatttgcgaatttcttcatttaaattttaattaaaaatctcatttattgcgtcagccgagggagcggggcgcgcggaccgggtccacgggaagtggggcccacgcgtcagccgctcggtccacggtggaccgggcgcacgcggctggcggcggtcggcgccgtgggtcccgcgcgttagccgcacccgcgggcgcgggcggctgacggccgggcccacttggcagccgcgagggcacgcccgagggcggcctcgccggcgcggccgacgggagcggcgcgcccgcgccccgatggtcaccgccggcgaccaccggcgcggcggagcggcgcccgagagagaggagggaagggggaaggcgaacggcggtcctcggctcaccccgggacaacgacgacgacgagaacggcggtcggagcggaggaagacggcggcgcggctcgggatgacgatggcgacggcgctccgacggtcggcgggcgaagcggagcggcggacggggtcggcaaccactcggcgaagccgatggaggtggcgccgagtcgggaggaggtccggagcggtgcgcccggcggaacggagttcggcggcacggcggagagagaggagcacggcgcgagcacgaatccgacggcgagagcaagcggcgaacggcggaaatggaggagggaggcacggggagcaaatatatagcgccgagagggggagagcgcggccggggagagaggaaaccgcgcgcggagatctcgggcgccattgaagacgccggcgaacttcgcgggatgaatccggacgaatccgagggagagagagagggaaaagagggggaatcgggagagggaaacgtggggagtaattcccccctcattaaggcgcgcggggaaggcgggatgcggcggaatccgcggcggcggcggcgctagggcacgggcgggcggcgggcgcggcgcgaggagggagatgacaggtgggccccacccgtcagcgagagtggcgggcgggcccgcctgtcagcggcgcgcgcgcgcggggggagccgatgggccgcgggagaggagagagagagggagagggagaagtgggccgagccggcccaagaaggaaggggggaaaagaggacttcttttagggtttttctttttataaacctttttaactttgtttatttcttttcaattattatttgtgctctgaaaattccactaaaatttgagggctccttttagaccaaggagaatttaacaaaaattctccgggccatatttgaatttttcttgtacgtattttaatgtttgccaatttcttttcgaattttaattaattctattattccttttagagaatgatttttatttcgggatgaatttatcaggacgtgacaaatccaccccccttacaagaatctcgtccccgagattcgaggaggctagcaagaagataggttgggcggtcttctcttcttgtctgacttcttccgctctgtcttctataacaaacttgtctaactaaacttctccactctggactgcttggctcgatctcctgttgcagatgaaatcttctcttcacccgacttgtccctggttgcacctttaactgactcagactaggctgcggtggttgaggatggggcttcagttctagaacttcttatcattcatatctttggcgtcaacctcatacaagttaccaccttcgtgacatgcgtcaacactagcttgtcattactaggataccatgcttgtcatttgcttctaactcgccaccaactgcctcatattagctttcctggtctccgggtgatagctacttctgctatttgatgcaagggtcgataactttgcctttgaattatgcttcccaagagaaccaacttatcccacttgatatactttgacgtcttcccgaatgactttgctgctggacttgttattgtctgatcgtggtcctgccagacctgaagcttcgttgttggaggtgattttaatctgacctctgtagactatcttcgatcatatcacttggttcataactgggaatagctcccacgaacaagcaacgcagatttactttctttatgttcagtttactttccgctattctcttcatgttgtcatcatttagcattcaacgtattcctgtgcaccttccgccttgatgtgttctttcccattagatcatctcccaagacatggcgtcgcctggtaaccggggcttgcacttttcactccgtgtagcatctgataccgagttgaagatttcactccttgccttcatagaaacacttttacctaggtcatcttgcttacttaatgacaaggtgacttgttgtgggggggcaattactatcaggggtcttctttgagcgatgcagagcatgtttatgtttatcaatcacctttcggcctacttctttcatgctagagaacatctttgccaatctcttttatcaatcatctttcggcttatctctaacagggagtattctttaatgtggattgcggacgcttctggggatgatgaggtcctttggcttgctgcctttcggtgaaaccttgatgtggttcgtcaaaaagctgcactgactaccttcagggaaatacattgcttgctatctgtatctatgccactaaggtttaattgccgatggtcatctttagtgctccctcgagatggggagcatccatattgtccttctgccctatcacctttgacccttttctgatacctgatagactaattaccaaccatcgactatcatgttctcaaatattgatgtctcctggatcttcttaactgtttgcaggtatatccgaacttatcaatgtagaggcatggcgggtacccttatgggtttcatccaacaatccttatcttgatttgtaaaagcgtatccaaactcttatccccaactactgtctcattagctttttaacccaacacagtttaattggttttcttttccatcaacaggttggttattaactcgaggttagaatatagttcctctgacacgagaccctaggtctccttcgtcagtaaacaattatacacatgatcacatatccgcatcttccaaacgaatcctcttagaacttgtttttattacaaatttctcccatattacatgaatacaaggcactgccttaaacaaaaagggaaggtgcttaacatcggtacattgcatcctcaacatgaatcttccataatcataacaaactcattgtttataatcatgaatatatttatttattacatgactgctgcaaactcccgattacagtgataagtagcgaactgaaaatcacaaacatggatacctagctggcattgttctagtgactgcatccttgatcggttctgtgatgatgtgataggactgcatattgctatcattcacaggagaagtttccttctgattgctggttgaggcgaataacggtcttctgcttggtatcgccctccggaggtcgattgccctttgcttggcctggagtaggtcggggagagacacaacttcttccatcgacgacaattctttgctggggctgaaagtgagcattgacaccttgtggtaatgcactcgctggagttggagctgttgcaacgcgggccataggactgctttgggatgcatggatgacaattcgctgaggagcaagcttctgattgcagggagttgcgtggactgacgtgctggcagctatgtttctcggttttgggcacttgtcggcgaaatgacccattccttgacaattgaagcaacagatatcttcccggactcggcattttcttttctcattttgattcctctgtcctggcactggagttaggctgaaaccgtaatcttggcgaggattggtgttgccttgatgcttctctccgttggaactggcgggttggttagccatcttcttcgtcagcagaaaactgaattgacaatcttttggtacatgatcagtcccttcacaaaagaaacaagtgatcctgctcgttggacacctgtcgggtggatggtcttcctcgcaatgaacgcatatagtggcacacgagctggcgacatgaccgatttctccacaacgagagcatgccttacgttccatttcatcttcatcatctgaggagacttgatctgaatcttcactatcagacactctacctccattagctaaaagatgctctgtcaactgtggtgcacctcggaaggtatttcttctctgacgttttgtcattcctggtggaggccattccgtgctggtaatgatcatcttacggacttcatcttcggttcgcattggtgtttttcttttctgctgaggacactcccttgcatagtgcccttgctcatcacacataaaacaaatgatacttgcttcttttgagtcaacatgtggcacgtcaccatgggtccttcgggatgttggcggcatgctgacttgtggtgtgagtgcttggactgcctccaactgcacttgaggttgtatctgactcaggttcagaattggcgtctgatgctgctgtagtatctctataagcaatcggttctggttaatcaggtgttggaccagtgtcacacaactggtgtctggtgcttcattcactcgggagcttgaggtaccaatgtcctgacttctgaccttattgcctttctcattgtcagccatctgttgcaaaggtttggagagggagagagggaaaacaaaggggagagacagattagaaactaaggataggaccttaacagatctaggtcttttgctgttatgatgtatgttaggcttattctgcaagttgattaagcaaacaacctagcatggttacatcacaccccactgatgcaaaccacgcgctacacacacaagcaaggaaacacacgactaatgactctaccctagagggtggcttaggtcctgtgacgggttctcaagatcttcactcctgcttcacagctggcttcactgcttcctccacttcgctagcggatcctgcagtcttccggagcttcggcaaacaactgacgatgtcttcttcttcactgacctgaccatctagtactagttgaaatccgaagaaggaagaagggagtaaaccttttgcaaatagcattaggggaaggagaaaaaaggaactttcgcaaatagttttatttataaaatatgtccttaggttttatccacttggcttatcctacagtcgagatggctctgataccagcttgtcgcgaccgggaaaattgccttttcccgaacgctagtgtattaatccccgtcccaggaaaagccggggtacaccaaacaaacatgatacaaaaggcacatctttattatatcgataatatttacattattacaaaggcgcttcaggcctgacaatcaaaaataaacagcagcgaactagcgggcctacggctccatcttcacaggcgctcaactggggtataagccaggactccacctaagacatcttctccacagcttctcttactgaagaggggaaagattgagcaagaatgagtacaaccacagtactcagcgagccacaccggagatgcataattaatgcaaggggggtacaaggggataataatataggggttaagttttgcagaaagcagcatttaaaagtcacttagttgcccaaagccattttataaagacgatcctagagctacacaaaattattaaacaaggccgtgaaccctcacgaacctgccttaacccaaggcctacgatgattcagaccgaactggcaacccgaccctgggtcccagctcgtcccaagccaacccaggccaaccattccacattttagttgttgagcaaaatttaaagaataaaacactgacttgggtacattgctcggcttgcccataaccgaaggcgcggctattcgaatagattatactctgatcagaggtgtacatctttacccacaagacacatcttcctcacgtgtaaccacgtgccacataccaccacggtatacggacggaagacgtgacatagtt

SEQ ID NO: 28600 - DNA, 972 bp, Oryza sativa
tccccctcgtccggccgttctctccccctcccaaccctatataaaccctccccgtgcctccctccaccgtttccgccactcgccgccctctcttcccgtcggaatcgagctcgcgccgtcgctctctctctccgccgtcgccgccgagctccggtccaccgccgtcgtcgccccggaccaccttcccccacggcgtcgcctccttcggcttcgccgcatcctcgccgacctcgtccacctctccgtttcggtcgccgaccgccggagcaccgtcaaccccgtccacccgagccgcgccgccgccttcctccgctccggtcgccgtttccgtcgtcgccgtcgacccggggtgagccgtggaccgccgcttcgtttccccctttccctcccctctctcgggcgccgctccgacgtgcctatggccgccgctggcgaccataggggcgcgggcgcgccgcctcccgccggccgcgccgccgtggccgccttcgggcgcaccgagcggctgccgcgtggggcccggctgtcagccgctgtcacgcccagaaattcccgaataggattccaagcagaatgtgcattaaaacccccgtccaggaccggcgggggtacacaaacggctatgttgacattcagatccacgtcttacaaacatcataaagtcttacagaaatgcaccggaaaccaaaaaaaactggagcttaaccttgacttgaattgcagcgggaacacccctccacaggcatccttgatggcacgaagcaagcctactctcggagaacccgccatcggacacatactcaagctcttggatcggggggaaataaaaccaggcttaggactaccccctggactcagcaagtcataccggaataggggtatgatgcagggagttatcaaagaagagctaaagtggttcatttgcataaagcgagcatttataaacagagattgaaagattaaatgatgaag

SEQ ID NO: 28601 - DNA, 1552 bp, Oryza sativa
tgctgagtactgtggttgtactcattcttgctcaatctttcccctcttcagtaagagaagctttggagaagatgtcttaggtggagtcctggcttataccccagttgagcgcctgtgaagatggagccgtaggcccgctagtccgctgctgtttatttttgattgtcaggcctgaagcgcctttgtaataatataaatattatcgaaataataaagatgtgtcttttatatcatgtttgtgtggtgtaccccggcttttcctgggacggggattaatacactcgcgttcgggaaaaggcaattttcccggtcgcgacagcagcatcagctcaagatcgcccagggagaggtctgtcgccccaagcgccgccgcgtctgccgcagccagaagatcaccgcccgcaagagtacctccaggcccgagcttgttcgccagtccttggcatggacctgcttcgtggagaccccttgtgccgagcccgcgcccgtggttcctcaggagggggaagcctccggcgttggtagcacggaggatgcgctgctgctcaccttccgtcctggcccatcgcagcggtagacgagcagttagtaggcttgcgcgtgtgttctttcttgtttgtcttcttgttggagtcgtgtggggcatggttatgccggtgtgtggtataactgtgtcggagcctgtctttattttatttgcctaagcaacttgaactttaatgaaccaatttaatagcagtaataaattcaagaattatggtagtcgtgggtggctagctttaattgtcagctctctctgtttgctggttctgtgtggggttttcagatggtgacgaccaggaaaagtgctgctaccggtgaaggcagccaacccgaaggcagcaaccacaacaaccagggcagcccacctccacctccttcttcgcctccaccaccaccaccagacaccaacgccattctcacccaaatcctcgcccagcaggccaacatgatggctgctttcctccaccacatccaaaatccgccacaacataatgctccaccaccacccccacaacactctaaactcgccgagttcctccgcatccgtccaccaaaattctctaactccaataaccctgtggatgcgttggattggttgcatgccgtggggaaaaagttagacaccgtgcagtgcagcgatgaggagaaagtcgtctttgccgcccaccagctgcaggggcccgcatctctatggtgggaccatttccaggctacgcagccagaggggcagcctattacttgggcccgcttcaccgccgctttccggaggacccatgtgcccgccggagtcatggcccttaagaaaagggaattccgagagttgaagcaaggcaaccgctccgtgatggagtatttgcatgagttcaacaacctggcccggtacgccccggaggatgtacgggaagatgaggaaaagcacgagaagttcttggctggaatggatcctcagctgttcgtccgtctagtcttcggtgactattccgatttccaacgtctggtggacaagagc

SEQ ID NO: 28602 - DNA, 1325 bp, Oryza sativa
gcacaaggccttggggtcgcccaagccccgcttggcgaatttccacattcaccgggaggctaaccaaaggatccgctacccgaatccctttccagaaggatcgtcctcgcagcagcaacagcagcagcaacctcgctccgcgccccgacttcatttcgtggtgcgcgtcccgcagccgcagcacaagcagagccagcaagggacccgtgcgccccgtcctcttacgccagccgcgcagtctggtcaaggccgcagggacgttcaaggtccgcagcgtttgtgcttcacctgcttcgagcctgggcactttgcggataaatgcccaaagcagaggcgccagcaaggccaagcgcctccccgctccaacaatggtggtaaggatgtcattcggggtcgtgtgaaccacgtgacggccgaggacgtgctgacaactccagacgtcatcgttggtacgttcctcattcattccatccctgctaccattttgttcgactctggagcttcccactcgtttatatctgtgccattcgtggggagaaatcagttgggggtagaaaggcttaggaaccctctcctcatcaccacccctggaggggttatgacagcaaagtattatagccctgctgttcctatagaaattcagggaattccttttccctcggatctgtgtcacgcccggaatttctatccaaaattccaaacgcttacatgtgtgttaaaccctcgtccaggaatcaaccgaggcacacaatgacaatattgataatagagtacaaataattattaaatattcgcaaaataaaattattacagaggtagatagttcctctcaaacaaaaacaacattctacgcagcggaaaacaaaactaaaacaaactacggaacagcgacggcaactccactccacaggcaacttaaccagaacaagcctattcctccagatcatcaccttcactgaagtactcctcctctgatgaatgaatattgcaagaatgagcatatgacatactcaacaagccacacagcaaatatgcaagtgcacaggatagcaaaggatggcataatatagctcatttgcagaaaacagcatttaacaaatatttaagagagaagtaaaacagttgaataattaatcaatattaaataaacaccatacaacacacccgtgttgcataggcccaaccacatttgatcaaccaaccccagttgaacaaattaaccctccataccaggaattaaccattccaaaccaggaaataaattaattactacattattaccattaatgagaagtgtgagactaatcacgaaaaacattgctcaa

SEQ ID NO: 28603 - DNA, 585 bp, Oryza sativa
gccctctctccccgccggaatcgagctcgcgccgtcgctctctctctccgccgttgccgccgagctccggtccgccgccgtcgtcgccccggaccaccttccccctcggcgtcgcctccttcggcttcgccgcatcctcgccgacctcgtccacctctccgtttcggtcgccgaccgccggagcaccgtcgaccccgtccacccgagccgcaccgccgccttcctccgctccggtcgccgtttccgtcgtcgccgtcgacccggggtgagccgtggaccgccgcttcgtttccccctttccctcccctctctcgggcgccgctccgccgtgcctatggccgccgccggcgaccataggggcacgggcgcgccgcctcccgccggccgagcggctgccgcgtggggcccggctgtcagccgcccgcgcccttaggtgcggctgacgcgtgggacccacagcgccggtcggtgtgagcccgggtgcgcccggtccaccgtggaccgtggggctgccgcgtgggccccacccccgtggacccggtccgcgcgcccctcccctcggctgacgcaataaatccatttttt

SEQ ID NO: 28604 - DNA, 1334 bp, Oryza sativa
aatgtttcaggacaaatcctctctatcctagcctatcctttgcttggtgtccttggatgaaccggaggaagaattaatcacacacgttcccttggattcgatacccttggaatactccgtagaggaaatgttacatcggtatatccgtgcgcttgcggattctatctgtgatcataagaaatatcaacagggccctgtaccacttggctccactgccgcacgtgtttgttcccatggattttcacaagtgctgccgcaacctcccagagctccatcgagcactcctcccacatgagagggtgtagagagagagagagaggggaagatggaggaaaaaagtgtggtatgggtcccaacgtattttttttgactagaatgcggaatgccatgttagcgaaaaccaccacgatactacgaggggcttgatttacaccgataatgatagttaggggatactctataccgagtgttgcggttgatgggcatgaatgaaactcgaccaatagttgagggatgataagtggactttttttttgcggggaggagcaagagatatattactcaaccaacagatccttactgatatgctgagaaataaagctacaagaatcgcctaaccaaaaacttgagggctggtcagtgcgagctttatgagccaacatatgattaatttggttttgggatctctgtatcttctttataacaatttccctctcaccaagtatcaggcatttgatctccccgaagatatgcaatctttcctttgtcgtatacgcctccgtcaagaacaatatcattagagcaatgtgatgagcacccaacaacgagtaccctaatttatccccctctttcacggtaccaaataaaacagctatcaaattaattcagaaaatatgatgacgatataccaaagcactcagaatctaatccacccgtgctttcacacacgaatagaagaggaggcacacacatgtaccaagcaacaaaaccaggtaagacttcctgatcttgtttcttctccaaccaatcagttatcaggcggcaaaatattcagatagaagctgatgggatcgccaccagctagttcggcagggaccaaaccctaaacatgaactttaggaaaaccaatctgcctcctgttgctaatacctaacatatatgtatacgtgcatgcaagcactagtactggacccaacacaggctcgcaggcccagaccaacaccgactgcaactcaataaacaaattaatatagtgactaaataggcctttacaaaccaggtccaacatatattaaaataatgtggccatgacccctcatgaccttggctaatta

SEQ ID NO: 28605 - DNA, 1355 bp, Oryza sativa
gaatataacgtggtggagaaagctttcgtgtagacaaggataaagcatacaccaagtctaaactgatagcattagtgaaactaccaccatcaattattaatttgcaaaccttctcttgaattttgcactctgactgaaaaatattacagcgctgcccctttgcatcaacattagagccatctcgctgaactgcatatgcaagcatagataaaccattattcttttcagcaccatcatccatagatgaatcatcaatatctcgatagcccgtagtaagagtatgatcaagttgtacaccttctgaattttctaatatactctcagaaacatagccttctttagtcatcaacgccttcttctgattaggacaatctctcatataatgtcctctccctccacaagtataacactgtacacttcgtgatttagaactagatgtagcagtagattcaactttagatttggatttactcaccgaactagcagcaggtttagacccatctctagaaggagtagtcagcttgaaagacatcgacttactagcggcacttccatcaccatctcgctgaaaagaacatgaacggctagtgtggcgacttgttagttgctgctccaccctttgagcaatgtgcaccatattttgtatatcataataatatgatatctcaacacgttctttcacatcatcgttgagaccagtaagaaatctagcgatagtagcttcatcattctctgttacccctgtatggctcattaacaattccatctccttataataagcatccacactaagatcaccttgtttgagttgctgcaagcgtgtatacaaggatctagtataatgttcaggaacaaaacggcgagccataacctctttcatatatatattgccaagtatgtggacgaccaacatgtaccaattgattccaccaagataaagcataaccagtgaattcaatagatgcaagacgtgccttcttatcctctaaatagttgtgactattaaagatctgatcacaacgcatctcccactgcaaataatcctccggatctccagaacataaaaaagcaggcatggaaatttttatcttaccaagcccttcatccaacggaacacgagcagcacgacgattccgattgtcacggtgaatatcatcaacaaccctatccataaaagcaggacctcggcgaggaggatgtcgaggacgacgatgatgatcaccttcatcagaacacaagcctagactctcatcctccgcatcatactcatgatgttcaggtagtggacgtcgaccctgtctagcatgttcctgacgtggcagtggtagacgatcgactaacatagaaatactcct

SEQ ID NO: 28606 - DNA, 1489 bp, Oryza sativa
gtcacgagctatgagctttttggtatatttttgttatagtttttagggttaattggatccatgccactgtaaatgtggcaaattagaaaaataccactactatttgttttattggctaggtgccactacaaatttttaaaattgaaaccatgccactccgtcactatttctgtcgttctctctcacgtcgtcatcctctaatctcacgtaggcacggcgagggcaagaagacgaggcggccgccggcgaggacgtcgcgagcgcggggagcggctgcggccacggccggcgaggatggagacggacgccgagtggttgaacagcagcttgccgacgtcgcggacggcagagccaacaggtcgaggaggcggagtggcggagttgccggccggcgtcatggccgccatgccgccgtgctaaccgtgcagaggctgcatccacgccaccatgccgccatgacacgcaccgcgtgcttgacgcatacgaacatggacctggcattgacagccatgacgcggtcgtactcgtcgatgtcgagcacgccgagcgagtccggagcctgtgctcctatgatccggcgttgctgtagaggacgtcgaggcggccgtggcgcgtaatggcgaggtcaacggtcgcggcaacatccgccttgacagtgacatcgctgtgcgtgtacaacgcgcgtcagcgccgagcttggcagcgacggcacggcgttcgcccgctgctgctctcgctccccatgccatcgccaccgccggagtgccgccgcggggttccgttgctgctgctcctgctcccgctcccggagcgcgccggagtgccgcccgcgacccgccgcgtcgccccgaatcgtcaactgccgcgccgtcgttgggggcgggctgcgccgcggcggccttgtgctgctgctgttgtgtgtaccgtcgctaccgtaagtggtggtcgccgggggagccgaggcggcgagccaccagactagctcgtcggcggggctctccctgaccaagccactatgcacgcagtccatggaggacgagagctgctcgtggaggacatggagatgcacggcgaggatgagctcctcttcctcaacggcgtccgacgagaaaggtggtaatgcatagcggcaaccgcgcgaggaacgaggcccgcagctgcggcaaccggcattgtgaaaatcaacgatgggaacggcgccggaggtgaagaagatgaaggccgatctccccgttccccgtgtctccggctgaggttcttgaggcttcttgaagaggacgtcgaggcgacgacggtggcgccatggcttgctccggcgtgctccggtttgacggcgacaaagacgatgtcccggtgatggcgtctagtcccggcagcccccacggcggcacggaccatagagttaggaaattaacgggggaacgacggaaaaggcgacgggatggcatggattcaatttcccaaaattccagcggcacctagccaatat

SEQ ID NO: 28607 - DNA, 719 bp, Oryza sativa
caaattcatcaaagggatattctgcagattcggattgccccaccgtatcataacggacaacggctcccagttcatcagtgccgattttcaggattactgcatcaggctgggagtcaagatctgcttcgccgacgatgaggaggaattttgaacggagggtaatttggtcaaatttatggttgtaatggtgtggaatcaatggtgcgttgatggcgatggcatttctggaagaaaaagacttgtacgatggcattttatggattttctctaatttaaaattttaagtaatactctctccgtcccaaaatataagcattgttggacttcgacaatgtcttcgagatgctacattgatcaacaatatctataaaagtaagatgttttaaataaaaaaagttacacattatgataatttgcttaataacaaatctagtaacatcaaatttacatgattgatctgtttttgttcgtttgctattaatagtcaaaatttaaaagtttgatttgccactattctaagaatgcttatattgggatggatggagtattttttttcttgtatactaaggatgtatgtgaggtgatatttataagtggacgtgccgattggatgggctaggctgcgttattctagagcacagattgttaaaaattgtaaagtaaaattacttgaatcacgtcgtcttaaatttatgagaaaaaaaatgctgcaacaatag

SEQ ID NO: 28608 - DNA, 1601 bp, Oryza sativa
gaggctattgagttctgtgtcaattacatgtccgatgctgatcctatcggagttcctgcgtctcgtcacgagggaaggttgtcacgtgttggcacaattggaaggaaaagaatcaggcctgatcaagcatcgtacgcgtaggctcattacgctgtgctccaacatatggcagaagttggcccatactttgaggagcacttagcgaaaatctgagatgagaacttggggcgatctgatgcatggattaacagagaacataattctcggttcaacgaatggttcaagaatcgtgtgataatgtccacagatgtcccaaatgagacagtacagttgttggggatgggaccgtcttggaccgtagacacatggcaaggatacgatataaatggatattttacaccgtcaaacaagatgacaaaagcacagtgcaaaacaacggcgtccgtatagatgcgttccaggatcaagttgggtcaaacacatactacggccgcattgaggagatctgcgagctaaactacgtcaagttcaaggttcgtttgttccgctgccattgggtgaatctaagcactggtgtcaaagccgacaaggaaggtttcactttagtagatctatctaaggtgggatacgtcgatgaaccatttgtacttgcgaaacaggtcgagcagatattctacataaaagacccttcaaacaggaagatgcacatcgtgagggatggaaagcgccgaattgtaggagttgacaacgtcgtcgatgaagaagaatacaaccataatcttcatgtaagacctcacattgaccttgacgatgatccccaagagcctgtggcatatgctcgttcagatcatacggaagtcataaccttgtgacatgcatttgtacttatctattgtaatgaatgaagtattttgttttattacaaatgaccaaaataaaagttgtagatcctgatgagaggatcaactttgtttttgaccatatttcaatttgaaatcatgtagtatttacaaatgctgttaattagatttgttatattgtcaaaatcaatttcaagttgttgggaaaaaaattatatagaaaaatgaccaaaataaaactagtagatcttgaaaggctctacaactttgttgttgaccatatttccatttgaaatcatttactatccaaaaatgtattatgactaataaaatgaattattacacagcagctatatattttgcacccacaacaaataaaagatggaaaatgagtcatcgtgacgggccttagtttatggccgatagagattaatctatctcaatcgggctttatcttagggcctgtcacagatgactcatccgtgacgggcctaaatgtcatctcaatcgggcattattatggagcccgtcaccgatgagtcatgtgtgacgggccctacggcaaagcccgattgagatgactcatcactcttttgtaactagggtttctcaaatcggattgaaaaattttctaagacctgctatagttcccgcctccttagaaccctagcgccgccgccaactcctactttaccgccactgccaccgagaccgtaaccggctggcaccgagcccgccgcc

SEQ ID NO: 28609 - DNA, 7044 bp, Oryza sativa
atttacaaatgctgtttagatttgtcatattgtcaaaatcaatttcaagctgttggaaacaaaggtatatagacaaatgaccaaaataaaagttgtagctcttgataacctctacaattttattgttcaccatatttcgatttgaaatcatttactatccgaaaatgtattatgactaataaaatgaattattacacagcagctatatattttgtactcacaaatgtaaggacttatctggaaaaatagaaaaatagtcattggtgacgggccttagttcaagcccgatagagattaatctatctctatcgggcattatcttagggcccgtcacagatgagtcatccgtgacgggcctaaatgtcatctcaatcgggcattattatggagcccgtcaccgatgagtcatgtgtgacgggccctacggcaaagcccgattgagatgactcatcactcttttgtaactagggtttctcagatcggattgaaaaattttctaagtcctgctatagtttcccgcctccttagaaccctagcgccgccgccaactcctacttcaccgccaccgccaccgagaccgtcaccgccgccaccgagcccgccgccgcctccaccgagcccgtcgcctccaccgaccggcgacgccctccaccgaacctggcgccaccgccaccgagcccgccaccaccgccctcgccaagcctgccgccgtcgccaccgacgctgagcccgcggctgccgccaccgagcctccttggcccttcattcggaccaccgccacctcctcactgacgacccccaccgagcccgcgccgccgccaccgagcctctacaccgactggaccggtgtcggccttcctcgtcgtcgccgcccgcgtcctcaccgacgcacgttgccaaccccccaccgagcccgacgccgcccgcccggcgccgacctacccgaccggcatctccactgaccggcgccgccctccaccgagcccagcgccgacccccaggtgagtcctccattgcgcatgaatgatgaatagatgaatgtggttcgattgatgaatgtgatgaataaatgattagatgaatgtatttgaatagttaaatgtgtatggatatatgaatgtggatgaatagatgattagagatgaatgtggatgaatagatgaatagatgaaatatttaatttatttatatgtgatattcaattcattttacatgtggatgaatagatgattagatgaatgtgtttgaatagatgaatgtttatgcatagatgaatgtggatgaataaatgattatagatgaatgtggatgaatagatgaatagatgaaatgtttaatttatttatatgtgatattcaattcagtttattagatttgtgagatgtgcaatttagtttatttatgtgaataagtgattttagaactttggattctaagccattgaagcactgaattgtgtattttcgttattttgaaaaaaagtagacgatgtctcagcaaggtgaaccaatgtcgacgacaactagtgggtcctcaagggcacgtactcctaggacagggaacaaaatccctaaggaacggttccgcataacagtggtggacgccgtagggttgccgacatctccaaggaaaatattgagccgatttaggtctatctgtggggtcatagggaggcagaaattcagtattctgcaagatgacatcaagctcatgccggccgcagagaaggacattgcttggctaatgttcaaggagagctttgattatcctgtggagcatgaggaccgtctcaggcgggctgctttcaaggttatgggcaatgcttggaagaacttcaagactaagctagtcggcgagttcgtctacaacccggcgaatctagatccaagagagaaatttccttggatcacggaacaggtctgggaggaattacatgcgaagaagtcgacccccgagtccagagctagaagcgaggcatatctcttgctccagaccaggaaccagcatccgcaccggctgggcaccgccggatatgccagtaaggaagaggaatggcaacgtgaggatgaagaagcggaggaatcatgcacaccgctcgtgtttggcgatatcccacaccctcgggctaggaactgggccagggccaggtaccagaagaatgatgatggcacaatcttcatgccaaatgcagaagatcaacgagtgtacgaagctatagtaagtgtctagtcaaactagatgttcgcattgtttcccatcgtgcagtttatttaaccccactaaattgtaatgcagatggagttggttgccgagcaacaagcctcgcaagaggcctgctctcaaagacgtgaggacgacctcctcacgaaagcgttgggcaacaaggaacaccgtggacggacacggggcgttgggtcttctgttccctggaagtatggatttccagactacgcgtggcagtacaagaagcggacttccaacaaggcggagaaagatgcacgccttgaagccaagatctgggcgtcgataagagctgagctgacatctgaattcgatgaaaagctcgagtcgatgagggccaagattaggcaagagatccgagaagagcaatagaacccccaggccgccgttgcttctgcgcacgaagagttaggaagtcccacccaaaaacgcagcagttgcgcatcaactgagttggcggaaaatccaacatcggtcgacagcgccgctgaccatataacggtaaccatgaacttactcaatacatgaaagacttaccgaatccatatgatatataatattctaaaaaaattgattaatctatcgcaggaaccaacgagctgcaccctcatagttagggtgatgccgaccttcacggttccagcagccgagggacttgcgtacaagccgaccccatagacaaaagtgcatggagcgcaactcagggccgactgtgcaaaagttcaagtcgactcggtgaagcccgaatacgagctgttccctctgaagtatctaccaaacgacgaggtcctctcactaggaaatgctcgtggtaccttcatccaatggcccaaggacctcattgagatcagggttacagtgaggctaaccacttgcaccaggctgtcgttcagcaaagagacccgcctctgctccttcagcccctcctgctcaagattgtcatgcacaatcttacgatgtgcagttgcagtacgacacggattttggggaggaccgaacggaggccgacagcaaggcgattcatgaacccccactgatgaagaagagcaggaaggcacactcttccccttagagaattactctcaataaacccgaagcaaaggggagaggaaggggaggaaaggtgcaggcctcgcttctagctccaaggaagctagatctgggcaagggccaggaagagactaagggcaaagaggtcaagaagaaatacgttgctccacaggagttcaaactaggcatgccattggttggagatgacgtgcttgccacaatgggcaccgcttggaaggaccttcacttatactacatggagaaatctaacgccaggaagccgagtaaagctaccgatatccttggagagcacgatggaaagccattccttggtccaacaaattatgtcgtggtcgacttcaaggatcttttcgacctctacaggctccgaacggtggacacaagcctccttaagtgctactccttgtaagtattgtcgcccaactcattctggtaataacaatcggtttaacttgcttacaagatcgtttatcctgtgtgtaggttaagttggcaatggtgtcagaagcatgcaccggaagttgccttccttgatccacaagtggtcactgtcacaaatctccagaatgaccgtcaaggaatggtcaactacatctacgacaccttgtggtcctgccgagacaaggagtacattatgtgcgcctataatcaatagtaagtgtgttaactaaatatacacaacaaaatgacacacattccttgagtacttaattaactttcactatattaatgccgcagtgcccattggatccttctggtcataacacctaagtggagtacatgtcactacctgaactccagaattgataagaacgcatataattggaccccaattcaactagcaatagatgaagcgtgggcccaatatgtgcaaagaggagacctcaggaagacaggacatgacaccctcatccacaaaaaagacttcccggtgaagcaacaaataggtgaccagtgcagattccatgtgtgccacaacatgcgccttctgtatagagaaaaggtgaagactttggctgagtttgaggtcggtggtctcaattgtgatagactaaatatattttagtacttatatatgatcgatcaattaatctggaattatgacaatgtagggcataataaccaagtctgcctaccagctttgaggaggttcgcgaggagatagccagcttcatcctgtgcgaaataattaaccccaaaggaatgtttaggcttaaactaaaatgatgaacaatgttgaacttttatgtttaggcaatgatgaacacttattatgcaattgtgatgatgtaactctgatgtttatatttatgtatatatttcatatgtttatgttaaaacttgctaaataaatatttgatccaattaactcggttttgcaggtgaaatatgataaatatttgaatggatgtgaaatatgtgaatggatgtgaaatatgagatggctgtgaatgtgtggttgtgtgaaatatgttgatgtgtgtgtatgtgaatgcatatatatatgaatgggtgatgctggggagctggggatattggatatctgtgtttgtttctgttatttttgcagcgggcatggctagcaaaggcctgaggctagccaaaaaacaaatttttttgtgaattatagccatctgtgacgggccataactaaatgcccgattgagatgaggtgtcacgcccagaaattcccgaatagaattccaagcagaatgtgcattaaaacccccgtccaggaccggtcggggtacacaaacgacaaatttgacatacagatccacgtcttacaaacattataaaagtattacataaatgcagcggaaaataaaaagataactggagctaagccttgacttgcaccgcagcgggaacaccactccacaagtatcctcgacggcacggacgaagcctactcctcggagaagccaccatctgacgcatactcaaactctggggtttggggaaaatatagcaagactgagtactacccactgtactcagcaagtcataccggaataggggtatgatgcagggaattatcaagggatagctataatggttcctttgcataaagcgagcatttataaatagtagttgaaagtagtaaaaccgttgtaataattaatcaatattaatcatccactgtccaatgctataccacgttgcaacaggcccaaccatccacctatactattcaattccattagactagtctagggtgaatctaatcacggtgaatctggttgaccgcccataaccgcgggcacggctattcgaatagttttactctaatcaaaggtgtacaactgtacccacaagacacagccccacgacatgtttccatgtgccgacatgccaccacgacataccggaaagaggccgtgacaggacccttcgcataaccccctctagccaagcacaccacacctcaagtttcacccccgtccccagcgggcaacgggcagtcccctctcgtgcctaggtgaatccaaaagcgacagaggccgtcgcagggcccgccccgctccatcacgcccacccttgcctggatgtgtcagctagaggaaagctacactacaagcctagccattgcccacgctggcttgtggtaagtacgaggaattcttccagggtttcccacgaaccagtccttaagtgccatgggcgcgactagcaaaaccatgcacccacagcccaccataggattcattttaattagcaacaccaggacggtggtactaatccaacatcaacactagaacctgaagtctatatattatatgatttcccccattgtgtgctagttgaactaagcatggctaagcaatccctagtccaatatctagtcatgtcatatcccaagctaacaaaggagcatggtacaaaaatagcatggctataacagtaggtaaacatcccatagtattattgtaaaacaatgcaatatttgaacaaaaacagtaaaacatttgcaatataggatcaacatgttcaagtgacaagcatgacttgccttgctctgctgctggaggaacctcggcgactatttcaaagtacaccggagcgttgggagagccggaatctaagcgacatacaaagcaaacaatacaaacaggctataagactactgaaacagagaacaaaaccatttttaatggaatctatgcatttttattgatttactgagacttgaatgggcttaaacggagctcggatgaattagatatgaattttggaatattcactgtgtttttactataaacagaaaaatccttaattgatttattgcgcaataattaaaatcctggggagagagagagcggcgccaacatgcgggccccacaagagagagagtggtgcacacgtggcgccgacgcggcgcacacgcggcggccacgcggcagccatgcggcagccgaaccgacggcctcgatctactgcccggtagatcggacggcggatgcggctcgcggccggcgcgcgcgggcacggctcaagccggcccggcggccatggcgcgcggcagcgcggcgcgcacgcagcggcgacgcgaggtggcgaccggcggcgatagcggcggctaagcagctaggcggcggcgcggtggctaagcggcgcgggagagagggagaaaggggaggagaggcctcaccgacgacgatcgacgacggcgagcgacggagggcgatggcgacggtgagacgagcttcggaacctcctaacgaacaaaag

SEQ ID NO: 28610 - DNA, 10204 bp, Oryza sativa
ggtttatatatatataaaccatgcatatatatgtttcaatacatatatacatgattaatatatatgtatttatatatatatatgttatgcaaatgcatatgtgtgtatatatacatacacaacacacacacacacacacacacatatatatatatatatatatatatatatatataaccaaaatatatatttacattaaagaaaatgtgtacacatgcatatagaaaaatagacatgtactaattacaatccattatgatgtcctagctagctactatttcgacgtagtagtagtcgctatctcagaagctaaggacctatgaattgtatttccgtcgtagtagaattcacccttggcatcaaggatttgttcgttgatgaatcccatgagttgttcttgaaccaccgtgataaattccttgtgtgtgatcaggttatccctcatacgaataaactatatgaatgtgtgaaattaattagtaattaaacaacaaatcgatacgtaatgaaattttgaatttatttgcacgtacatcgagctctcttgtggtgatgatttggtctgcaaggcagtggcaatactcgcacacgtagtagccgcacaagttagttccctacttttgctttgcgcactataaataaatgacaaatggcgagagatctaattaatatacacttgtatgtatttgaattggagattcaatataaatgtagagcatgtgtactcacaggaaaattgaacttccgcctaagtctttctctcatttttccgcggaccaaatgatggaaccgataccaagccctacatggagtttaaagctatgattcgtagtagcaattaattataacaagattcttaattaacataggaatttatgacagtacctgtttataagttcgaaaaccttgtcaaacgtagactcttttttatccattgagtcatatacgttgacggtgcaggcctccaggtcgaagagtaaaagcacccagtggaatctgcaatgtgcgtgggatgcattatatatgaaacacttagcatgtttgtacgggaatgaaatttggtataggaagacagtaaaattaaactaactctgtgttgtacggcaacagtatgaacgtcttgtaatgctgcgccttcaggagatggacgagattgtcctctgtgtcttgcagataccggtcgagcactgtgacgtttactttccgagggtcgatgaatccagtatcgaaaaccccccaccgtcgggccctttgaatctccattctacaacgataaaaggaagtatatattatatatagtctacttatatacaaggacctaattatttaaaggaaacgtaataagaaatctaactgaacgatacttacaaaatgcagcaactcataatagaaacgtcgagggcgtccagctggtatagttcgtagatacccttgaaattgatccagagaatgtcatctccttgcaagaagtccgtgtccctgatcctcgctctgatcatctctctaccggtggcgctcatctccatgtacagttgatggaacttgtacatttgagtgggtaggaactgcagctgctcaggcttgataagcggtttatcgagttcgtacatgtatttcactttcgccttttcgattggtgcacctcatatcaattgatccgtagttagcccggtgtcatcaataaattcttgtattccaaaatcttcaccggtcaccaacggctcgatctcctggcttgcttgctctccaagctgagggactggtttggactttccagaagatgctttctcgagtgttcgctcatagtccgatagctttatggccttcttggcaggtgcagacatacccctgaagaagttcttaacactcgagtctataggaatcttcttttctggacttcgaggcttcaattgtctcctgacttctgatgccacataagcgtcaagctcctcttgcgtgcaatcgtaccctagatccttgttcttggcggtgtgaactttcgccttcttcgttgcccttgtgggggcaggcggtggagcttggggggcccttgacttggaaggtgctgaacgaggagcctgcggaggagtcggtgtaggagcctgaggaggagtcggtgcaggagcctgaggaggagttggtgcaggagcctgaggtggagacggtgctggagcatgaggagacggtgcaggagcctgaggaggagatggcggagccggaggagatggtgcacgagacgccgcttgtcgccctgggaggatgatgtatcgcttgcgccatagtataatggcgtggcttgtgtctcgtagatgcgtctcaccgtctcctccagggtaatccaactcgaggtcctcgtacgcgccttcgaccaactcaacttcgaccttggagtatcctgctggaatcgtcctacagtggtaagtacctaaagggtccgttgtgatggccatgcccgacgccaccttcacgtggtgagaggttatttattagtaatcaacgtatataagcagcaacttgtcgaatggacaaatctaaaatctataaactacgagcttacctttattgataagtttttgaagggaatatgcagctcagatggtgtccgctgagtgatgtcatcaacggggcaggtggttttgtcctgggtttgcatggcgtccatgctctgtgatcctccctgccccgttgaggcgcagttgctacgatttcctgaagggctcacaattgcaggaggaatggttggctggggatcattggaccaatgtgcggccatgcgttcatcaaccttccttgccacctcctcttgcatgctgagctcgtagctcgataccctgaactcaagatctgcaatcttcgcctcggtatctctcttgctcctcatccgactcctgtacgtgtggatgtcctccttgaacccaatcttccaaggaatcacccctttccctcgtgttcatcctggatgctctggagtctgcagggcgagtgacagctcgtccttctctctgtcgggtcggaacgtaccctgagaagaggcttccactgcgtccgttagtcgacgcgtagcctcgcgtatctgatcgctgaagaccagggagccatcaactgggttgagcgttccaaagtgagcatagtaccagaacttcgatcgttccggttaattagcggtggccggttcgatacccctctcaagtaagctagcctccatctcctcccacttcggcatcgcgacgctatagcctcctgaccccaagtggtgatggtacttcttcttggcggcattttctttgtttctttccatcatcgcctgcccttgttcacatgtcttatgtgcaacgaactcgtcccagtgatcccttagctttgggaatgtgtcgaagttcggtgtctgccccttcaggatatatttctggtacagatctcccttgaagctctgaaactgttctgccattttatttagagtccaccttttcactttgtcctctgtacctgtgggaagggtgaatgtctcgagcattgtggtccacaacatctctttctccgaatatgggacaaagctctcatgatctccgtgtgcccttgttctgcgccagtacaccgtactgacaggcacgttatcccacacaacccaaccgctgtgacgtatgtagttcttggtggcttccgcctaggcactaggtcggccgtcttcgtccacttccgttatgatgtgccaaccctcaagcttcttcgcggcacctcgttgcccgcgtgccctcttctgtccagcggagggttgacttccactagcctcctcctcctggttcccctccacatccctctatacgtgcccctcctggttcccctccgcatccctctccacattcccttcctggttcaagtactggtttggatcctcgttcccctcttcttcgttcaagtactggctgcttccctccgcaattgtatcttacaatatatgttcctcatcgcgatcagctatctgttcatacaagaaatagttcctaagtcatgagacatttttgctttaacaatcttatatgctaacaatcatatatgctaagtctaaacacaaatctaataatcttatattaaaactataataatcgtatacgaaaactcaaataatattgtattaaaactgtaatagtcaactatgctaagtctaagtgacgtatattaggaccctagctagtcaataattatatactaagtctaattacaaatctaataatcttatattaaaactcaaaaaatattatattaaaactctaattataatgctaagtctaagtgtcgtatattaaatctaatagtcttaattgcgttaaaaatctaacaatcatatatttacatcacttgcctgcgcgaattccttcgagggctagcaaccactccggcttgagggacgacgacgacaacgtcttttctgcaacatacaaaaagatgtattaggagaaacgcgaagtaacatatattgtatttctcgttcgcgttctcattaagttcacgtttcgttcacgatcgttcacgttcgcgttctcgttaagttcacgtttcattcacctacgttcgttcgttcacgtgcgtccacgttaacgtacgttaagtaaagttcgttcacgcacgttcgttcgtttacgtatgttcaaatacaacattaagttcacgttcgttcacgttcacgttcgttcacgttcacgttcattaacgttcgttcgttcacgttcgttcacgttcacgttcgttaacgttcattcacgtttgttcgttcgttcacgttctcgttcacgtacgtttcgttcgttcacgttctcgttcacgttcgttcattcgttcacgttcacgttcgttcgttcgttcacgttcacgttctcgttcacgttcgttcgttcacggggcggcagcggagcagcggcggggcagcgcggccgcggctttgggtgcggcggcggcggggcggcgcggcggtgccgtgccgcggcggcgtcgtggcgtcccggcgtgtcgtgtcgccgcggtattgtggcgcggcttcgtcggcactgccagggcgacgttgtcgccggtgccggccgcatcgaggtcggggtcggaggcggcagcggaggcggcgatgacgacacgcgcaagacggcgtcgagatacgacggcggcgtcggtgcggggatgccctaggcagtggctgcgaaggagaagccgagagagatcgatcggggcaaaaatttctaagtgttggtagagaagacgagggcgcacatcgggaatatatatacctctagatctttagtcccagttaatgagaacaaccgggagtaaagatatctttaccggttgttctcatcaaccgggactaaatatattttcccgctatttccaaattctttttaaacccggttagggttaagaaccgggactactgataagcgcactgaatattaatttccattacatatgtgtttctaaaatagaaaataatgcattaaaattatttaaagtcgaaaaattaatgacaattacttcgaaaaattattgttgtctgtagtaaattaagtggataaaacgtaataagcaaatatatgatttaaattaataaaaattctaataatcatatatatacttagcgtatgaatgatattaaattgttaacaattgtaattaacatatgtatatacatacgacatgcatgatttaaaattaataaaaattctaataatcttatataattagcatatgaatgatattaaattaattgttaaaaactctaattaacatatgtaaatacatatgacatgcatgatttaaaattaataaaaattcgaataatcatatataattagcatatgaatgatattaaattaatttttaaactctaattaacatatgtaaatgccacaagcatgatttaaaacttttaaaaatcctaattatcgcgtataactagcatatgcagggtttaaaattgttaaaaactctaattagcatatgtaaatgccacatgcatgacttaaaacttttaaaaattctaattatcgcacataactagcatatacatgatttaaaattgttaaaatctctaagtaaaattgttaaaaactctaagtatcatatgtaaatgccacatgcatgatttaaaacttttaaaaattctaattatcgcatataactagcaattacatgatttaaaattgctaaaacctataataaacgtacgtaattaacatatgccatacaacaactgatttatatggataatcaatacatccaaaatagtttacatcgtgtacacaatagttacgacaatacatcagcggtgacggttgaccgcacgtactttctcctcactattgttccctccttgtgatcgctacgtgagtaaggggtgtcttcatttgataggaggatgctagggtcaatcgttaccatgaaagggggttccccatcaaactgatcgtaatcctcgtcagtcttgtcctcaactccgacgatttttcttttgcctgagagaaccacatgacgcttcggctcgtcaggccctctgcccttctttcctttgctagacatttccttcacgtaaaagacttgcgttacattattggcaaggacaaaaggttcgtccgagtatccaaccttgttaaggtcaaccgttgtcatcccactatcatcaatcattacgcctccaccagtcaacctaacccattggcaccggaacagagggaccttgagaggaccatagtcaagttcccatatgtcctcgatggcaccgtaatacgtgccagttgttccatcgtgtcccattgcatcgatacgaacaacgctgttttggttcgtgctcttcatgtcttgggctctcgtatagaatgtgtacccattgatctcatatccctggaatgtcgcgatcgacccagatggtcccctcaccaggaaggccagttgttggttgatcgtctcgttacccatgagatgttgtcatagccacgcggggaaagtatcaatgtgatgccgtgtaatccatgcatcggacttaccgatgtttctggcgtgaactagagccaagtgctccttgatgtaaggagctaccaatgaagattgttgcagaaacgtgaaatgggctttacggaataaattgttgtctatcgtcattattgctttccttccgagagttccctttccccgtagtctcccttcatggcgtgattcaggtaccccgattgggcgaaggtcttcaataaattctacgcgaaattcgatgacctcctctgttccataccccttggcgatgcttgcctctggacgagcatggttacgaacatacttcttcagaacgcccatgtacctctcgaaaggaaacatgttgtgtaggtacacaggcccgagaatactgatctctttgacaaggtgacaaagcagatgcgtcattatattgaaaaatgaaggtggaaatatcaactcaaaactccacatcattcagaagggcttctaatctatccggatcggtgaccttctgcgaaattgcgttcatgaatgcacatagctttgttattgttgcccggacattgtctggaaggataccccttattacaactggtagcagttgtgtcatcaacacgtgacagtcataagactttaggtttgtgaacttcttctccttcgtgcttattattcgattgatattcgtggagtatccagacggtacatttatgctctccaagcattcaaacatactttccttctctgccttgctaagagtgtagctggctggactcaagtaatggcttcctttctcctttggttccgggtgaaggtcgccgcgttgttccatacgcttcagatcattacgtgcttccagtgtatcttttgactttccatatacacctaggaagccaagaaggtttacgcaaaggttcttagtgaggtgcatcacatcgattgcgtggcggacgtccaagaattccctatagggtaactcccaaaatatagagttctttttccacatcgccgcgtgaccatcttcgctctctataggctggcttccaggccccctttccgaacactactttaagatctttaaccacagcaaacactgttttcccgctgcgatgtttaggcttcgtacggtggtccgccttatgttcaatgtgcttgcctctcttccgtaccgggtggtttgctgcaaggaatcgacgatgaccatgtacacaaccttcctacagtgcttaagatacgtactttctgtttcatccatacagtgagtgcaagccttgtcccccttgttggactgtccggatgggttgctaagtgcaggccaatcgttgatggttacgaacagtagcactcgtaggttaaactcctcctgtttgtcctcgtcctacacggggacaccttccttcttccacaacagtttaagatcttcgaccagcggtcttaggtacacatcgatgtcgttactaggttgcttggggccttgaataataatcggcatcattatgtacttcctcttcatgcatagccaagggaggaggttgtagatacacatcgtaatgggccaagtgctatggccgctgctcatctctctaaaaggattcatgccattcgtactcaaaccaaaccgtatgtttcgtgcgtcctttccaaagtctttaaattttctgtcgatgtttcgccactgcgaaccatcggcgaggtgtctcagcatcccgtcctgttgacgctcttcagtgtgccatcgcatcattctagcattccccttgttcctgaacaaatgccttagacgtggtattatagggaaataccacatcaccttagcaggaattctcttctttgttagctgcccatcaacttctcctggattgtctcgtctaatcatgtatcatagtgctttgcaaacagggcatgcttctaggttctcgtacttcttaccgcgatataggatacaatcattcggacatgcgtgaatcttctgaacttccagtcctagagggcagactatcttcttagcctcgtacattgtctcgggcaatttgtttccctccgaaagaatgttcttgacgagtttcaataaattgccaaatgccttgtcactaacaccattttttgccttccattgcaagaactccagagtggtatccaactttttgtgcccctgctcgcaacctgggtacaacgacgttctgtggtcctctaacatcttgtccaatttatgggcccccttttctctttcgcagtcctccttggcgtcctgcaacatctgaccaagatcatccgcaacgtcgttaccatcagcatccctttcctcctcgcccgtttgatttccttcaaatccaacgtactgagcaaagtccagaatattgtcgtcttccacttcatcttcttccatttcaacaccttgctctccgtgggatgtccaacaattatagcttggcatgaaccccgactcaaacaagtggaaatgaatagtcctggatgcagaatactccttctgattcttacacttattgcatggacaacaaataaaacccttatgcctgttagcttcggccactctcaaaaaatcatgcacgccatcaataaactctttggaccgccgatcagcgtacatccattgccgatccatctacatgacatgaaaaaaaatcatacacaaataattattcttacaataatgacagtcatacaataattataaaataattacaaactctttcaacagtcatacaataatgacatatcattattcatacaaaaatcataaaatattacaccaaataattcttatttactatttctaaagtttacaactaatattaatgtgttttacttcttttaattttcattttagtttgttttctattatttaagattaactatcactatattttccttctcaactattttataaaaccttctttagcaaataaactaaatttctatatattctttcttccccacacaaattttctctctcatcaacttacaactaaattttggagacaaaaaagtgtgcaaaacatagctccaaatgtaatatgacaaaaaaaacattggaggatgaagttgctaaccttttaggcacctctgatttctatataatcaccaaaataaatttactagaaattttggcatgacctcccctcttttttgaagaaaaattgaagcttgctcgggcagttggaggaggaagaagacatatatatataggggtaggact

SEQ ID NO: 28611 - DNA, 1476 bp, Oryza sativa
tgatccggtaacaaatacccaagaatcagaattttaagtattttttattaattcctataacattaatacctgaggtggaactctttccaccctgctgcttctgcttgagctgctctaggtatttcttgcagtttctcttccaatgacctgtcttcttgcaaaagaagcactctgcatccttagcgggccctgtcttttgaaccttggtcttagagttgctagtactcgtgatcccatcatagtttagctttcttttttgaccacttttcttgttgttgggcttgcgcttatgcataaccatcacatggttggagtttttcttaatgctttcctcggcagtcttttgcatttcatgcaattctgccaaggtcttgttcaggttgttcatgttgaaattcattatgaacggctcaaagctgggagggagcgactggagaatcaaatcagtagccaattctcggctaaggggaaagccaagcttatccagactcttggtgtaaccaatcattttgatcacatgtgggctcactagattaccttctgcaagcttgcacgcaaacaaggactttgaggtattaaacctctcagctcttgcttggtcctcaaacatgttacgtagtcccgtgattatcgtatgaacatccaatgccttatattgcctttgaagctcaggggacatagtagcaagcatgagacagattatatcaagataatcattgcatcgttttcatgttccctacgttgagcagcaggagcattgttgggcaagttagctggaaaaggctctgtaagcacaaactcttgtgctcttgcctgagaacaattctcaggttgcgataccaatccatgaagtttgttccagtcaacttctctttctcaagaatagaccgcaagttaaaactggatggtgcaggctgccatgatctacaatagaaatatatgtatacaaaatcagcagcatgtttacatttaacctttcattaaacaatttaacaaaagatactcccactatgtattgtgaaacaaaattccctctagtaacatagtgagtcaagatcctcattttattagtgtctagggagttttggcatcacaattagacaactatcaaagtaggtaagcaacaccttgctaatcacatcatatgtgactcttgtgctgttggggtgacatctccatatccaacccaacctatgtcccaaggttcaaaaccgttttgataaccttgtcaagtaaaccaataatctccgcatacagatgtccgagatctatcctattttatcatgataaaaagtgacactttgctatggcaaacccatcacttatgatcacaaccgtaataggtgcaattattggaagagcataaattacacttaatttttctgagggaatccatcctactatgtcatatcaaatatataacagcaataaagtaagatagatataaaaccccaagcgaaatctgaggggcaacgc

SEQ ID NO: 28612 - DNA, 10072 bp, Oryza sativa
atcgccccaagttctcatctcagattttcgctaagtgctcctcaaagtatgggccaacttctgccatatgttggagcacagcgtaatgagcctacgcgtacgatgcttgatcaggcctgattcttttccttccaattgtgccaacacgtgacaaccttccctcgtgacgagacgcaggaactccgataggatcagcatcggacatgtaattgacacagaactcaatagcctcctcggttatgtaaccttcaatgatgctcccctcgggtttagctctgttacaaacgtacgacttcagaactcccatgtacctttcaaacggccacatttcccttagaaaagccgggtcacatagttttgtttgcttcaccatatcaacagggagatgaaccattatatcaaagaaagacagtgggaaaaacatctccaggtgacagagcgtattcacaatatcggtctgcagcccatctagatcttctggatctataaccttctgtccaattgcattgaagaaggcgcacagacgttggatcgtgtgacgcactttcggtgctagaatgcctctgatagcaactggcaagatttgtgtgattagcacatggcaatcgtgagacttcattccaacaagttttagatcgtccaatttaacatacttacttatcctcgctgaatagcccgatggaactttaatatccttcaagcatgataacattgcgatcttctcatccttcaacagtgtgtggcaggctggaaggaggtacactttacctgtctctgcatctcgtatgggctggagttcactgcgaatattcatgtcctgtagatcaaggcgcgcgttcaacccatcctttgtcttcccgggaatattcaacatcaggccaaccaaactctcacacacattcttttctacatgcatgagatcaatgcaatgatggatatcaagatctttccagtaaggtagccgccaaaatatggattttttcttccacatacccttctcctttgtcttgctacgttttcttttcttaccaaactcattgcttatgtccttgaccatattgtggacctcatctccggacaaatctttaggagcaggctgaagttctctcttaccattaaaaattttattctttcttctaaatgcgtgacgtagcgggagccacctccggtgacccatgtataccatctttcgtgatttcttcagccaccggctttgtgtatattccttgcaatcggagcatgccttctttccttttatagtttgtccggaaagattaccgagtgcagggtagtcattaattgtgcagaacaatagaactcttagcttgaagttctcctgaccatatgcatcccaagtttccacaccttctttccaaagaatctccagatcgtcgataacaggctccaggaatacatcgataccattgccgagttgccttggaccttggattaacaagcacaacataatatatttccgtttaaagcataaccatggcgggaggttatagttcgcaataagaactggccaagtgctgtgagtactactcatgtcaccaaaaggattcataccatccgtacatagacatatcctcatgtttctagggtcggcatcaaagtctttgtgttttcgatcgatattcctccattcaatcgaatccgctgggtgtctaagcataccgtcattccttctctccgtggcgtgccaacgtactaacttcgcttcgttcgggttggcaaagattctcttgaaacgatcaatgataggtagataccacacaacctttgctggaccacccctctttgacttatttctttcgtcagcacttttctttcgcttgtatcgagaagccttgcagacaggacaagcatccaagtccgtatattccttgtggtacaatatgcagttgttgggacaagcgtgaattctacggacctctaaccctagtggacacagaacctgctttgcttcgtatgtcgtctcgggcaatgtgttctcaataggaagcatagccttcaaaattcctaaaagttctgtgaaactcttgtctgtccatccgctacttgccttcagcttcattaggtccaaggtaactgacaacttagtgtgttttgctttgcatccagcatacagagacgtctcggaatcacttaccaacctgctgaacttcattccatctctctcattctgggctgggtcctcaacgtcacgtaacatgtcttgcagcagatcgtgatccacatcaaccatttcaccgcccaatggagaaggtataaacatgtcatgctcatcttcatcttcctgattatgcgcaccacttctgtctgctgctactccacttcctgattcttgctctccatgcttcacccaacatgtatagctctccatgaatcctcgttgtatcagatgaccatgtacgtcctctccgctatcaaacatattctcattcttgcaatctgcacatgaacaacacatgtaatcactgtttcttctgatccgatcctccttcgcggcgttcataaaatttattacgccctttctgtactccgtagaatgacgtttcaaatttttcgcatacatccaacttcaatcaattgctacaaaataaaaaaaacaaattagaggcacatattataagatcagtattgcaaaagtaagacgtgatgaaattgctcaattaatgattaatattactcacttgattgatctatttttatcacttttgggaatttaatttcggttttccttgggaaaaggacaaaaaatcaccccctacagcctcccaccaaaatagtgaacagtgggatacaattacactaggtagtggggggtatttatactgtgcaacaaatatctgtaatggccctaaaacaatcaaccgtgacgggcatacaagtaatctctatcgagtcttaataaaaggcctaaaaaaagagtgtcatctgtgacgggcaccaaacttatctcaatcgggcctcaactatagcccgtcatagataagtgtcatccgtgacgggctttagttttatgcctatataccatgactgtgcgaccatatctcaatcgggcgaaacttcggcccaattaagattacttccttgtgacggcccgcaaattccagtcttgttatgggccgtcacagatggaaggatctgtactagtgtatatgtccgtcctcctccattatggtttttgccttttctcctacactgcttcttctccagatccggttatgaggaagtggttggtccatgatggcaacggtgcatacagtaacgacagatcatatagagatgatgaaacgcagccagtactttttctcccgtttattttattcacatatgatggttgataaattcttattttatttcaaggattgtcgatatctaggatagttcacaacttctaaaccattagagcaatggcggagccaaggcccggccagcctgggccattgcccaggctccgcctcatgaacatacactgttaatacactgttagttctaataaagggaagattaaccacgcaaattatgaaattagtaattgaggttcaaatcattatttgtagtttgcattagtttctctccaaaataataactatgtagtgtcaaattgtttacatcaatgagaaatggtttgtacagagttatacggatttgtgcgcttttatcatctatcatttgacttgcctaggctcataaaattttctgaatccgccgctgcattagagggcattgaatctataccagctcttcaatcgaatcccacaatgtttgctaaacaactataatgttcaataaataatatgacaccggtttttattagataatatgatattcgaccattcatttcattaaaaatgttatataagtgccatttatttttattgtgacttttaacatgatatttgatgcataatgatgaattgttggagaccgataaagcactaccagtttgagaaccatcggtaatagtacctgcattgtagatttagagggatactagtggagagagaaggggacggctgataagcgatcagccacgtggggaggcgcgcacggggccagccgcccccttcctctaatctctctgtatctaatctactacttctatacgtatgtatatactatatatgtatataatatatatagtatatacatgcgtgtatatatataagtatatttttaatatataaaaaatatatacacatatacaaagtttgtatagatatgatgtatataaagtttatatacgatgtatacaaagtttatataggacatagacaaactttgtatacgataaatacaaactttatatacatacgtattaaaaaataaaaaaactagaaaatacacaacatatacaaagtttgtatacgcgtatacaaatatgacatatgtgtatacaaacttggtatacatacgaatataaactttgtattcataaaccttaaaaaaaccgggaaaaaacagaagagaaaccagaaaaaaaaaaggaaaaccaaccgaaccggaaaaaaaaaaggaaaaccaaccgaacggaaacggaaaaaagggggggaaaaaggaaaactcgctctccctccttacccgcgcggcgcgtccgccgccccctttccacgcgcgacacatgtccagtcacgcggggaggggggcacgcgactgatcgtcaactagctttctcgagagataagggcatgatgctagccctatacattatggttatatttttagcaggcctcagcctgagaccaagtactagtactcgtccttggtttcaatggtacgagagtgtctttggaccctcatgtcagataaatcgtgcttacaggttgcaagctacacctctctattatttcctctattttaatatgggtgagtcctatgattatttctataggtgttttataccctgtaacaaattttcctaattgttatgattgatgtgtgtcccacctctctagtatcgcatatgaactatacgctatggatgcatttactagtcctatgcaagcagtgactatactaaatgtcagtaacaattccaaaacaactatagtttttttttcccaactacgtaagcgatatcacctagtgaaggctgtgtagatttagtcaatgaacgcatgcatttaccagatctagtagtatcgactatagatccggtccttgtttatgttatctgattgattcctagcttaattgcttgcagacgcactactaaaacaagcgtgtttattggatctagctagctagtacctgtatagttgtgttgatagtgatattcttggtaagagtgcttctcgtgcattggcatgttgaaaagttataggtgaaatggatatctgagacacagctataagtatactgatcaggatgggcaagtaccccagatcctgcattttgtacttacccttctaaaatttattcctttttccccgcaaacaaaaaaaaattattccttccactttacttttgtactcaccggacataaggatataaagttccataaattttttaaggccataagaagactgaatactgaggtggataagagaggagaggagtgagagaagaagcggatggcacgattacagccggcttaggcacaagaccaaaaaaatatgtgagagagacatattgaccatatattaatagttaagagctaaccagttagctaagaggtagactgtaaagatctatatagtaaacagctggttatattattagccttgcactaaggttctaaggttctaagcacaaactccaaagtgtctatgcttaaatgatgttgtggaggagagaagacaagaaagagagaagcagccacccctcgtataaggggaaccctccacacaaactacaagaacaaaagaaaatgagaggggctgattggtggcaagtgtattgagactagtgtataagttagttttattttttggatagatgacgtggataaaattggaggtgtgaccaccacctctattataaaacttgccctaagagttagagggtgtgaccagaaaagattgacgtggcaccaataagaattctctcgacactgtggtggaactaatcatcattaattaaacatcctaggtaatgtgctaatcagccattacttgtttcaatcacggccataatactccctcgaacatatttcttttattactaagatcaaataagaattaactagaaccaagagataattaatattaaaatggctcattggatatcagtcgacaattaatttagtatgtagagactataaatatgatcatttgtttttaaaataacaaaaaaatgaaaatacttcacatttttaaatggagggagtaattaacaagttccacgtacgtcctagactcatccaaaagtcagaccatcgtatgccaaatataggcttatgtattggcttaaataaatcagaagatctagctagcttaaattacatgggaaaccggacacaattaatttatagctgctgagattaaattacatgagaaaattttcctcccaaagccaacctcatttactagcattcatggctggtgcatgttactcacacatgtaatttagtgatagggctaattaggctaagctatagatagctcctttttgcaattgcatcctgtgtataaattttcgtaccactgcggcttaccttgtcaattactaacacatagtcatcgatctcgtcttcttctctctctagctacctagctatcttcctcaagctttgcaagcttgacacgcagaagcatatggctcccggcgctgcttcccctaaggcggccaccgtcgccgccgccgccgccgtcttcgccgcgctggtcgtcctgtcctcctccctcgtcgcgccggcggcggcgaagatgttctgcagcaactgcgacgacatctgcaacgcctcgtgcgtcaactccgacaccatcgccaagctgtgcgccccgcagtgcgacggctgctcgccggaggcttgccagagctgcctccaggcgctgaagcaggagtgcttgacgggctgcagcgactactgccacaaaaactgcacttaacaacgtatggagtaacgagaccctgcgtgccagcagccttgtgtattgctacaggttgtaatgttaggattctgtttaataaaaatgaaagtgtttttttttaatttttcagaaacttattgagatttgaggaaatgtaataggaggtagcataagtttgcaatatctttgaacttcggcgctagtgctacctttactggaacagtgaggaactcaaataaaggagtaaatatagtgcaaccggttttccattcctataataacaaggaatggacgtgtagacggagttataaaaccaagaattaattacatgcatgtgtatttaatcacatcgttccaataaaaccggacagtgatccactacatgtcaatgatatgcacacccctaatgttgcacttgaagcattggctcaattcgtcgagacggcttcatttctttctttggttcgtactccgtaaaatctattagggcagtcccaaccctccacctaggatggtgtctatggcattaaatacattgctatgtaggatttttagcttatgtggcactatattaattaagagagagaagagaggaagaaactgggtctcatgcaagacacagcttcaacacgagaagctatgcactagacactgtcaagttttgcattgggagataatagtgtcttcataatagatgaaaaataaatatgattggtagagaagagcgatgatgtatttattaatggcccactttaagaaactatgggttgtagagtgtagtttatattatgatgtcttattgacatggtaccatagacactacttatggacactatgggttgggagactgaccttagggtctgtttggtacagctccaactcctaaatttagctctaagagttgggtctggagtggagttgtggagctgcctaaacccagctccacaactctagttcattttgtgagagagctccacccagctccactcccaattttggtggagctgaaactgtttggttgagctccaacttcagaaggggtggagctgaagctggagctgtgccaaacatacccttagtgttggttcttaaatgtaccagcactgatggccctccctcataaatgcccaaagtttttttttaatttcaatttagggaacctgcactgatgtggcttcccatgtagcactaaaggcatttttgggagcaccgtaggaaaagtccccatagtaaaagttatattaataaaccaaaaataatatctacaacagggttaactaatctaaaagaatttgtctatcatctaatgagaggcgaaaaagaagaaggtaaaggtcttttttaaagaaagacctccaagaactgatctaaaggcttcttctatctttagttactgatgtgtgattaatgattgggtacttctatctgtaatggatcacgcataatggtgaactgttatagggtaattaatgaatcattaacgtttaagaaccataagttcctgctccctctgcatccgaaaaataatactatatttaccttttgatatatattcatatatgtgtcacaaggagtatctttttagatgcagggtccatattaggcctcttaacatcacttcatgtttttttcagattttagccatccaaccaataaatagtactcccttctcctccttattttttctctgtatttattaatggaggatatgatagtctgttgacatatttcttgatatgcctttgattttctaaaacaacagcttttttgggatgagggatcgagtagcctaaacaagccgtgaccaaattaatgtcactagatctggtaattggatgcgtgcattgactagatctggtccttgtttatcttatctaattgattcccaattaaattgcatacaaacgaactaaattaacaagtgtgtttattggatccaactacactggtggagaaatcgtttttagtcccggttcgtaaccctcctatagtcccggtttttaaaccgggactatgaatccgggactaaagatccctatctttagtccccgttcaaatacctaggactaccaaccgggactaaagatgggagtgggcaatagtttttttttcatttatttactatttaatctctaatttattttctcccaaattaggtgggatgcatattcctaaatcaaaccctaaaatcaaagtaccatcccaaatacacaaatcaatcaatcatatacactacagattatacaccccaaatcaaagaatcatcccaaatacacaaatcatgtacatctcagatctatataatgagattccaaaaaagaaattatacatctcaatccatacaatgaattacagattcttcatctcaatctatacatggatcacaaattctttgaaaaaaaaagaaaaaaaaaggaagcaaagctgccagccggctgagccggctgccgcctccccggcccccaccgcgcggccctccgcgccggccgccgccgcgctgccctccgccggccgggccgcccaccccctcctgctgcgcacacgggatcgagttgggaaggggagttgggaagggataagaaggaaaagagataagaggaagggaagaagggatgagataggcttagagatggagggagagaggagtttgtgtgaatgagaaaagagtagatgagaaaagaggataagtaatagggattatatagtgcgttttgatctttacttccggttcgtaactccaaccgggactaaagatcctagaggagcctgacaacacttgacagcatgtgaaccgggactaaagatcacgtagtcccgttctacttataaactaggactaaaaaccttctttagtcccggtttttactgcaaccgagactattgtggtttttgatcgaccgggcaaagatggtttctccactagtgctagtaggacctgtcttgcaagtttttagggttttaccaataaattatttggataattacattattagatagctttggataatcttggagctaggcttgtttagagc

SEQ ID NO: 28613 - DNA, 9975 bp, Oryza sativa
tgagagaagatacatggttttttaaagtcactggtggcaccgagtcctctcccctcccccatccgtatcctcttctccatctccccatctcctctcctctccaagtcgcctctcctctcctctgctcccgtccttggatacctctccagtgcgggtggcagatgccactccctccaccgttgagcctcctcctctcctctaccacagccgcaatcggttctattggcccacgacgcctcctcctctccactaatgcagctgcagtcgccgacggtcccctttgcccatgacagctcttcctctcgctgctgcagccaccgacagccctcctcacccgcatcgtctccaccactctcgagggtggccggatctaccaccatgagcacggggacgggtggatccggcaacgcgaccacaggatggcctgttcaacaatggtagcagcggtgacagtggtattctctgtgtgttcttcttagttgattttgattctctctctatttactttggggatggtgtcatatgttgattttgtttttgaatgtcgattctgtggttgtgttcttgggtgatgggagtgatgatgatctcagtggtgatggggagctattcaatgcatcagcttgattcgtggcgatgcattgagctggcatttttttttcattcctgaaacctcaaaggtaccgctgcagggtaccggtcaaaaaatccaacacctatgtccgattcctaacaagtataatcatccttttttatagtgttaggactttgtgtaataaaatgtatttctttattgttattgagaaagtaaaatactttatagcaaaacttacaatatctttgggctttggctaagtgcgatgattagttttgtgttctcttttaattttgcaaacttcggtatggtgtactctcttcgtcccaaaaaaaactcaacctaggagaagatgtgacccctcttaggataatggatctggacagaccctctatccagattcattattttaggagaggtcaaatctcctcctaattaagtttctttgggacggagagagtaacagttttggtttttgctgaccagaaatattcatgcccaagctggcaaggcccatccatcgcttgccagtttcccacagccaattaagagcaagtttaatagtatagctaactactagctccaaatcatttatagccaatgtaatagccaattcatactatagttgtttactacactattaatatctggtcccacctgtcatatacacattacgtcttgaagtccgtgctgtagctggctacagatcagtaacaccactgctcttctctcttattttattctttaaaatatatttatagattatagtctgtattccagctctaattaatgctaaaagtttagtagtggcttctatggtctcgtgccctttgacctcgatggtttcgatcgtctcgttccctttgaccttagattgcctcgccgccagtcatcggcctcccctccttcgttctctgacaaaatttgccaaatgacaaaagtttatgcaatttactgactggtatcataaaagcatgtcatgaataattacggaacatattctgcccaattgaatagagaaattataaaaaacaaaaaacaaaaatacccataaagccacaagcctggctacatgactagttttcctgtcatggcccatccaaaagttatagtgtcttcttgctgaaacgtagagacttgctcccttctttccaaaataaatgaactcctaaaatttaactttgtcacaaatctaatcaatttatacttttttacctatattctaatccatagttcaattgataagttttatccctacagtactcttcacttatcaatatatctattctattatatactaaaagtccattaaatttcctacaaacgtttctaagccaccaagtgacgctcctaaaaacactcctagattgccacgtggcagtttataatctcaccatcaattttcatttaaattagtgggcccattattttaggccattagattagatctattgcttactcttaatattctgtagatatgggtgaaaccgtttacaccagaaaaacatacgtacgtactatggaaagaaacgatcaaacgattaacgaacccttcagcatacatacgcacgtacgataaatagctatattaaaaaaagataaaagaaagatactgttcacttgaaaaaaaaattacttatataagcacgagtaaaaataataaaagctataagacctaaaatatatataagacataaaaaatatatttacatcggtataagaaaatagacgttttttaaaataagattttctatactataaaaacaaaatttattactctacaaataagatgatttagcgtttctacaattactcttaaatcgccacatgcatggctctctaacattttgctatcaattttcatttaaaatgacggaccattattttagatcattagattagcccatttcctcttaatttcctgggtatacaaccgaatgctctattgaaaaaatacaaagacatatacatttatatgataataaagcccaaaaaaactagaaaataaaataaacctttacatattgttccctagaaaaagtacgtacggatacacgagtaaaaataaaagccataagaccctaaaaatatatatacgtcggtaggaaaaaatagacggtcttttaaaaatacgattttctatactataaaaataaaattcattactccacaaatatgatcatgtagcgtttctgcaagcactcttagaatgctacgtggcactctataatttcgttgtcaattttcattcaaaatgatggatccattattttagataattaaattagcccgcttactattaatctcctatgtatacgagaaaccatttactggatgtttgattgaaaaacaaatacaaagaaccatacgtacatacgataataaagttataaagcctaaaaaatatttatcagagtacgtactacgattaaaaaagctataaaacaaaataaacaattagatatactgttcccttaaaaaaagtaagtaatagatggtctttttaaaataggatttgccatactataaaaatataatttatcactccacaaatatggccatgtggcatttcagcaagcactcttagaatgctacgtggtactctataattttgttgtcaattttcattcaaaatgatggatatattatttttggattatttgattagcccgcttccttttaatctcatgcatacgagagaaaccatttagcgatgttcgattgaagcaagttaaactagataaatataaaaaacaaattaaatgtgtttacacgcaaagttttttagattatttttaaattttatagtcaacttataatcaggtgtattcaaatgttgataacatatcatagttatattataactaaatacattatagcacctggagctgacatataataagtaatgtcatgataatcttcaaaataatttcacatcataatttatggtcaaatatcacttaacaattatataacactaactgaaatatacatgcatgaaaaatgaaacaacattatattttttaattatatctgatttaattttagtttgtgtgagattgagattctcaaagtttttttttaatttttcataactattggattggtatgctcaggcaatgatcttgctataatacgaccccttaatccatcacaagaactatggtcatatacattttttctttgccaaataggtttgataacaaatgaacaatcctataacatgagcatgaaactattcatgatatattctcttatagtagaggaattataatataatggtcataagtgataattgatgaatgtaatgacataaaccatagtggcataactacaagtgcacctcaacaaattagttattataaataattttgggaaataaatacaattttagaattagtaaaggtgtctcatgcaattatggacaataggtgatgaaaacaaacaagatgctaaaatatagatctttgtcaaaatataaaaaatgatataatactctgaacattgtcacggtcacgtgtttgtttagctatatatatttttagtgatcaacttcactcatttctaaagatgacattgtatttgtaccataaaaattaagtagttttgattaacaccataaacaaaattgtgtctaaacaaaacataaagaaactatattttatgggaagaaccgaataactatttgcatcatatccatcttctctttgtttccctagagggcaacgagcatagataccacaactatagcatggggcacacatatggttgacttgatgcaggctcaatggaggccacattgataatagtgctcaacttcctacttactggtgcaatcgtctttaagggtgtcgacagtgaactaggattaattaaaattgtgctccacaatggtcatgagactgtgagaggcacgactatatcgacctatgcttgaaggaatcttgatggttcccccattagaggggcatgtctattttttaacggtgctatcctaataactaataaccaatagaagcgttagttttagaatacttatccgtagatttagaaataagtgttcgcataaacatttaggtacatagttgaaataaagttttatgtattaatgatgtattagacttattttggtggtttagatggagttccatttattaaaatcatatctatcttttaagaacaatgataataagtaatggtgataataggagagtttacacttacctggacaaaagtgaattttgattaaatctaagagacattcttatcatttatattaaagtctacggtctatttcacaacataattttttattactacgaggcaaaatctataatttgttatatgtatatggtgagatataacttaattctcttagcattatttatataaacaataaataaaatgcccgtgcatctgcgcgggcttcttttcttgttatttataaattgtggatatttttccttacaatctaaactctctcgagttgatttatttcgagacggagggacttaagcagtattggcttaaatagatgtgatgaagatcttggtaggttcaaatgtactttgtacatgggtagggctgtcaaaaagctcaaggttcacaagcagctcgagttcggctcgttataagttcgattcaagctcggctcgtctgataatcaaatcgagctcgagcttacctttgaactcgcgagcctactcagccgagctcgaatagctcgacgagctccaccttctctttgtttctctcctttatccatcccctctatctccctcctcattgaattcttccatcaacaaaacaatacggtactgtcaaatccatcagagagtatagcatttgtttgacttcttatcttactttccaaagtagtactagtagtactacttttctccatcaaatcatcacagttctacttttctcttgaatggagcaagctcgtggctgagtttccaatagcaagctcgagaaaaggctcgaggctcgaacgaaccgagcccaagcttaattccaagctcgatgtcaaattaggctcgagtctgttccgagctcaagcctacatagggaagttcgctcaagcttggctcgttgacagccctatacatgcggactgaacacccaatttagttacttcaattaggttatttgatatttcctttgaaaaccaccatcttacagcattctacttgcaagctacttgcacatatactaattaggtgagattgagaagataagtatatctcagctttgctgccaataaatatcgtcggctgcatgccccattacactggacaccactccggctagtcaattaaccatcctgcagctgcaggcacaccaaacacacgcatgcacaataatccacacaagatggccaccggcgtagcctcgatctcctacggctgccgtcgccgtcgccgccatggcctgcgtcgtgctggttgtcctctcctcctccgccgtcgcgccggcggcggcgaagatgttctgctggcagctgcgacgagacatgcgcccattcgtgcgagtacaccgacaccgtcgccacggcgtgcgccccgcagtgcgacggcggctgctcgcctgaggcttgccagaactgcgtgctggcgatgagccaaggatgcttgatcatctgcggcgacgactgccgcacacactgcacttaattaattagcgtacgtaaagatcgagtaaaccatgattgtctccggtttccattatttttaacgttgtctagatcagcgcgtactacgtgtgcatgtaagtcaaattttatcaagtatcgttcaggacttgctgtaataaatgggtgtattttcattgttattgagaaaatgcaataggaggtagcacaacttgcaatgtctttggacttggaagacactattgctacctgttggaaatttggtcataattcaatatattttaatccaaaatattaagacaataaacataacatttgcaatttgaatagatctagtgatagtgctagatatgtacaacattagcatgtttaatataaaataagcatcagaatagataaggcaacgtaacaacattgcgactgatagtagtaggaaatgaagaacgaatggtaatagtaaatcgttatatccccgagaacggtcctccgttggagtttgaagcagtattgcctccgttggtgttgacgggagcctccttctccttgtctccaatgttactgttgtcgccggtgttcgacatgttggcgcagacgatgcagaggaagacgaacaaaagcagtcgcgtgtagcgctccccaaaaacttcgcctgtctacccatgcaggttctcaagcggacggagtttcggaggcacctactcgttccgatcacccgtgtgcgcgggatgaacagaaccggggaaacagagagatagcgcaggaactgaaggagagtatcacgtaggaacagcagcaggaggaagattcgatctttgagagcctctgccttgcgttatatatagagagatctccattaccacacaaataaatctctcatttgttgtgaaggttaccacacattgaatctattatttgttgtggagattacaacaaataaatctctcatttgttgtggatgttacaacacaatgaatgtctcattcgttgtggaggttacaacacaatgaatttcatttgttaatggtgactttattctcgtctattacaaaacggaagagcagcaggcaggctcggctcagtcggccgccccgcctcgccacgcccattgccgaggccaactcggcgcacgcgcgcgtgtgtagcagtccaaccatcacctcaaccggtcaatagggaatctccaatatcaccctatttaagttgaggttcttctacctaaattttcaaggcagtattattgtctctaacattacttgtgggctcttgagattttagttgaattaaattgggcctagcctatttattccaacaatccccaccaaatttcatggctcacaacaaatgttctcaaaactgaacctgttagttataccagtgttttgatggagactgttaagttgaacttccacctaggaaaagagctacaccatatcacaactgaacaatggactatgcattgaattgtcagtcttgtgcgattcaggtttcactcaaacccttaactggtactgggctgccgtttgcatcccctctgtttggatcatataagtcatactcctggacttttcatgagtatctagagattacccagatctcatagactataactagcaattggactcatataggtgtgttccttctaagatattctgtaggatgacatctctgctttatgaaaagccactcggatcacattaaggtgtataccatcgtaccatacagaatagaagagaagtacatcatgaagataaactcattttgagggtctcttctctcagttacccaatagtttgttttgccatccaaattcacgggatctccgatcataatggacaggttaccaccattgtgcatctctaagtgggtctcaagcctatctccctcgatgcacagtctatcacattatgtggtagccccttgataaactgatctgccagatttttagccgtcagggtatagtcaaatgctatcactccggagtttttcctctttctaacatacttcagtcttcttttaacatgcctggatgacttcatattgtccttcgaactgttcactttaataatcactgtttaattatcacagttcatcaggattactggtactgaaatttttaaccaccggcaagtccatcaggagctcacgaagccattcggcctcaactgtggcaatatctaaagttgtgagttctgattccattgtctcattaagatggtctgcttgcaagtcttccaggaaacagcgccccctccaagtgtgaacacatacccacttgtggcctttatctcatcagcatcagatatccagtttgaatcactatagccctccagtacttttgggtacccagcgtagtgaattccatagctcattgtcctttttagatagcgcattactctttcaagagcatgccaatgatcatctcccggatttaaaacaaaccggctcaacttgctcacagcaaatgagatgtcaggcctcgttgcactagctaagtacatcaatgaaccaatgatctgggagtatctcaattgataccttgctattcttcaattttttcttaatagcacactagaattatgaggagtaagagctaccttgcagtcactataaccaaagcgactcaggaccttgtccacataatgagattgcacaagtgtaatcccaccctcatctcctctcagtagtttaatgttaagaataacatcagtcactcccaaatccttcatttcaaagcttttggacagaaagtccttgacctcctcaatcacaatgaggctggtcccaaagatcaatatgacatcgacatataaacacaagatcactccctctcccccaccatagcgatagtacacacatttgccaacttcattcacaccaaagccaagcggatataagtgtatcgtcaaacttctcatgccattgattaggcgcttgtttgagactatacaatgacttcaacagcttgcacaccattccctcttgaccttctagtacatacccatctggttgatccatatagatctcctcctccaactctccattgaggaaagttgtcttaacatccatctgatggatgactagaccatgagaggctgccagagtgagtagtactcgaatcatagtcaagcgagcaaccgatgaataagtgtcgaaaaagtcctcgccttctttttgggtataacccttggccacaagtcttgcgttgtactttttaattgtaccatcaggcctaagttttttcttgaaaacccatttgcatcctacatgcttgcacccatatggacgctcgatgactacccaagtaccataagacataattgagtccatctccctgcgtaccacttccttccaattgtcacttaatcatcgtctacataagaatatgcctcttcaatggtacttggagtatcatccacaagatatgcaatgtagtcatctccaaaagactatgcagtcctttctctcttattctttccagtggctacaatgatatcctactcacgattatcctcaagcgtttgatcaatgtgttctatcggcacaaagtgttcaggggataaaatatgttcttggctagaagtgctaggtgcatttttcataggaaattcattctcaaaaaatgtggcatctatggactcagtaattgtaccaacacgcatgtcgggtactccagaattttctattaagaacctatatcacacactgtggatagcataaccaaggaaca

SEQ ID NO: 28614 - DNA, 5272 bp, Oryza sativa
aatgactggtggggtccattggttaatagagagtataatgcggagagtctgttggaatagaatgcaaatttgactctctaaacttttgttaggttggccaaataggtatttggagagctaaaaatgaccactctattaaagatgctcttcgatttgaacttctttcatgggggatacataccgtcttatagcagcttaatttagaacacgatggcgaagaggacactccattagagtagcaaaagagtgcatggttgaattcaagcatgaggcaagcaataagaatcaaataataaaaaaagccagatttggtggagaaacgtcccccaaacatttttttcaaaattttttgctataagatattatgacttcatggacactctgtaaacgtcagagccgtcctaacaattttggggccagtgaaaaatataaatgagaccttattttctaaaaagtaattgattaatacataagggttatatatttggaacggatattcacagccactgtttttttaccactgtttgttctttgatatgcactgtctgacaagcacgtcaggaaaggtagcatcgacctaatactcttttttaagactgtttttagatcgaggggcaaaaaaaatttttaaggtgtcacattgaatatacggatatacatttgaactattaaacatagtctaataacaaaacaaattatagatttcgcatgtaaactgcgagacgaatttattaagcctaattaatttatcattagtaaatgtttactgtagcaccacattatcaaattatggagcaactaggcttaaaagattcgtctcgcaatttacacgtaatctgtataattagtttttttttctatatttaataccttatacatgtgtccaaatatttagtatgatagggtgaaaaaacttgctaggggatctaaataagcccttagatatattctgctattaaacaagtaggaattgtttgcaatcaatgacaactaatggtatatcaaataagctcattcacctgtatattataatggcgatctggttaagtaaaatatcgttgcaataattcattttttcttactaaatagaaaaatataatctaagaacgcatgttcacatccccgtcatgaaactttacgattaccatcgaacacttgtcggaattgagaaaaaaaaacagcttgttctagtggtggagcaggaagagtgaaattcaaaaagcataatctaaagatcataaacatgtcagaacatcaatttcaattgaaacatatggttattaagcctctgcaggcccggtaaatgtaaaaattagcttatgaacacgtcattattataatattcatttctagttgaataaaagaaaaaaaacacataaaaaattttgaaatacatctggatccacatgtaaggtatctatctcaacctctatctccaattgcccttcatcctcagcctaaggccggcgatcacctcgtgatgtggttgttcaacgcattcgaaaggtccaacgttctacagtaaccaaacagaaacatcgaatttagataatcttggactaacctagccatcagaatgtaaagtaatagtggcatatatcctatccatatgagagtaaagttaccctgtttctcaaaaaaaaaaaaaaaaagaaagagcaaagtaccctttaaagtacggataatttttcggacgtcggatggagatccatcgtctcacagccctccccttcctctctaccctctaccgagtcgagcgtcgcgtccgccgccgccggcgccgccgccccccgcctcttctcccacccgcgcgccaccgctctccgccggcgagccgtaacactaacccgctcctccccccgcccacaccactccattttcttcctcatctccggtctgcaaaacggtagttaaacaacggggatatgttcgccgcgaaatcaaaccggggaagaatgtacatggcgacgaggagcgccgccgccaggctgctctcctcctcctccgccgccgccgccgcctctcccctttggtccagacgccggcgccgccatccattcctccatccgccctcccgctccaagaccacctcctcctcctccagcagcagcaagcctcctcgccgcccaccgcctcgcaaggacggcggcgggccgcgcccgtgcctcttccaagaactctccggtctcgtcgccccatccgccagcgatgaccccgcgtttcagcctcggcgagatgggcaggagcggtgtggcctcctcggccatgacactgcgcagtgcgcggaaggtgctcgacgaattacccctgagggagcggctgcggcttctggttctttcaccggtagcgttccgaacaatgacgctcttgggttccttcctgatggtgggattgggcctcgtagcactgcaacaggcggtgctccggacagtgagcaatctatccaggaggtgggcgatggaaatgctggagatgttgagaatatcagtgaggttgtgcatagggtaacagaagttttgcgggcagaggtgcctggattgtctgtggaacagaggctggagaacctgggagttacatatacaccgaggcttgtgagcttggtgctcaacaggtgcttcaagaagaggcatttggggttcaaattctttgactgggttaggcaagttcctggattccagcacaccacggagacgtacaacgcaatgctgtacattgcgggtgaggagaggaactttggggccatggagaagttgatggatgagatggataaggagatgtgtttgaaggacatcaagacatggacaatcgtcatatccagttatgggaaggcaaggcagattggcaagatgctatctacctttcaggctatggggaaatcgagacatgtggcagcagatagtaaagtttataggacgatacttcatgctttatgcaattctgcaaagtccgagcttgctcttgagttctacaaagatatggcaaggaacacggaggttggatctgacatttttcgacttctattgtgttgtctcgcaggatcagataatgctgaaggtgttttttatgtcagagatgatatgattaagagcatgaagtatccagaggagtattgttatctggaagctctacggagcttctgtgtttcaggaaaaatagaagaggctcagaaaatcttccagcagatgatgaacaagtccattgctagctcatctgcatttgaaatcctattgaggggcctttgcaaagatggaaggatggataaagctcttcaagttatggagtacatgaaaagcaactcatctgcgagcagtgccacctttggttctctcattgatggctacctgaggaaaggagagcgtatgaaggcacttgaggtgcttcaggaaatgagggaatatggatgtgttccattggcatcatcttatactcagctcatgcaacacctctttgcatttgatcaacatgaagcagcatgtagattgtatgaggaaatgcaggaaaatggtattgaaccagatgttgtggcaatcacagcactgataggtgggcatgttcgtaatggacatatatctgaagcatgggatgcatttaggaatatcaatgagaatggtcagaaacccacattgaaagcttatacagtgttcatccaagagctctgtaaggcctccaggccccttgaagcactaaaacttctgaaggaaatgctggaatcagatttcaggccttccgagcaaactttcagcaggattatttccactctgtatgacaatcactatttggaagaagctagcaatattgagaggatgcgagcatcttttaattgttgtagccctatagaagagctgcaacgcagaacattggatcaagttgactacactgataaatttgaaaaatcatctggatctggtccggaagagaaggaaaggacagtggagtttgttggtcatccttcgtataaagactgtgaggtctcagggagctttccttgtgatgacacacaggatttagaacaagcaaaggattacaacaatgaagacgttgaacaaatatgtcggattctgtcatcttctgattgctggagctcaatagaacaggctttagagatgacatcaatatcttttactccagatcttgttgatgccattatgaagcgttgtaaggcaaacagtcgtgctgctttacaatttttttcttgggtaggcaaacgatcttactacatgcagacaacaaagacatataacacagccataaaactcgctggctctgcaaaagattttaagcacatgaggcatctttacagagagatgatatgggcagagtgttgcccaacagtggatacatggaatgtcatgatttgtcagtatggaaatgctggtctaactgaaatggcccttgaaacattctaccagatgaagcagggtggctttcagcctgacaaaactacttacagtcacctaataatgtacctcagccgcagaaaagggaggaaagtagatgctgcagtcaagattttccatgaaatgtgtcgtgcaggctatatacctgacaatggaatggtttgcacatatctttctgtgttatgtgagtgtgggatgatagatcgtgctgaaagctcagtagtactattatgtaaacatggattttctattcaggctggctactccatactcattagatcattgtgcaggtctgatagaatggccgaagctctcagtttgttcgataatattaagaattatggatgttcaagaagtgcatacatgtatgggagtctcattcacgcgttgttgaggagggatcgctttgaagatgcttcagctaagcttgcagaaatgaagaatttaggtatagctcaaagcacacatatgtatacctcattcatgatctattacttggggaaaagggatgtttccaaagcgatggatgtacttaaggagatgacagaaaatggatgtgagcctactgttgtcacttactctgcattgatccgtggtcacatggcaatgggtatggtttcagaggcttgggatgtcttccaacgcatgaaactgaagggacctgtgccagactttgagacctactcaatgttcatgtcatgcctttgtaaggcaggtagatcagaggatgggttgcagcttattcatgacatgctgaatagtggtatcatccccagtgcagtgaacttcagaactgttgtccatggtctgaatatggagggcaagtacaagctagctgattctgttctccagtcaaaatggcaattgcggaatcg

SEQ ID NO: 28615 - DNA, 6257 bp, Oryza sativa
gaatgcccagatcagtaatcagaggaacactttatccaatttagagcagtgaactgttgtaacactggctgcatgaggaccttataaggtattccttctttctcttgctttgacatttattcttcattcaacagtgcaacctagctgtgatcgctaaagataccgcccctgttgatttcttaacccgcagcctgtcccttgccattcccctcctctacgtgagctaacctggtgcactcattcttctctaactaggatacctctcgatggcagcagtgctatctccactgatcgtggtccaggatgtagaggtgggtatgtattcgttgatactctactgattagaatttgacgaaccactgtcattcaatctgctgacacatattgcagttaatgtctgttcttcctgcctgtataaacactgtttgatgcatgtagaaatgtgtaccttgcaatgtcatgcatggatcaaaatcagacagctcaagataaggtattacaagcacacttaattgaacaaattcgacatgctgcactttgattgacaattttgagggcaacaccaatcttgatttgagtgaaaacttgctttatgtttctatttgttccatttctgtcttttcacatgcaagtgcaaccttatttttttatgagacgttgctgtacaagattaccagcattttcttcccaatgaacaatacagaatgttgtttcttattaatggttctatccagcaatccagtcttctataggttgtcctgtttttgagcagtattcaggagggcagatccctcccttgaatttggaagtgactagtatattcaatgcgtgcgcatatgcaatgctctttgcaggcacacaacattattttagcttcattgaattctgacatttgctgttttggcaaatagttatgaacctctcaacaccagtctgtgttttgtaggtaccctactttgaatatgctcacttgcttgtaatttgcagtataattgattaaagttcctcctgaagtaacttccatcaatctattcgcgcagttaatatgtgtacgcatgatcaagtttcagtattgctatttgtatcacagttattctttatgggttggttttatttactttgcttcacttacaagactgctcagagattataagcaaagctgtgtctttgtaatatgtgggggtagaccattccttctttaggaaattcctgatgctgattccctgtactggaatctgatagtagaaattttttaagaaatttttttatgctgattccctgtactgtaatctgatagtagaaattttagcactgagccactgactggcgttttaataatcgcagagctcacactgaagtctgccctcatgctctggtcttaatttgtcatattactgatgaaagtcttaggaaatggtatgagcaacaaatgaaccacatagttcttttctattgttgtatggcttgataggtataagtaaagtacctttgttgttgcttgattccttgcaatacatcaactgtaaactatgtgttgaaccaaagttgcaaagttttgctgctattcttgctacttaatcttcgtttctgtgtctgttcagaaggaagcccatgacttgaactgaaaaggtaacgttacaaaagaattagtacaaggccgaaagcaacaggaagggtctccaactgaagagaatagaaaaaaaaaatccagaggagaccatggcagataacagagaggttcaaagcctttgcattgctctatctcaaagaccccgaaccatcctcagttccatttaaaacgtgcttaatagaaaggtaatgtttcagtaaaaaataaaaactaacgttaaagcttgggttacagtacgattacgtcttgatgcaaacttgcaaagtgagagtctgcttccttgataaaaacaaattcctgaagacttggtggtttgttgtttttctacaatattgctttgagttcttgctaaactatagctgtgtaatgtaatgatgtagctaagtttcagattctgtggttcattagtatgcagagatataagcgtgatatttaccaattttctagctctcataatgggttccatgttcaagtttactagtgtttcagtaaagcctaagtggaatcttgataatctctgaatagagaattttgatttttttaaaaaaggatttaaaattctgctaagtacttaagtaccatgccgaactggtacatgctatttgtattttacttatgatctttgtcaatttctaagattctaatcatggatacgacttgtctaggccacgtgtgattcataatggtgactggtgggcgtcttctatggctgcagcactcttggaattcaacttggtaattggtgtgaatcatcaaatatattgttacatggttccgaagttctaggacggtgttgcataattgcagcatattgttattatattaatcattctaagatgatgttttcgcttcaatataccatgtaaggtattcaattttgtgacatagccgtgaaagtttctacctatccatcatttctcaatgaaacgtatgtaatgtatattttgaactcatcatatgggattctgaaatctgaaataagaacgtaactgtgttggctcgaggattcactgaattaacagagttaggctccacaagctttaaacttcaacttgtccatgctttaaactgctttgcacccactgaacttttcaagtgtagcacattttacatataacttattgagcaaagaatgaatgtaattcttggtaataacaaatatcagtttccatttcattgtctgcctagtgctgcctgtatatatctgtgatgaaatatttttacagcgaggagaaatgtggaaatatgtctttccccttcctgcagcattgcaaccatggagtgaagagagcgctggctggttgagtggtggtgaggaagcatccggcattatttcatcctaagagcaatgtagtaaacatgggtcatccaagaacatgggctagcctccacatctgttgccactgtacactttacaattagagcttctttatggtttcttccactgcgcgttcataatacctcattctctgtgtagctttcactgcacggtcgaaatccctcctttcaaatgcttcctggaaggaatgggaccaggtttccagctttctcttaatctgataaaggtgatatagtgcgagcctagaaatcagtcaagcgtatttatgcttcgaaataacaaccatgacataattgtgcttaacagaacctgagattgtatcttctccagggtttgagaatcattggcatcattaactgcttcacgtatctccatcatctgcaaattatgtagaaatatagctttgtttcttcaaattgatcttgaattgaaatatacatgtcatcgcaattactattacttctgtgtgaagttattgacacaagcgtcatggaaatatataaactagtgattaagtggctgcatcagaaccacagaaaaaaagattcaaacaggttacctccataagaagttcaggatcagtgatagtcttttcttcatcaatgggtatcccctctagttggagctgcagaatggttttatatggttgagaagcaatttaaaagatgatgtagatggatgcttacatagatgttccatgtaaaaaaggtcatatgtttacaggtcaagtatattttttatattattttgagtggagatggagatggtttagcctcatataatcataacctaatatgggttaaaatgagatgaaataggctgtattttttaagtattactggaagaacttaccaagtataatgcccttgacaaaggtttgctcagtgtgcggtatgcatcaattacaagtgctgattgctcagcagcaaaggctctctctttctacacaaaacagaagccaagtcacaaattgttttgaagacaaaggtacgaatactatagattggtaagaatgccagggcctagggagagacctcagatttagaatgaactaggtcaggatgtaacttcttctgccagtctttgtatttcccttctaaattgttatcctttatggtgtattccctttctctgccaaagtaatgaagtaaattattgatgtatgattaaggcatagaaaatattgacagaaacttatgcaattgtagaaaattttgaaaatattattttaagagtaaaattcataacgtgattaccatgatggtaccactgtatttatcatgaagcagatcattggaacaaattgtgaatttgccatatcattacaggagaggtcaaacacttagggtggacaaaatatacagtgtggatacaagactatccaactgaaacgctcacgagttttctgaaggggagatttggaaatttaataaattataagcattaagcaaataggtagaaaatcacgaaaccatcaccaaacaaactacttgcgttattacctaaacagccaacatggaaatgaatagaagggaacttatcacttatcagcataataaactatgcagacatattcccccaggtaggattggtggatagagcaagttggaatatgaacttcgaactatatccagctaatcccaattccacctcccaataattcttttttttaatattacagatcagtgcatcaacaatcaaacattatactaacataattgcattgccctagaaatttccctaaaatgacaacatgttttggccaacctaagagtcgcatcaaaatgcacatatcttgtaacaatcattgcaaattaccagtcctattatcgcaatcacatcaaaattgccagtaggataattttcgtcctaaccataaaagctaaagctggtgtccagtttccctttctgcataacccatcaagctacgaacacttatttgcgctgcagatgatacaaagaaggcccaagaacatagaaaccgtccttgtacaagtagcatttcagcattgcaatacataatgcctacgagctgagcagttatgacgatcactgcacaatccaattatacccaaaatacactagaattcgaaagagacgacacgattcattcacaaacaaaagacaataatgagccaattagcatctgattaagtggggatgctactcacaggccaaagatccggaaataatcgacggcggggtcgacgggctgcacgctgccgcaggacccgcatgagaggaacgcgccgctcgcgccgcagctccagcactcgcctccccctgcccggtccgagaggctccgggaggaggaggaggagccccgagcgaaggctgcgagatcgcgggtggtggtggtagaggcggaggaggaggaggaggaggagggcacggtggggacagggggaagcgggttcctcctcctggcgccgcggccagcggctccggccgccgccgcgaggtggaggcggagctgcccgggtcggcgccacatgtggggctttctgcggcgggggcgcctctgtgcggatgcgggtaagtccggcgagcggcggcggcggcggcggcgcggagagaagggggggatatgcggttgagttgagagccaagtattttgtgtgggtttcggtggttgacaggtggggcccctggtagctttctcccgtgaaaaactagtgcggaggtgtgttggttttaatggctttggtttagatcccatcatggcttatgtggacgttaagagcaagtccaataatataaccaattgttggttctaaatcatttatatctaatctaatactctagtcatcctatctttctataaagttatcccccactaacttcttaagcttgacatgcaaagatgccacatcatcatctactaacaagataccatatcattatccactaattaacaagatgacacatcatcatccactaacaatcatcatatttaaacatcatgcaaacatactatatctttatagtttttataatttaagagttttttaaatacaaacatattaaattatcatccaatataattcacataatgtttcaatgtatatctttattatgttttatgatatcctatatacttatatagttcatccttagtttgtgcttaaataattaatctatggtccaaattatttttctccttttttttctctaattaagtcatatcacatcaattatttttagcctttagataattaatctacggtccaaactatctccctactactagcttactttttacatttgaatcaccattctacatactat

SEQ ID NO: 28616 - DNA, 12895 bp, Oryza sativa
agttcaatcctcatttatcctttaatacttccatgcttctgtatgagttgaagtgcaatgccatgttttctttgctagatcctattgttgtgaatacctgttttgcctattgcattgtaacttgcaaatttgttttgctaatgtccaagtgtacagtagaaatgcgaaaacatatttctatcttacaaataattttctgtcttgcaggagtgaatttgaatatttgtctgagttgttgttatctagaacggttgggtccaaattattgattccaggagttggtaatatgaagaaaatgcattttcctgagaaggcaagtcgatctggagacttacctgttgatttctcctttagaacattcaacacttctgttaatacgcaagtcatgttgctcactaaatattcctgttcatatgatgaaattgatttcttttacaatcacccatactgtactgtacagaacataatttaaagtgttgaagcaacaatataatttcttatttttaagatactagaaaaaatgcccgtgcgttgcaatgggtaaatgctattttaattttattgttgttatatggtttagctagggtaaaattcactgtgggaattcgcttggatatttttttttgaaaatcataagctgcaagagtccgtatatcatctcaagttagcatgcgagtttttttaatgatatttcttatacgactccttctgtatttccaaaagcaaatgagcttaaaatccaactcaaacacggatctgtatttctaaaagtgaacgaacttaaaaaccgactcaaacccggatgacataccaaaataccggcaaaaacatcttcaatttttataatagtagagatatggcatattgttgagttaaaacccttgaccagcagaatagtttgttatttttttttcgaagttgaggaaagcatatcataggtcccccttattccctaaatttttgcaggtcacttgggtctctggatttgagtgggtacataaaattgtataagtgggtcaacaaagtcatcctacttttttttttggtatacttgtataagtggtctgtagttgcttattaggcatggtttaaacctgtacttatgcacatacacatgtttaggggcctatatgtgcaattttcgactttagaaacccaacttttagtagtccctggtacacatacttcttttttctattcctacatgagtttcacttgcgattctatctacatttgccacaaaatagcaaagctcgtaccatgaactattttatctcctgacacatttgttgtttataccattgatatgccatatgttccgtgactacaagggtaacataatctcatgctattcattcctgcaggatcaagttgcttcacctgcagaacttgcaaaggcatacatgggttcaagatcttctaagggatcaccattacgtcttagattgcatgacccctctgtactttccaaatcgatagaagctaatacaacacaaataacgaggcctcccaccctctctctgctcgcgagtgcaagaaatcatgctccaaccacctctgatcgtcttgggagcaactacacgacaccaaatagatcagcaatatacaaaatgtcatcatctccttattttaaggttctgttatttcctacttcatttaatgtctaattactttatgcccgcagtatttctgttatgtatttgcacaaagagcacaatagtacatcagatcttgcatatttgttaaatagaaaaattgaataggtagccacagactacttgagaaactcaaagagacaactaaaaatgtattacaccttaatcaatctgtttagtgcagcatggcaatcatcaagttaccttgattcaagtattatgttaccacgctgttgcagttgctctctctgaatttcattagtagaaaataaaccttccatacattattttcttatttggcctcttaaaatcacaatttaacatggaaaggtccaaggtgaccaagttgtcgtatgtatatctagtatatgagttaaatttaattagtgtgtgtgaacaatgccaaatgtgtcttttagcgaacaaatatcagtttatttgttttaagcaatattagaaattttataattgttctttttctatcgaaaacatgtgcaattagctagtgctctacatactgccttattttattctcattcttgagcacaataccctatctctgttactatgtggttacatctctaactcaagttcctcaatctgttcagagtgctgtttcttccagggatttgtttggtactgtatctccatatcaggctccaagcagccttcatacatttggaaggcaggtattaatcacgaaacataatcttattttgctgtaaatttgttttgggtttattaccggcttctggatttatgttgaactgctactgcatgacttttatcttggcttctttgtttgattagtgaatgatttatgacatgaaatgtttggaccttcaatattgatcactgattgactcaccacataattttgttgctttaaagtacacgatacaatgttaattgcagatttttttgatcggatgctgcctattttatgcgtaaaacacaagctattattttgaaatctaaagataaactagacgactctggaatatgttttcttgaaccctctttaatcatggtaaattggtaatagtagttggcaattagtggtgtacctagaagttttctagacttgggcaaaaacaacttcagctagcatctggcgtcatcaagcgctagtggtatgacatgccctccattttgctgtgtgatggtgaggcctggtgtccctacaagtgtcttcaggccctgcatccaccactgtttgcactgtttaccttaaacttcttcaggccctgcatttacactgtttgcactaccttaaggttttaccctactattgtagttaccgaatgcataaatatagcaaacactaatttccaggatgtgatttacagtttatatattgctagcagttagtgacacagtatttggacaatatatattttatgttaaatgaccaatagtgcataacattgtttaaatgcctaataattattttgaattggatacctgtgcaaattttcatggttacataatttacttgtgggctacagtccacttaatgttctttgctgctgtcctacctgcttagatttgatgctaccttgtatgtaacatttactgttaataatgaatcaacaggttctgaagaggaagagtgctgctctcaataacgagagtgcctctgttggtcccatacgcaaaatgcatcagaggtacaacagagtgtcaccactgttgcaaactcggtcaggccaccgtggatatagtggtagtcatgctagcaaacttgatgaaggtttggaacactcagtacaaagtcaaaaacgtaggtgtctggataaagttggtgatattactcgaagtggtgtacatgacagagcaaatgatagcagttttggtcaggcaccagcacagtcaattcaaatggctgcaaagatattgaagcagcttgatacgataattccttcacagaaggaaggcacattagcaacaaggcaaaagcatgtggacatcttagatgttgaggatcctatttctcagaaaactgaagtatcagcacagggcagtcttttgaaaccatcttcgtcacgagttaaggagtctttacctaataactccaactgcgctgctaaatttacctccgccgcaaaagacagcaatactgttgatgctacatctgacaaatcagctaaattgatgcccaaggtaatgtttggatggcacctttttcctcctagggtacataatattttatcaacatactgacattttctttattgtaggattggttggagatggataactgtaggggaagtacaaagttgtcactcaaccaaggaaatgataaaactgagagaaagcaatcaccaatcccagagaataatgatatgagttctggaataataaacaaggagaaacctccaacattgcctttgagaagtcatgctccttcaaatctagtattatccagtgaaattgaccgaaacaaaatcctagcatcatcaaatggcttttcattcccggttccggctgctctgactggccattctcaggcccctccaacacctactttggcatctccacctgtactatctgttgagaagcagcagctgtctgcatcatctagtgcaccagttacttcagtggaaagtattccaaggttagtttctgatcggttgtttgaactgatgtagttacagtcaaaagcatagttttaaatttgaagtacctttgcaatgaaaatgggcaatggttaccaagtaggttaacacataagtacttatgttatcattttatagtgttttttgacttgattgtcgttttatagttgagatatggtagtctgacacatgccaattatgcttcagtttccaatttatgaggatactcacttatttccagcacattaatctgacatgtctttttctccagggttttcaaaccagtttcagaagaagcctcagtttctaaccaacgtgatacaaagtcgaatacagataaaccaccaatttctcaaagctctgggcaaattgtttctttcactagtaatccagtatttaacgtcatctcctcaaaaccaacaaccttaagcaatggcctggcagatacaacaaaatctgcttctgctgctgtatttccttccaatggatcaaccaagtcagtttgttctacaaatgctggctcttcaacaccttcgttcccaaagttctcatttcagcctggattccgaacatcaacctcttcagtgcaatctagcggtattcaagagcctgctataacagctccattcagcactgtgagtagtttagctgggggcagttcatcgccatcctcaatgatatttgctggtgctacttctcaatctagttccatcaccaccagtggcagtgttcccttccaattctcttctcaatctagcagtgaaagttcattagctggccaagacaaatccaaggcagcaagcagcagtgccccttttagtttctctccacagtttggcagtacaagtccgtttgcaggccagggcaaatccaattcagtctcctctcagtctactttgctgtctggaagccaatttagcaattcactatctgcacagacttcaacaagcaattcaaacctattatcttcagaaaaagtaaatcctgggagctcgccaagctttgcatttggttcatcagcaccaggctcaagccctgtgttttcgttagcagttggttctggcactacttctgcaacacctgcttcagcatcttcaccaattttttgcaaccgtttaactagcacaaatgctccaccttttggctcccctgccacttcaccttttagctcaacctcgagccctgtattctcatttacctcagctacgcctacgataccaaatgcatcacctacaacaccactttttggtacaccgagcccgactgttggtttaagtacaggaactgatcagatgaatggaggtcagatggctggggacaagaacccgtttgctttttcagcagcttcaccctttggtcttccaagcagttcaccatccactccaactctgtttagtacgccagcaactcagtttgcttcagctacatccgcttcaccgggcatgttccaatttggccagcatagtcaatcatccccaggtggcttctcaataggcactactggtggcaacagtgaaaagtctgcaagaagaattctaaaagttaagcgaaagaaataagtcacttcgtcctctgtcaaggacaaggatcatgagaacttattacagcctgcattgcaaattgctctggtttttcagggctgaggcgatcggcaaacagaaattcacatttcttcattttataccaggagtgtttgcctgagctggcaaagatgccagtgttttcttttggctgatccgaattttggcacatgagctatggaggtacccaatggactgttttttgaactgaatttttgtatgatttatcctctcatgaaccattgcgaatttgttaaaatttgaatgtcatctgttcttacaaacctggcattgattctgtgtacctcttctactctattctcccatatcgatatatggtcgaacgggtacaatttcatttactctatgccactacatggtcgcatcatatagacgaaggattcctattcgtgttcagatggaaattggattgtagggacaagttatgaagatgaagcattctcgtgtaccatctcatgtatttaggttttaactttttgtttatttcctgtcattcagaattgattttggctcacggcacgagcacgatggcagaaacaccaggaaaaaattgttgaggtgggagtaattgtttccttttgaaagtacgcacatctcaagatatatacgtgtcaaaggtaggtacataggccagatagtggacagacgtacttctgatcgagtacatatacatccagttccatcctctaacaaatctcgtccttagactccgttagattctctaacaagatgaatattaagtgtagcaaaagtgaattttaattattaaaaacttgaaaaatagatttaattgattttttatagtaatttctatgtagaaagttttcgcacgatacaccgtttagcagtttgaaaaacgtgctaacggaaattgaggaaaaatctataccttgttggagtttagtactcaacaattaatcttctgagtaatatcacatatactgagatgagattttgaaccatggtcaaaatacatctaccacaggcataattcttgcttctacccaaatacaaagcatgaaacgtaagttcattaaatcagatgttttctgatccttagatctattcatccaacggctcatactaagagttggatctgccctgcaattagcgatctcccacgtcttagcagcggttagggatcgatcaaagcgaaaaagaaaacgaaaaaagtttcttcgctcgccagcccgccgccgaccgcctcctgccgaagccgctcgccgcctcctcgcgtagtcgcgcgccctacctcgccgcctccttgcacgcaccgggctccgccgccgactccgggcgcgcgcccgccggagccgctcgcgggttcactggcagaaaagcacgcacgcaatttgtaaccccgccgccgtcgcatgccatcctccgcacgtcgctgcgccccccgtccccctccaccgctgacttcgccccatggtgcggccgctacaagccgctgcagccccgtcgctcctcctctgttccctcgcacatcgttgcgcccggcgcccctgtcccctccgccaccgacttcgccccgcagcatggccgctccaatccgccatacctgccccgcgtcatttgtcgtccacgcttccaccagttcggccatatccgacctccagcctcgccagattggcgccgccgccgaccctaagctcgtcgtcgagcattcaccgtcgccccatctgccccgtgccgatccatccctagcgccgtcgccgattcaccgccaccaggtcacgtccatcgtcttcttgatttgctccttccgcttcttatttgtcctttcttttgtatttgatcagaaacggcaatgaattttattttaacacagagagagagagggggtgggacgggggaggggaattgattgaaaaactgaaaactggagtttgttctttagctaggcaccaaagatttctgagagtataattcaccttggccatgtacagggcatcacatttcacatttgtaatgttgatgggaaagctacagataggggcagagagtaactggagaaaatagaaatagaaatgagtagcgatgttactagtgtacatactttatgcaagtcaatgaggatcaagagaaggagaaggtggcggtatcctagctaactggtcgtctcgtggaggtaaaaaaaaattctttgattccagcgaacctatggctatgtttcgttgataacttctaaagatcttcctgttgttcatcctgctatatatggtgttcttttaagtctttcctccaatcgcctccttatgttctactccctccatttcacaatttaagtcattctagcatttcccacattcatattaatgctaataaatctaaatagatgtatatgtctatattctttaccatcaatatgaatgtgggaaatgctagaatgacttatggtgaaacggagggagtattataccagtggtgccgtacctatggctatgatgtgcagtccatatatagaatcaatcactgaaaaaaatgagtttagataagtcacagccattaggactatattaaattagtgatgaataatgtatttgcacattttgcagaatcatggcagtaattacatggtcaggttgtgacaaaaaaaatcagagatacctatgctcacgttttgatcaatgaaccagttgtagacattctcagattttggcaaaaatgcacaaatacactacaaactcaatacacattctttgaatttctgagtacagacagcgaacacattcagaatttcagattgcttcatcagtcatcacagagcacacaaattcagaaaagccctgttgtgagaaatgatgattatcgacacttcttgtgtcttaaggtagctctccagcctctagccacttgatggtatccaaaacaataagatttgcgggctaatcaagtagcaacaaatcagtaccctgaacaatcaatttaagaatgtaaatgcacacaaaaaacagaaaatttcaattcgatcactaggataaattcaaaaatccagacccaattcataaaatgatatagttggtacgaaaataatatatcttcaaacgatatagctagctcttgtcatgattctgatggtcatttaaaatatctatttgtcaagattttacaagtgaacaggatcaatggcttaggttgctttcctttgaatgtagatgcgcgtgctggcatgatatttagaaaataggttttcccttgaatgcacattttattagttaatttaaatgaacaaaatctttatgtattttttcattactttcgagagaagaggacactaacaaaggccaatatagaggtaactttctgatctttatatacaatggtgatcctggcggtggctatcctacccatgacgaggctacccaggtttttgcttgactccctgattgattcagattcttgttgccaaaccattctccttcggggtatcagggctactccagcgaggagcagcagccaccttactactaccttgctgtcgcacaatttctgttcatctgtttactggaagttatgctaattgactaaaactgtgatggtactacacactgacttgacaattgacatatgtattgcctacaatgatggtttattggtgatcatcttcctttttatcatgatcttgtttattatttttgtttatggagtaacaaatggattttgtcgttgtcaaggtagataagagggacatcatggcattgcagggtaagaaagcataggcaccaagcaaaatcagagtttagttacgtttgtcaatgaatgttaattcgtatttatatgccttgatgacctgcttctacagagatgggattaacccatgatgcatatgttctattgaataagaactgcatggtctattatgtttatttatgattaaatatgcttatttttcttcagagcaacatctaaccaactatgtataatctaagaaattgagacatatccctattgtttcaaatttcaaagagtgctatgttaatttccttttcttagattagtacattctaacctttatttgtctgcacataccaacaattcttcttgcattaatgtatagttcttaaattgacataagctttatattatgagtattacacattaaagaaagcatcttatatcagaccatactcaggcttttatgttaatttcttaaatgcaaattaatatggtgtttggttattcaaaagaaaatggaacaatgaaaacaaacgtggattttttcacaagaatttcttttttctatcgaagtgtcattgtcgtgctgttatgagaggaaatacttctctctgaatttattgatcatggcaaatggacatgtgaaattttcgtatgaatgaaacaacagaattatatttttattttacataccacctgtgatgctccacttgtgataatctagattttctatttattttatttttattctcacattgtcattgaaatgatattgtttttgatttacatatatgcacatgattcctcacttcacttccatgcccccaggtcgctacacccatcgccgccgttgccagtccggatgccccagtgaggctggtgccctcgaatgacaccacaagcaagtataatacttcatccattttcttaaacatgctctctatttgtaattcccactcatggaaaggctgctcaaggtcaagaaaatgtaacccgtgaagagactaatgcttctatagtcacacaaacctgtccaggaactaggataggtaccatgtttgtttccataaattgtggatataaactctgttaggtatcatgtttgttctgtagtaggtgctcgatggaatcccccagtgaggaaatttgttttttgttctgtaccagagaaaaggcagcgaggagatctgtgagtgaaaaaaaataacagttcaatgtccaggccactgttaacgatcaaatttggtaagccatgaactagattcggcatcgggatcgaagcggatttgatagggaattgtcttctggaaacagagtacgcatcggctacgagggcattggctgaagactgcatcggctaaatcagacagaagacagccgatgtagctgatctcgttaaggtggttatataatcgtctccgagattgatcaacgtgctgtgcaaggattaccatgattgagataagcacacggatagacaattgtatctattaattaggatattttaaaaagtttatttagacatatgcttcggcaagagtctatcgtgaagacttgttcgtatcttagagtttgttagagataagagtcgtgttcggcaaggaccagtcatgtatctcgggtataaatataacccgatcccatgtaaacatctaacgacagtttaataacactttcggcgcatcgccacctttttctattttcattgtttcgacgagttcttgcttttgggttgagctgcatcaatttcgatcttcaacaagaggtaaaacttgtcatgacgacttgtgttctcgggattagtgcttacatctttatgacactctaatcttggttatgtaaatcattgagttatcatatatgcttcataatatttattaatatcataatctaaccctaaaccggccaacatctatcattggaaggcagctgatagagttagatatcgttgttaatctagattatatagcatatctaccatctttcagaggttttcatcaacctgtttagatcttgtatttatttttatgcttaatgctgcatcggttgagtttgatctattaagtaatattcataattgcaatatctagcttgtcttatgatcatcaatagatatagtatcggggtttcagccgatcttacctgatttagttacctttaatgcttacatgttcacttgatatgctaaatctgtcctttatattaagatcttattgcattaaagtatattagacttgtcgtttgatatattttgtctgttttaatatcttaataaagagtgatatcagagtattagtcgatacatgttagatctatttgatcggctatgctatgaacgtatatataatcttcatcttaaagtacctttaagcataagtgatttatattgtctcgacttactgttcgatctatcccaatcacttggcttaaatatatctcgagaagaggattatatatcgttgatatctatagccaatcgagtagatttaactttatattgctttattcttcattgtcgatctaatgccagtaacatcggttcaatgattaacgatatgccatcggcccttagccgatcggttatcgtttatggatttaacctcgtctttcttgtttttccttcttgttgattgcaagatcaaatcaactggcacgcctttgaacccaagagcaagatttaggacatgcactggagttaagcagatctcccaggccagtgtgtgttttttcgcatcaacagccacccctttatatttacaagttgtaacttcctcttttgattgcattcagttgactctgcaaagtactgcatcactaacgtctgtataaacctaaagttgcattcaagtgtagtgtttttgaacttgttgtggtctatgagctttattctgaaggattatactgatgacgatatattggtgtgctttggatcaggaaggctgtctcatcctactggtcagtcaaggggaatctaattggtagtataaatatcagagaattaggtgatgatcaggttcaacatcacagattcagatattctcactttctgtgttctttaaccagtggcacaatgtgtgctatcaatgtaattaaaatatggatttctatatatgtattgctctttggattatttcagcatttcaacgagttcttaatagacctttttttttcatctgtgcatgcaagaggaggcaacctacttgggatggtggcacctctagccataggtttggaggagggcaacaagcagatgcaccaaagggagctcaaatatgaggaattatgtggcaaaaatgagcttgttggagaggaatctttgtagatatgacataagttcaga

SEQ ID NO: 28617 - DNA, 5299 bp, Oryza sativa
ttgggattccatagaaaggaaatgtatttaacttctcaagaatatattggcaaatataatggtgtttaacttctgttgtatgaattgtacatgcactaaaaagcatataaatctgctctcttatgtgtggcttcccaagtttgataaattgcccaatttgttctgtaactgcaagatgccatgatccagttttacatttatttttctatacgtatgctgatattttgtaggtaaatctagatcattttattgtgtttatttttcctaaaaacacgaggaatcgtgatgatcataaagacaatagcatcgtacaagcctaaagcaaatgttgatattgacattttcccttttgaaaaaaaaatcataagttatgtatatttgtgacattttcaagaactagaatgtgcataaggatttgctagaggcagcaacaagatacctttttttgaagtataggacactgaatttaacaaggtgaaagcccataaggatcaaatctgattttgttttccttgtgttgtttatgaaagaaatcttatataatctggtatgatcaaatgagagtataggacactgaatttgacaaggtgaaagcccataaggatcaaatctgatttcttttcccttgtgttgtttttgaaagaaatcctacatgcttttagttcacatatctagctagggatctcacatgtatccaatagtcatgaaacattaatttgttggttgcagattgctaaggtgacagcattgttttacaattacatttttttaatagaagggataagttattttgtaactatcacttaataattgatatgtttctatttgcaataatatatattacgataacgtgtctttgcacgtgcacgttcactagtttaataaaaaagataagagaacgcacgtactgtatatgtttagtgatgcacatgaagtgatttgaacgataacagacaaatgtgggaaatgtgtgaaatgccctcaaatccaaattccaatcctagaacgtgctcaatcaatgaggggttcatatatagattatagcataatcatagaagatacctgcactctatttcttcaccaataactaattcccgtggaaaattgtcttctgccttaaaggactaggatttggctggctcatattttggattgcagttttcggtccccgtatagaatattctttcggctaattaataaaatttttgaatttttttaaaaatttcaaggtggaattttttccatccgaatttgtcttgcccatctgcttacccatcttgaattttggattgcattttcggtccccgtatagaatattcttttggctaattaataaattttttgaattttttttaaaaatttcaaggtggaattttttccatccgaatttgtcttgcccatctgcttacccatcttgcctatatggacgtgactaggtagagtgcgggttcagatctcctggagttgtggacgaccccaccaggtggatttggccaaatatagaccctccttttcttctacggctgagatcatatctcttaataattattataaaaaaaatctaagttttgcttctactccctccgtcccaaaatagctcaatctaggataggatgtgacccatcctaggtaagttatttttgggacagagggagtacgtccttaggcgtgtagcctggcgcagcggccatggcttgtcagtggcacgcggtgccgacgatggccagtgcgtggcctcggggatataccatacggttctcctgatgaaatgtgttgaatgttgtcgctctgaattgctctaacaagtcatgttgtgtgtggagaaagagatgcatgtttgattagtttattgcactacgtattgatttgttctttgtggaaagaatgtgccttgtattctgtttagcgagagcgtgatcataattatggaggaacacctgaaaactttccctccaaatcgacactaataaatgcaggggaggggggggggggggggaggatgccagctgtagaagcaaacggagggttcagatttagccaaacctatctggtggagttggcctcaactccaggggatctgaactcgcatggtagtgctttagtcctaacagtagaccactccattccatatataattctccctttagtatatggtgcatgtctttttttaacatctttaataacttatatcttttaaattacatattatcttcaagatatatttatattattgtactctacataaaatatatgataaaacaagatccatgttgaatatatttaaacattttattaatttaaaagtaatttatttaaattgtaactctctatagattagaagcaactaagttatgactgagttgaaataagaaattatatgtagagtaaattcacgagaaaaatgtagagaagatttttaattaaatgcatttatgaaagtaaattcaataaagtcttaaagtaatttacataaatcataaaagcaacttaacattgtcgatgtttgatgtcgcgattccggtatttgcatagtatggggatcgttggtactaggatatatgctagattgtaagaaaagagatagggacgaggatttttatacaggttcggacccctgaattgtcaggtaataaccctactcctgttggctgaagccggtcgttgctcttattcaccataatcacaccagtacaatatttggggtagcctatctaactgttgtcgatctggcggtctaaagtgctgactcgtagtcggtagccttcctcctcgaatccacatccgacgagatcaaagacaacgctatgtctctcctgacagtatccgtagacaccgtaggggactagccatgcttatctctgaagtcgatatccagcgtcttgtcttggcgcatgttggcttgtatgttcattttgtgtcttgatctattgttcagtgtcccctctcttcctagggggccttgtatttatacccataggtgtcctcttgtccaaatagaactagagaaaccaatatggatacaatccgagtagtccttatcgtttccatgtagaactctattcatccttccttatgcggaactcctcctatatccgaaggttgtttccgtataagacatggtatgtggtgggtcctgccgagatttagttaactactattaggtatatggtatccataaccttgacaaacataaaatggaagtaagttattacaccattagaagtaaattcgttggaaggagaaaaatatggtctatctaaaaattaaatttaaagtccagaaattatagaattgactagaataaataataaaaataatcattttagagcattatgaatgtttaagaagtaacttagtcaaatctaaaagtaatatatatatatatatatatatatatatatatatatatatatatatatatatatatatatatatatatatatatatatgataaaagtaacttacatatatcataaaagtagttttacaaacataaatatttttgcatcgtaatatattcatgcatatttttcttggcagaatatattcatcgtaatatgcttaacatttttcacagaatattagagaactagcagtgctatgataagggcagccactcgagtaaagttgtgggttggagagaggtgggagcaaggtccactgcgacgactagcagaggagagatgacgtgatttcgttgccgtgactagccaagagtagaggagagaaatatggaatggggtcaaaaccataaggctttggtctgggctcgaagtttcgttgcttcagctccagcaataaaaaaaatgcattggtctattgtaacagccctccctccagaacagcgtagcccaccccaaccgacgagcgggcccacttacacacaccaccccacttacactttcgtcctcgtttcgtgtaaaagggttaacccgggagtgatgtggttggagggaagatgccttataagtcggttccactcgtgctaatctagtaaggtggtactaaacatacgcacacagctcacatgggccacacaggcatacaccccccctcaaaggacccgacgtccccgtcggtccaacttacccagccacacaggcaaatgtccaggaacacaccccctcttagcgcacatccgtacgtccagtgtcgatgccatatgccatgccttgtgcctcacacagtgcgcacatgcgccatgcgccatatgcccgcacactgacccgtacgcgcaaccgcgagggtcggctctgataccatttgtaacagccctccctccagatccgcgtagcccagcccaaccgatgagcgggcccacttacacacaccaccccacttacactttcgtccttgcttcgtgtaaaagggttaacccgggagtgatgtggttggagggaagaggcctcataagtcggttccactcgtgctaaactagcaaggtggtactaaacatgcggacacagctcacatgggctacacaggcctaatccttattgggccgggatgtcacatctattgcttagaccacaatctaaacgataggtttacggtctacagtcatctaaatgttgtttaattgtgtggtctagatggtctagttgaccgactagacggtcaaacggtctaattcacagtttaggtcctaaactagacgataacccgtcgtctagcgtctagacgcggtctagaccgtctagactatggtctaagtgaacattgccttgcctccgacgatccaactcataacgaactgggaaccattcggaaagctgctttcaaaggtaaaaatgaaaatcatggcagatatgctactgattattgttggagtttggcttcgtgcacaagagattgccaaaattctcaggatttctagctattgtttttctttcttcaaacattatcatgacaatttggattatacttgagatataaatttcagaaaacacccaagcgtagaaattcaggttagactaagaactgctagtggaacctagctttaatggtgaactcgtcatctctaacatccggcgttgctgctgcagtggtgggtgtcactagaacggataccctcatctcaatcgggtggtaagcccatctcaatcgggcatggcgtcactgatgtgaagagctatctcaatcgggcaaacggccgtcatggatgattctatctcaatcgggccctaagtaaagcccgtcaccgatagctttgacccagacgaccagtcaaactatagcccgtcacagatgacctatctcaatcgggccacaactagcgcccgtcacagatgacccttat

SEQ ID NO: 28618 - DNA, 9411 bp, Oryza sativa
atcatacatgtgtgaaacaactatcttctttttttctttcttttctattggtacataagggtagaatggtcatttcattcataccgttgcatgtgaggatgatttggcatgctcacgtgacactttttgtgggtccaagtactatattaacccaaatgattaatttggagaactagtttagacaatttaaaacctcaagtactaaactaagtccgaaacgaaacttcagagaccgtattagctattcacccttttcttttccccacaagctcttaatggcctctacgtacccttccatctgggaattgaactattgatgtataaaattcctttgaaaccataatgtgatattttgcatattccagatagggcgcaaattaattaggaacaaagctaaatttcggcggagtacgtaaacatatctgtgtgagctttattacatagtttaattgatgagataactatcagtaaaatattggtcctggtaaacgtattgactagaattggtccatcgatcgatcttgagataatatagagtaatttttctctaggtctgcatacgcatgttgttcattatcgtgcgtacgtgcatcttattacgtctgataatttgtgataatatataattcagggtaagaatatcctgctgtgtgctgaccattgacttctttaggttggattaatcataattattgtttcgcttatgttgatattataaaccttacaggcttataatatcatcattattgtttagcccaaaaaatggaaaagaggttaggaaattggtctggttgttctgtctctcatgcagggagagctgtacatatcaatgcctgtctctcatcgattccctcgtatgctatggggttctatcagctgtatgaggggattcatcagaaatttaattcaattcgaggtagatactgctgggctggtaacaaacaagggagaaaataccatatgatgaaatgggcagatttgatcttcccaaaagagtttgtagggttgggtcttactgaaactagaatgtttaacattgctttgttggctaaatggttggttaaggttgaatctcctgatggtagtctctgttttgagctattaagaaagaaatacttgtgttctgggggagtctttcagtgctctactgaaggtgcttctcagttttggtctgggattcttaatacaagaaaatgaatgatgcttggttctgaattgaatagaagattggtgatggttcccatatttggttctggctagatgtttggtatgggtcttgccctctgaaaacaagttttcatgagatttttgagatatgcaaccaacaatcaatcacaattctgagctgaaacagataggtataggtggtttatcttttaggagaacttttggccctctggaacttgaccaatggcagcaggttaggacaatcctagaagagctagagttgactgactctcctgatattttgaaatggggtttgacagctagtaagagatttactaccaactctttatacagagctatggcttttagatgggtgaaagatgagatgctacaactaatctggaaatctccctgtcccataaaaattaaacatttcctttggttggcaagtagagataggatccaatcttgtgaacaattgaaaaagaaaggttgggatggttcagaactttgtatgctatgcaatactattgaatctaccaatcacattcttttaactgtccaatggcaatttttgcttgctgcatttgtagagatgttgtgaactgggatactgtcccctgcagctttgaagagtttttcttgctaataaaacataatgcttgtagtaatagaagagctttggtttctttgcttgctgctatctgttgggttctttggaccacaagaaacaatatgatattcagatctcaattggtgtattcccccctaatgcttcctttttgtattgcttcttatttgctgcagtggaaggttttagggcatactgaagaagctagcacgatgatggttgtggcagagaagatgaagaccgctgctgccaactctgaaagtgataggctgggtattgggtgatagattagttaagaggttccctaagttgtggcactatcctctatctactgaagttgtgatgtttgaaatctgcttgtactggcagcccttttggttcttttagttgtgttgctgcttttagagctggtagtaagttttggagtctgtctgttttcctttaggagggctttgaccctccctacgctgtaaacctggtgtctagattttcccagcacaaaccttttggctttcaataggcttatgagcaataaaaaataattcttaatgataatatgtttcttagcaatttaaaagaaaatgttagaaaataaactacaacgaaagaaaacataagatcaactccaaactgatgtttaaaattcaaaatttgaatgtggcgtaattataagccgaagggtaatcagtgggtggctagctaggagcatgtcaccattgaaagcccgttaatggagagatattgaaagataacctattatcgtaccctgctgacaaccaaattaagctagttcaaattaatgaagtttggagccaacagttgatcacgcacaccgactgggcaactgacatgcatgcaatctctactatgggctccttcagaatttattccatcaattttccccttttgttgaatttgttggttggctggttatgattttttagggctatttttcgcaccattgactattgattagaaatacctggcaagctaagtaatcaatttgcatttgacgtactgtaaatctgtaatcagggtgtgaaaaaccgccggtaaccgcgcggttaccgcggttaccgcccgtaccgcgggggtacggttacccgtaccgcgcggtacggtttaataaaattcgtccaaattcaaaaatttaaaaaaaaagaaaaaaatcaaaaaaaatagtgaaggtagtgcttgatttatagtgttttatggtgaagaaatttctcaaaaaagagtaatatttattcaaatttgagagcaaaacggagaataaatttgaaaattggaaaaagaaaaaaaaatgggccggcccgttactgtgcaacccattacacatcgcgcggtaaccgcgccaaaccgcgtggttaccgcgtcaaaccgcgcggtaaccgcgccaaaccgcgcggtttgcccgaatttttgaattcaaatttcgatttgtaaatttgtcgcggttttgcgcggttaccgcggttaccgccgtaccgccgggtggcggtaaccgggcccccagcggtttttgaaaccctgactgtaatcgtatatctgttattgtaatggagatcaacatgaatgtatcggagttgacttgactcattgcatttagacttgcaatgcaaggagaatatatatcacatgcatcatggatatgattaattaaaatccttgtgctgcactgctggctaagctagttgctgggccattttacttaatttggtacgtacaaactgcatggagaaaattatttaatgacgttgtctcaggtgatttatatatgtgtgtgtttaactaaatcagaagctatatttgaccttacaagcacaagaggaataacggcacatagtttgaatgaactaatatattatgtcataccaccctccatctttgaagtcaatacagagatatgataaacgacgaatacggtgcatgttacctgcacgcaaaatccagtgatcgatacacacagatatatacaagtacatatattagcaagcttcagcatcagttgcctagctataaatagcgtcattgcctgaaattttccctatcacatctcacatcttaattcctcttctgaccaagatccaaagaaagttacaaagcccatatgatggtggcctcccctgtgaaggtggccgtcgtcgccgccgtgtgcgtcgtgctggtcgtgctgtcttcttccccggcgccggcggcggcgcagatgatctgcagcaagtgtgaccagtactgcaactcgtcgtgcgccggtgggatgggtggctgcagcggcgcctgcactgacccagcgtcctcctcatgcacgagctgcaagcaggcctactactacaagtgcatgaactactgcggctcctactgccgctccaactgcgtcaacagctgaaccaaatattatatgcgaattctccccctgaattagaagcttgttgctatggctccatgtagataaataagcgaatgctagctgcatgcgcgcttgtgcttgcatatggtggatgtatgcccctactatgtacaacttcatatatatatgtgaaagttgcatgtgtcttctgtcgaaaaatgttccgtcgtttcttgtacgtaactcggtcaatcagttatgaaagatcgaatgtaataaaatttaacagaatagattatgatctatgcgatatcactttacaaacatatgcacgtaatttctatctgcaagctgttttaaccgtaagtacaaatatatactccgttaagtagtatgcacatatcgatccgcaaccagtgggccgtgcctgcccagtctgtttgcatctccttcttgggccaacacctcatcttgtaggtcggcacgggtttggccttgccagcccatatactttttccatgtaattttctcaattttcccgatttccttcatatattcctcatatttatcctatctttccaacatattttctatatttcctaaatttttcccttttttccctcaaatttcagttttttgtggaccacggcaactggtgggtcggccgacagcccgttttttagggtttgcaattttgcccccacttttccaaaacaaacaagtcgtttgcccttacttttaacggctgttcgatagaccccacatttttgtgttacagaaaggcaaatgaaaaaatcaaaaaagtgtgcagtgaatagatagggattgagtcctctcctgcccaccgagtgtgcagtgaacaacaaaaccctagacctacacggcggcggcggcgagcgtgggacgacactccggcaagtctccggcagggcggcggccacggggcttcctacggcagccctcctaggcgtggagagtcagggcaacgtgacttcctgtggcaaccgctcccagacgctacacggcagggcaggctcgtcttcctgtggagagcggtggccaggcgcgacgagcgacggccagtcacggcggctagggcgtggggcttgctgcgcccttgcgcggcaaatggggtgatttcttatagatagaaaggagggaaagatacataagttagattgcaaatctcctaagtatttgaagatcttatgctagaaattctccaaaatgtagaggaatttctctatatatcctatgaaattcctttgacatctgtaaaaccaattctttcctttcctccaaaaaaaaatattacactagctatatcagccctaaatggagacatggactgtttatccatttttgaatatttatatgcaagcttacgtaaaacgacttatatttattaggaacaattttgttttgctcctactttaatgttcaattatggttttgctcgtgttttttttcgagttttgggttttttgcccatttttttcaaatgaaggaggtgtttactctttttttatggaagttagtggacccggcccggaaactggaattgttaagataacaaaataataagaataaagaggaataatcattttggaatttattgatttacctttctacccctgatatacgtaaaagaagaaaatgagagcagaaatctgtctcctcaatcggccctgacgctgtttcccctattcccgaaccatacggtccaggcgacgacagcgacctgcctaggtggcagtggccgggagacggcagcagcggtggcggcggcagccacccagccagcaaggtggccggagtagttggccgtggtagcgaaccctgtacatggcgggcggggagcaggtggcaacagcggcgactccgcaggcagcctcggcgatgaccaatgtgaccagcggcggggaggagaaggtcgcggcgatgactccgtaggcagagcgcggggagcaggcagcctaggtgaacgtgatcctgcagccgtcggctcgactcagcagtgaaggagcagcctgtcaaagtgctgtgactacttctgctagctgtgtaaaaagatgtaaaaattatgttttcttttactggaaaaattatgtttaatttctactatcaaatttgtgatagttctattgatattctgtcaaaattgttatatttgtcaaaggttgtcaaaaatcatttgattttaaacatctttaaaaaaaatcaagttcactagtacacaaatactcattggtgctggttagaaaccgtctataggtgccggtttcccaaccgacatatataatagcaaccggcacctattagaaatatacagccggcatcttaagctttgctcgagcaaaaaaaaaaaaaaaaaaaaaaaaaaaaaaaaaaaaaaaaaagagagagccggctcattcgagtcgaactcaccaacctcacatcccattcatcaccgcctcctggatcacatcatcaagaactcaacagcaaacctggatcacatcatcaagtactcaacagcaaaccaacagcgaaccaccggccaaacttaacaacaatcacattaattgaaatcctacatgcatcaagaactcaacaagttcacatacatttgggacatggatcaaggaggagaaaagagaggaagacctaaacaagaactcaaaaacagtgcgccaccgctgccgcatgaactaaacaagaataaaaaaaaaactaaacagtgcgttgccgcttccgcatgaacttgggccgccgctgctgcctccgccggaccgccgctcggttgccaccgcctgagagaagagagagagaggccacccgactgcctccgcctggccgccacccatggcctgccttctcccttcccgccggaccagggaggccgcccaccacccgccgtgcgccaccgtgggggctagaggtgccgccccaagcccgccccagatgcagatagctagaagggagagaagagaagaacatgggagagagaagagaagagcccgccgccaccctgcctccactgggcagccgctgcgagagagacgggtacagagacgcgagagagagagagggagagatatgcgagagataggaaaggcgagggagtagataaggacgcgcggtgggtgcagtgcgcatgcgtgcgcggatggtctcggctcgtcggcttggctcaaagttataggtgccggtttttaaaaacaacatataggtgtctgttctttaagtctttaattaaccgacacctataatatattatatgtgccggttcttttaaaaaactggcacctatagtatatgtgccggttctaacatggttaaaggtgccggttctatattttttcattgctcggaggtgggaaatgctctatagatgctggttttaaatgaaccggcacctatgagctagtccctatgagggttttttagtagtggttgcgagctgcatttacaatattagggggaaaaacacaactaatgcacaaataaagggacaattttgtaacagtaagtaaagacatatataccttttcacttcacaccgtcaacatatccctccaaaataaagataaaatttggctccgtttaaaagaactggggaaaaaatctttaaaaaaaacaggggcacatatccaagtaggggtaaaaataaaattaccgccactaccggagaaatgatctttgttgggtcactcaaaaatcacattagtcctggtttgaaaacacaccggtatttttttatctttagtcccggttagtaacaccaactgaaactaaatattaattttactctcgattcaaaaacatgtcaaagccctattttttagtcccggttggtgttatcaaccgggactaaaaatagatctttaatcccgattgtttataccatccgggagcaaattaagttaaaaaaaaaatagtgcaccaccgagccatgcgcgcctcatcatatttagtcccggttgtttataccaaccaggagcaaagttaaaaaaaaaccgagcaccacctagccgcatgcgcctcgtcctccccgcctcatccttatcccctccactccaactcttcttccagtctcatcctctcatctcccctccattttctctaactccttcatctcctccagccctccccctctcctccccttcctcccccttcccctctcctccccctcccccctccctcctctgacgtcgacgacggtgacagcgggcgccccgcagcgcacgaagcggcagcggcgcacggccggcggcctaccctccgccatatccggtgggagggaggccgggcagcggcggcctagcggaggcggccgggtggcggcggtcgaggggcggaggccgggaggcggcacacggccgggtggccggcggtggcgtgttttctgatttttttttgaatgatttgtaatttttgttgtagtttattttagatttgaggatgatttgttgtgcatgatttctgaatgacttgtggattgtggatgatttcgtggatgggctgagaattgtgcatgatttggggatgacttgttgtgcatgatttgggggtgatttgtgtgatttggggatgatttgtggggatttgagggtgataataaatgcaagaataaaaacaaaaaaaggaaaccggactaaaatggcgctagaatctttagtcccggggactaaagatccatttttactctgggttatttcatccgggactaaagatgggtatctttagtcccgaattggacgtctcggttcattacccgggagtaaagggggttgcgaaccggcagagatgcccatctctccagtagtgcgctagctatgtgtaatcataaaactatatctagttcccaagcttcactggcatggactatccaaaagtcagagcagatcagcagacatgttggcttaaatgaatcaaaagatctagcttaaactacatgcatggggtcatgaggaatgaatcgaaacacaattctgtgagattctttactcctaaaccaaagcctaccatccatgatgcatgttacttccacatgcaaattggtgatagaataagtagctagtagcaatatagtggcatcgaactctcgtttgctgcctataaatggagtcgtctgctcactggtggagaaaccatctttcgtcggtcggccgaattccacaatagtcccggttgcaataaaaaccggggctaaagatcactaaaaatgatctttagtcccggttaaaaagggtaacgggcatatttgatctttagtcccggt

SEQ ID NO: 28619 - DNA, 1689 bp, Oryza sativa
ctactataggcgaattcgagctcggtacccacattatatgagagattgtcctaatcagaagaaggtgttgatgactaaagaaggctttgtttctgaaaatatattaaaaaattcaaaagggggtccacttggtcatactcttactacgggctatcgagatattgatgattcatctatggatgatggtgctgaaaagaataatggtttatctatgcttgcatatgcagttcagcgagatggctctaatgttgatgcaaaggggcagcgctgtaatatttttcagtcagagtgcaaaattcaagagaaggtttgcaaattaataattgatggtggtagtttcactaatgctatcagtttagacttggtgtatgctttatccttgtctacacgaaggctttctccaccacgttatattcaatggatgaatcaagcgggcacacagaaaattactcataaagtgatagctatcttgataaagtggattgtgatgtggtgccaatgaatgcttgtcagttgttgttggggaggccatggcagtttgatcgtaatgctacccatgagggcagatccaactgttattcttgggtaaattggaaccatgccattataatttgcaaagtttaagatatgccattggtatctcaatgacatgtagaacccatatgagtcaatgacatgtgggtcaggatggcatatctcaaattttgcaaaattacaatggcatggttccaattttccgtattcttttatgcatcgtggtgttaatgaagtgttgaatccggaaccatgccattttaattttgcaaagtttaagatatgccatcggtatctcaatgacatgtagaacccacatgagtcaatgacatgtgggtcaggatggcgtaaaattataatgccatggttccaattttccgtattcttttatgcatcatggtgttaatctagtgttgaatcctatgcttgatattgacatcaaagcagagatatttcccaccgtcaagaagaagaaagaagtggctgaaattaatattaagccgaggatggctttgttacaagaggggaaggataatatgttctagactactcaagtaatatcagtcggtgatttgcatatttttataaagtctggagaaggccaaacaatatttcaagatccatgcagtgtaccagtgccaacagatggaattaaaatcgatgatatcaatcatcatggtgagggttaattagacctagataattagccaaggtcattaggcatcatggccacattattttaatatatgttggacctggtttgtaaaggcctatttagtcactatattaatttgtttattgagttgcagtcggtgttggtctgggcctgcgagcctgtgttgggtccagtactagtgcttgcatgcacgtatacatatatgttaggtattagcaacaggaggcagattggttttcctaaagttcatgtttagggtttggtccctgccgaactagctggtggcgatcccatcagcttctatctgaatattttgccgcctgataactgattggttggagaagaaacaagatcaggaagtcttacctggttttgttgcttggtacatgtgtgtgcctcctcttctattcgtgtgtgaaagcacgggtggattagattctgagtgctttggtatatcgtcatcatattttctgaattaa

SEQ ID NO: 28620 - DNA, 1518 bp, Oryza sativa
gcacttgtgaaaatccatgggaacaaacacgtgcggcagtggagccaagtggtacagggccctgttgatatttcttatgatcacagatagaatccgcaagcgcacggatataccgatgtaacatttcctctacggagtattccaagggtatcgaatccaagggaacgtgtgtgattaattcttcctccggttcatccaaggacaccaagcaaaggataggctaggatagagaggatttgtcctgaaacattgactacggatgaaggagcttcttttatgcctaaggaagtgaagacttttgctgaatcttatggtattaagttattgagttcttctccttactacgctcaggctaatggacaagccgagtctagtaataagacattgttaaagttagtcaaaaagaagattgaggaagacccaaataagtggcatgaagtgctttctgaagcattgtgggcacataggatatctaaacatggtaccactaaagtcactccttctgagctagtgtatggtcaagaagccgttttaccggttgaggtaaatcttggctctcttcgggatatcaagcaagatgatttgtcaagtgaagattagaagacattgacgggataaaatcttgatgaagtcatcgacaagcgtttgaaggctttggaagagatagagaaagagaagaagagggtggccaaagcatacaacaaaagagtgaaagcaaagttgtttcaagtgggagacttggttcggaagacaattttgcctttgggtactcgatccagggagttcggtaagtggtctcctagttgggagggtctttatcgagtatgcggaattgttcgagggaacgcgtattttttggaaacacattttggaaccatggttttgtgatatagtatgagatataggcgaacctttggtttctatcccgagatggacgtggaagagagcttgtagagggcaagaccaacccctatataagggacaaggtcggttcattgtgaaaagacaatcaataatcaatcaatcgaatcgtttttcatattgcttttattttttgcttagtttgtccatcattgtcgatttgcgccgtaaatcgtccgccgttactgcgagagtgcgacacctctttctaggtttatcctgaaaaccttccgttttatctacgagacaggtagttatctatagttctatctagatcggctctgctagccggtttagtttatcaaaacccatcttgatatagtgcttgctagattagggtggttggcgactctactatcactgcaaagctttaggtgttgcgatcgtgcttgtcgacttgtcaaaaaagttaccaacagtatgcattgctgcaaactgcccaacatcatttggtatggttagttgttctgtctaaataaggtgtatacaagtttcaaaactgataaataatccaaccttaccatttcacttttttttttacttcctactctggaatactgatacgtgttttcgtttagtgtgcaggcttcttggatc

SEQ ID NO: 28621 - DNA, 1462 bp, Oryza sativa
tcacgatatcgattaggctcaaggctagatatgtgccatcctctaatagctcaatcattcacttgaacctgttgatagattatataacttgtgattgactactcaatcacctttggcatggtcatgcacttccataatctacaacatcgaggggcccagagatatctctctataggaggggcaaatcccatcttgattattcatatcccactacatgtttcatagcatactcaaaaactacttttataactacccaattacggagtagcgtttagctgtccctaagtaagctactacacatgttgggaaccatgataatatcaggtctatggattcaacaccaacactaaatgagatcactgatgacacaacacatatggctcttgcagtgtctcatgttgggtctattcaacaacatgttcactaacatgtgtccacattattaatttggtatctctataccatgatccatgagacatgatcatcaattaatacatgtgttgatcatctaaacatatttgttccatatatgatatttgatcagggatcctttagaaatagcaacatataacataaagagtctcatgaaagaatcacatattcattaaccaataatgagtttatctatttcaaggaacaaagtcagataaatatgtaaacatagtgtgtgatacaatcatctctataatagcctctagggcatatcactaacagtctcccacttgcactagagtcaatcatgaacgtatcttatacccattgccctagtgtgtgcctcatgtttaggctgagggagtggctttgtcaatagatctgcaacattcaaatccgtatgtattttgcatatcttcacatctcctctacccactatctcgtgaatgaggtgataccgccgtaaaatgtgtttggacttttgatgcgatctatgctccttggcttgcacaatggcaccactattatcgcaatagaggttcatagggctagaagcactagtcatcacacctagttgagaaacaaatttctttatccaaacctttgctgcttcagaagcggcaatgtattcggcttctgttgtagaatcagacactgtatcttacttttccaactcacagcgcgtccattcaggcagaacacaaatccagactgcaatctaaaatcatctttgtcggtttgaaagcttgcgtcaatgtaaccatttaccacgagctcttcctgtcctccatagactaggaacatatccttagttcttctcaagtacttaaggatattctttacagctatccagtgactctcacctggatctgattggtatcggcttgttgcactaagtgcatatgaaacatctatacgtgtacatagcatagcatacataatggatccgattgcccaggcatatggaatcacactcatcttgtttcgctcatcagtcgtttgaggacactgattcttgccatgattaatg

SEQ ID NO: 28622 - DNA, 710 bp, Oryza sativa
gggtcttactgaaactagaatgtttaacattgctttgttggctaaatggttggttaaggttgaatctcctgatggtagtctctgttttgagctattaagaaagaaatacttgtgttctgggggagtctttcagtgctctactgaaggtgcttctcagttttggtctgggattcttaatacaagaaaatgaatgatgcttggttctgaattgaatagaagattggtgatggttcccatatttggttctggctagatgtttggtatgggtcttgccctctgaaaacaagttttcatgagatttttgagatatgcaaccaacaatcaatcacaattctgagctgaaacagataggtataggtggtttatcttttaggagaacttttggccctctggaacttgaccaatggcagcaggttaggacaatcctagaagagctagagttgactgactctcctgatattttgaaatggggtttgacagctagtaagagatttactaccaactctttatacagagctatggcttttagatgggtgaaagatgagatgctacaactaatctggaaatctccctgtcccataaaaattaaacatttcctttggttggcaagtagagataggatccaatcttgtgaacaattgaaaaagaaaggttgggatggttcagaactttgtatgctatgcaatactattgaatctaccaatcacatt

SEQ ID NO: 28623 - DNA, 1004 bp, Oryza sativa
aagcactagtcatcacacctagttgagaaacaaatttctttatccaaacctttgctgcttcagaagcggcaatgtattcggcttctgttgtagaatcagacactgtatcttacttttccaactcacagcgcgtccattcaggcagaacacaaatccagactgcaatctaaaatcatctttgtcggtttgaaagcttgcgtcaatgtaaccatttaccacgagctcttcctgtcctccatagactaggaacatatccttagttcttctcaagtacttaaggatattctttacagctatccagtgactctcacctggatctgattggtatcggcttgttgcactaagtgcatatgaaacatctatacgtgtacatagcatagcatacataatggatccgattgcccaggcatatggaatcacactcatcttgtttcgctcatcagtcgtttgaggacactgattcttgccatgattaatgccatgtgacatcggtaagaagcctttcttagaatcttgcatgttgaacctcttcaacaccttgtcaatgtatgtactctggcttaatccaattagcctctttgatctatctctatagatccttatgcccataatatatgctgcttctcctaagtccttcattgaaaaactatttttcaacgatgtcttaacggattcaagcataggaatatcgttcccaatcaataatatgtcatctacatataggattagaaacaccagtgcgctcccactaatcttcttgtatacacaaggctcttcttcatttttgacaaagcccaacgccttgactacttcgtcaaaacgaatattccaactccgagatgcttgcttcaacccataaatggatttctgcaatttgcatatctttttagctgattgtggatcaacaaatcccttgggttatgtcatgtacacatcctcatcgagatttccgctgaggaaagctgttttgacatccatttgccatatctcatagtcgaaatagg

SEQ ID NO: 28624 - DNA, 729 bp, Oryza sativa
actacggatcaattgatatgaggtgcaccaatcgaaaaggcgaaagtgaaatacatgtacgaactcgataaaccgcttatcaagcctgagcagctgcagttcctacccactcaaatgtacaagttccatcaactgtacatggagatgagcgccaccggtagagagatgatcagagcgaggatcagggacacggacttcttgcaaggagatgacattctctggatcaatttcaagggtatctacgaactataccagctggacgccctcgacgtttctattatgagttgctgcattttgtaagtatcgttcagttagatttcttattacgtttcctttaaataattaggtccttgtatataagtagactatatataatatatacttccttttatcgttgtagaatggagattcaaagggcccgacggtggggggttttcgatactggattcatcgaccctcggaaagtaaacgtcacagtgctcgaccggtatctgcaagacacagaggacaatctcgtccatctcctgaaggcgcagcattacaagacgttcatactgttgccgtacaacacagagttagtttaattttactgtcttcctataccaaatttcattcccgtacaaacatgctaagtgtttcatatataatgcatcccacgcacattgcagattccactgggtgcttttactcttcgacctggaggcctgcaccgtcaacgtatatgactca

SEQ ID NO: 28625 - DNA, 2832 bp, Oryza sativa
ttttgcgttatccacttaatgattgcggatgcctcgacaagcatctctactaccatgcgaacattgtacccagcccacaaaaggtcaatattctaactgcattacgtgcccaatgctactgactatatgctacctgatctgggctctgctttgctctacctccaccatgactgcgagaaatgcattgtgcatggagacatcaagcctgcaaatgtaatgcttgatgtgtcacacaatgctaagcttggtgacttcgggttagcaaggcttgttgagcatgggggagagccacaaacaacacaagttgtcgcagggacccctggatacattgacccagaattcatcaacaaccgctggcctcgcaccgaattggatgtgtacagcttcggtattgtcctcttagagatagcttgtggcaagcggccggcatcgaggcagctgccaaatggagcttcatcactgctagcctgggtgcgtgatttgtatgaccagggcaagattcttgacgcagcagatcagagactgaacggcgagttcaatcagcagcaaatggagcgtgtgatcgtcatgggtctctgctgttcacatcaagacccgatccagcgaccgtctatcgtgcaagctatggatgttctgtgatctgcagacgcagagttgccggtacctcccgcagcacatgatacaggacacatccggtccatgcaagaacaggcttatgccgacctgccagttgaggatcattctgtgcatactgtcacccgaagtacgtattttacttccaaggattcagtttatctacttgctgaaggataacgaattctctcttttgaatagcaatattagttatgtttacatgcgcctgtttagattgttttgtcaacaagattgctgataggcacacatctattttgttcatagttttgtgctatctatctatctattatccatctacacatgtagtataaatgatagtttcatatgaaccagctctattgttagcattaatcctgacttacatattttaaatatctgcagtagttagtcgtgtatgtgtgtcatgcacgtagtggagtattgcatatatgatgcatgcatataggagattagatctgtcacagccatgtacttggtgattagttgaccgagtaattagcttgtgtagttagttgagtgcggcaagttagcagatagttagttgcatgcatggttagttggacgagtgggtctcgtaatgcatggagttagtggctcatgtattcaggtagtgcgtgcgtgcgcatgaagaccggcaacagttcgtgcatgtaaggctatttaagccgtgctctgatccattttcagttaagtgtgtgagtcacagataaacagagaaaagggcatttgttgccgcaaagcttgcttgtgttccctgtgttcatctgagccatcgcgtgtgttgtgtgctcgcgtgagtttacgccgaaggtagttcgttgctccccggcagtttgatccctgggcgaaagtcaacatctattgttgcagcattttttttctcataaatttaagacgacgtgattcaagtaattttactttacaatttttaacaatctgtgctctagaataacgcagcctagcccatccaatcggcacgtccacttataaatatcacctcacatacatccttagtatacaagaaaaaaaatactccatccatcccaatataagcattcttagaatagtggcaaatcaaacttttaaattttgactattaatagcaaacgaacaaaaacagatcaatcatgtaaatttgatgttactagatttgttattaagcaaattatcataatgtgtaactttttttatttaaaacatcttacttttatagatattgttgatcaatgtagcatctcgaagacattgtcgaagtccaacaatgcttatattttgggacggagagagtattacttaaaattttaaattagagaaaatccataaaatgccatcgtacaagtctttttcttccagaaatgccatcgccatcaacgcaccattgattccacaccattacaaccataaatttgaccaaattaccctccgttcaaaattcctcctcatcgtcggcgaagcagatcttgactcccagcctgatgcagtaatcctgaaaatcggcactgatgaactgggagccgttgtccgttatgatacggtggggcaatccgaatctgcagaatatccctttgatgaatttgatggcgttgtcggccttgatttccctcgtgggtgtcgcttcaatccacttagtgaatttgtcgatcgccacgaataggaacctgcagccgccctatcctcgtgggaatagcccgagaatatctagcccccagcacgagaacggccaagtgagagggatagtctgaagtgcttgcgctggtagccttgtgtgtttactgtagaattgataggcttcacaccgctgaatcatgtcgcaggcgtctttaagggcggttggccagaagaacccttgtcgaaaagcttttccgactaatgtccgaccggcggcatgtgatccacggattccttcatgtatgtcaaggaggaggtgtctgtcgtcgtcggacgagacgcattttagaagtaccccgtttggtgccttcttgtatagatcgttgccgatcatacagtagacttttgctttacgggatattttcttggcttctgtgtcgtcctcgggcaactcttcactgcctatgaatttaatgagtggggtgtgccagtcatctgtgctctcgatatcggcaacggcgcgctctgcctctgtagcccccgagctgatgttaggggtgaccgggctat

SEQ ID NO: 28626 - DNA, 1323 bp, Oryza sativa
caatttggttgtctgacctgttatcaggcatagtccaatcggctacgaagtcggcaagtacctgggacttgatggctgttcgtggcacaaagcggatgtcaaattggcttagctcgactacccatttcacaatgcggccgagaacgtctttgtttctcactacttcaccgagagggcaggaggatacaactgtaaccctgtgggcttggaagtagtggcgtagctttcttgatgtcatgattaccgcgtagagcaatttttggatctgtggatatcttgtctttgtgtcgtggagagcgtcgctaacgtagtagactggttgttgcaccttctctctctcgacaacaatgacagtgctaacggaatatggcgtggcggcaatatagagaaataattcttcattaggttggggggcaacaagtatagggggatttgataggtagcgcttgagtgcaatgaatgcctctttggcttcctgtgtccatacaaatttgtcttgcttctttagcagagcgaagaaaggttgtcctcgctctcccatcctagcgacgaacctgcttaatgccgccatatatccggttaacttctgtacttccttgagtcttgtaggcgacttcatgttcttgattgccttgatcttctcgggatttgcttatattcctctgccagagacgaggaaaccgagtagcttgcccgatggtactccaaacatgcacttctctgaattgagcatgaggcgatatcgtcggaggctgtcgaacgtttcatgtaatttgagagaaacattcctttgatcttctactcttgagtatggagttagcaaaacaaagaaagatcaaaacaattgagtatggagttaccaaaacaaagaaagatcaaaacaatttagaagtttagttgcactaccgtcgtagccgccgacataattcacggctaagctgaatgccttgtagtaatgatggccttgtcaattctagttggatctgacaaggtagtgccccattacctagtggcgattgcttcattagtgtttgatactagttgaaaaccaaaatgctgaatgagggaggttgtctgaataggtggaaacattgatgacatatgagaaagcatgtggtacattttttttactacagtttaggtcttatcaaatctaattggatatgacaagggagtcgctgctcaccattacctagtgtccgtttctaattgttgaaagtcaaaatgctggaagagggtggttttttggaataggtgcaaacagtggtgacatatgagaagcatgctttttttttaaccaacagtagagcttaatccagtttc

SEQ ID NO: 28627 - DNA, 706 bp, Oryza sativa
actctcaataaacccgaagcaaaggggagaggaaggggaggaaaggtgcaggcctcgcttctagctccaaggaagctagatctgggcaagggccaggaagagactaagggcaaagaggtcaagaagaaatacgttgctccacaggagttcaaactaggcatgccattggttggagatgacgtgcttgccacaatgggcaccgcttggaaggaccttcacttatactacatggagaaatctaacgccaggaagccgagtaaagctaccgatatccttggagagcacgatggaaagccattccttggtccaacaaattatgtcgtggtcgacttcaaggatcttttcgacctctacaggctccgaacggtggacacaagcctccttaagtgctactccttgtaagtattgtcgcccaactcattctggtaataacaatcggtttaacttgcttacaagatcgtttatcctgtgtgtaggttaagttggcaatggtgtcagaagcatgcaccggaagttgccttccttgatccacaagtggtcactgtcacaaatctccagaatgaccgtcaaggaatggtcaactacatctacgacaccttgtggtcctgccgagacaaggagtacattatgtgcgcctataataatagtaagtgtgttaactaaatatacacaacaaaatgacacacattccttgggtacttaatta

SEQ ID NO: 28628 - DNA, 662 bp, Oryza sativa
catatctagtactaatcagaaaatctatcgtatggtattccgtggagacggaatagtactactgccttatctcctgttcccctcttccagtctcttcccctccactcactctctctctctctcttttcccctccactcgatccctctctctgtaactaccacccatgagcacggaggcggcgacgacggtgacgacgacggcagcaacgacgacgacagcgacggcggcaacgacggcgacgatggcggcggcaacgacggcgacgacaacgacggcggcgccgtcaccaccagcccccgcgaacgacctagacgacagccagcggagctcccgaccaccacgggcgacggccgccatcgagaagcctccccatcaagctcctcaaggcgctcctcctcttcgtcggtcttgtcggtagcttccttgccgctgccgcctcctcctccttggcggcgctggcgcctcctacggtcggagagcggtggacgcggccaccgggggcgagcgcttggcacaacatgagcgacgaggagctgctctaggcggtgtcgatggagccacgggttccgcggtttggagcgaggcacgacgaccagcgacggaatggcacaaggtaggcaccagatctatcgcttcttcttctttttctccgccgccgccc

SEQ ID NO: 28629 - DNA, 666 bp, Oryza sativa
tatggccattttatttcatggcctgatagtttctgtggtaatccgtaatcgccaggggtggggcgtgtgttgagtgactttgttgtgtacattcattctgattttcatctatattgatatgttgcaggaaattactagagcacttgttgctgacggtgtgccaaaagatagaatcttaacaaacttctgactgcccctagcccactagaacacaattatcagccttctagatgttgtatccttattactcattacagtgattattctttacagcaagcgcgatggaaactcgcaacagagaaacagttttgtactacttacatataggggcttctttttccaattttcctgcacgatgcaacatgctgcgctgtaatctggattttgccagcctgatgtatcaatatcaacacttggtgggcattttcgcatttgaaccgaaaggccctagttcatacagttttgtacctcctgaaacaatacccccttggaaggtgttgatatactccaaattacaaaagctagctcaataaaaggggtagagatgagtggcctcatgtatttgccttataaaagaggtagagatgagtggcctcatgtatttgccttcagttataatttgtcttcagttataatttgtgtattatttccccgcaaaaaaaataa

SEQ ID NO: 28630 - DNA, 657 bp, Oryza sativa
cttcccttatgcaaggccaatcgtctgccacctgtccggcgacgttcgagtttctccggcgacctcctcggttaccctgaccatgccattgcagcaaggggaggcagcggcgcggcgcatcaggccatatgcacgccgggacgacttcctgctacctcttgtcagagaagtggccatcacatcagctgcaagtgaaggcgatgctcccagctgcaatgtcagccatggcgtccccgcggtcatcttctccatcggcggctacaccggcaacttcttccatgacatggcagacgtgctggtgcctctgtacctcaccaccttccatttcaaagggaaggtacagctgttcgttgcaaactacaagcaatggtggattcagaagtacaagccggtgctccggcggctttcgcatcgagccgtcgtcgatttcgactccgacggcgatgtccattgcttcgatcatgtgatcgtgggcttggtgagagacagggacctgatccttgggcagcatccgacgaggaaccccaaggggtacaccatggtcgacttcacgaggttcttgcgccacgcgtacgggctgaggagggacaagcccatggtgctcggcgagacgagcggcaagaagccgaggatgctgatcatatcgcggcggcggac

SEQ ID NO: 28631 - DNA, 2160 bp, Oryza sativa
gactctagaggatccccgtcgatctcaacggtgtttgtgggacattgccgtgctaaccaccgcttcgaccgtggcttgctgctgttgcattgacattttcgtcgctgccctgcttgctggtttgtgaggagaatccggcaaagagattcccatttgccgcggtattagttcaggacaaggcatttgaatttggataatatggttttcttctttttcatttgtttctgtttatttattggtgttcaggtttgtcatctgaacgatccgtgatgaaatgttcctctttttcatccagaaaaattgaactgcattttctattgttggtgatattgttaataaaagatatttttttcattctttatctaagattgtacagatagctttccagatgcatacatcaaataattggagtgcatttctacgtaatcttgaagatacagactggaagtagtatcgacagttacagaaattatacgcacagttcatgatgttaatctgtaaactgatcctaatgtgtgtcggccacaagctactagccttgcagatttcatcagcaatgacagaagaatttgtttggtagagatataattaaggacggaaaaaatcatttgaaaaaacaatcagatagtaggttaatatatatcataggatattctcctagctactactactacatatatgtgttcatcatgcatatagtatatgattgggctcacatatcataagcaaataaatgatcatgcggtgcaagtgcaatataggacgtttaaacgaacgcacggaagcagagagatgcattaacaaatcccaaatgtctgacccgttgaggatcgatttgcccacgatatatatagagaatgtaaccaacaacgacatgccatccaactctgtgatctcaactgccaaactaatacatactacagcttgatttcccattgatgcatctacattttcagagcttgattaattcaatcaaactcttgcaacaggatagttgtgtaactatggtgatactatgatttagcctcttcaaaggtatcgactctagtcttgtcagacaatgaggtatcaactgtagatagtagttcaaatcatgtataaccattcagtttccagaattaatcatattgcaacttgtaagtagaagtcaatcactggctagcctgtacccatgtgccacactgctaggatatgattcagagaggaagctatcagagattagtcgccgtgcagaaatgagcaaatagtactgacaaatatttcaagctgtagccactacctggtaagctttctttcacaacttgacttatatcaaaggactagcagtacacaagaacagacaatctcctctctcaatttttgtattcgcccattaaaattctatcttaattacagtgtaatagtatatagttgcaagtgtgtgcattcaatatatataatcttcgagagatggaaaagaagagggtaaaagaatgtgaatgtgatgagatgaactaggaacaaaatgtaatcataatctacttggtggcaaggttgtcgagagcttgctgcaacactggcctgaatcgggtgacgtcaatggtgatgtcctggccgtccatgagcgtctgcttcatgaaggcgaaccctctcttgtgcagacccgtcgggttggtgaagatctcgtcgccggcggggtacttgtccttgagcgagctctcggcgacggcgatctcgtactggatgtagttgagccccatcgccgccgccggctcgccgtagtccatgcgcgcgatccactggaggccgccccatggcaccacctgcaccatcgtcgctcccggcggcaggaacatcatgttcgtcaggccggcgccatggacgccgagcagcgcgtcgcacgagttgatcagcttccccacctgctcgatggagttccccacgtccgactcgttcaccaccacctcgaacccgacctcctccgccgcgcggaccacggcgtcgaggttcaagagcagcctggtgcgcccccgggagatgaccaggaggcgcggccgccgcccggtgccgtcgccgagccgcgtcggcgcgtcgcgcggcaacgacagcgcgcggcggaggaaccgcgtgaagtccggcgtcgccagcccgtccaggctgcgctcccgctcgatgatgagc

SEQ ID NO: 28632 - DNA, 11335 bp, Oryza sativa
  unsure (1)..(11335): unsure at all n locations
cgttcatggcgcgcacgttgtccgccacgttagttggtgcccaaaattcaaaattaaactgcacttgcagtattagacatggcgttgattttaattaattcctcggtttgaaattaatcacgtacgtgacgtcaccgtttgctccggcgtgcgagctggctcgccggcgtcctgcagcttcaccggaagctgctgctgattcttctcctccactgtaaaagaagaagaaacacgattttttctcttgagaaaattaaatttcaacggaatttggaattctgcaataatttgactgcgtgcaggtgtgtgatgggtacatggctggtcgggacgagcagtggtttcttccacggcggccgtggtcttcacggcgttgtcctcgtcggcgactggcaggtgggttcaatttagaggtcagattttctccatgaaagctacaggcgagtcaaaaaccagtcctttgcgaaagttgcagttgcgtcgtatacctgcaggtgcagcctcgtcgccggaatctgccgcgacacgctccgccgcctcctccgcctcttccgatctctcgccggcgacctcctggattatcaccgtgtctttcacccctaccaattaattcagtataagttcataagaaaaacgaactaaatctatggacagaataatgaatgattatgggttacatatatacattctgtcttttcagcggtttgatcgacgctctgctgcatatgagcatgtctctctccctgctgcggcaggatgtcgacatggaaatcccgggtgaggccgccggacgatgatcggtgcagcatcttcatcgccggcatgcgtgcgtcttccaacgactccctggggctcactgcatatgcaatgcagttcagacttttgctgcttaatttgcaccgagtgcatatgcatgatgcaacggagatcgagatcgatgataagaaagaaagtgagaggaggaagaagaagaagaagaagaagaagagatgaagaagaacatacgggtggagaagacggtggcgtcggggcgggaggagaggaggaaggtgagggagatgaggaagcagccgacgacgatggtcagcagcctgaacctctgcgactcgaaccgcagggcgtgcagccgcccgctgctcccccccggcttcatggcttcagctaccttcttcttcttcttcttcttcctctcttgctaatggcggcttagctctgcatgcctcctctcgtcgtcaggctaagctagcaagctagaaagtggaagcttctgtgcacaagcaaaatggaaggcagagacgatcgggttatattcttctctctctctctttcagttccctgcttgcttgtctgtcagatcgactatgcctgtgccgttgggttggtgcagtgcagtgcacctccgatattgtcaagcaaattcgagcttcttctcgtgcgtgaattggacaactgaacctggcactcgctctctgcgacgtatatgaattgaaagagctagctttgatgtgctagcattaccgaaccatgcatacttactatactgatctacttacattggatgacctccttcggtcatcccccccaaaaaaaaaaaactatactgatctactacttctttctgccttacttttttttccctagttcttttaacgaatttgccgggtcatgcaagtttgtaggacgtgtttgtggaggtccatgttcttcaattcaccgtgcgatatattccatctcctagatattcttgaattttctaattcatgcagctgatgggggtgtgctgtacgtggatggcacgcaaaaaagaagaagattggtcttattcagattcagaaccattaattttgagtttttgactactcagactccattgcaaaactagtactgatgattgatttcttcagcatcagactccatgcatgttaccttggtcaagtgattgatgggtgtatatacatgtacatactgagatatataatcaatgtgcagcacggcatggacagttggagatcaacagcgaatcatagggtcgtctacagaaacatatgctactatcattgaagaatatggagttcaataatggattcaagttaatgactcctacctatataggagtatctattgtaactgtgctttgtcccatgtgattaatttttctcaactaatactagcagtggtatgatactgtagtatatcattccctccaccaactccctagcgctgtttctttcagacgatcgagcttatatcattcgttcacggatggatgatgccaccaaatacatgcatttcatatggttcacggcaattttgtattgaacaaagtaacacaaagttgaattgatcacaaattaaatcgatggtctattcatgtagtatatgttattcaagaaactctgtacacgtttcttgcactattctttgtctgaaggatcctgaaacatttgtagttttgcaagcacctttgtactgactgaaaatgggatactgctagtttttttttttttccaatgcgcaaaataattacacttcaatacattaaaaaggaaaaaaaggaaaaaagagttttttttacacaacgcaatcagccaaacaggcctatactaggggaaggaagaaaaagcaaaccaaaaaccgtaactaggaaaaaagaaaaactactacgggagctaaacacaactccgataagtgggaggaggggaagagccacactacactccaaaaaaaaccccaaaaacagcaacgccagcaaaagactatagacagccatccgagaggatagactatagaaccacgggcaccgaagagagcatcgagtttcgttccttacacaactgccaagagatcaggggtactgctagttagcacagtgctatatcagtatggcataacttcagatagatataattaaggtttcacttgctagtaaaaatcacaaagaagagaattaacgggaggcaacaaggagacatccgaagcttccaatacatccaaatctaacagaaaaaaaaaagaaaaagaaaaggggcatacaaagaactctgatgaaaagaagattccaaaacgtccacagatgatggtttggcatatcaagaaaaagtccagagagcgtcaggacaggcacgtttcagggttgacatgctcccacatgacatgatccgtcgatcctgcagccacggaattaattaatcataaaatgcccggaaatgcaaccataaactaattattaaagctaaatatttgagaacttttacggtacaatatactaacagtatatactgcaagtatttacaagggtattataggaatatgctaaaaaaatgtaagggcaatttagtaattctcttttcagatcaatccctatctgttgatgccgtcgtgcgagtgagagggagagatgagccctaccggcggcagaattcctcggtgtccctcttcccgccatctccctgtggtggcatggccacatgcagtcccgcatactggcggcaagccagccggcaacgcagtgccctctgccgagccggagttagaattaaacaccatgcgcactctacaagcatacgccctgatctgtgcataaaaatgcatacatgtgcagtctacagatgtctgttatttactctttaccctcttcttcgttcatgcaatctgcaagaggggtcatgttgttacaaatactctatgccattttaatctgaagatggcaatggtatagggagtgggggagctagccagctaggtccggcaacccgagctcggtgctcgggctgtaccgtctaccaacatacagcaatcttaagcagggtagccgcatgtactacttaatcaccattaattcctttaattaatacgcttaatctacatcttccaaacatccaatgaacatcatatcaacaatgcaaactaggaaattaatcaatatctgacagcctcacaccggtgcacctttgcctgggtgaatgacgggcatggggaatcactattggatcttgcgaggaacacctagtagtgtgcttgtctgctggaattaacggaattgccccagcgcaataaaatagaaagacaaatatgccatttttaattttatactgtaagtggtaagtggtaagtaaatcaatctacaccgttagatcatttatattggcagtatatactagtagtatattgtaccgtaaaagttctcaaatattttccagggagcgtagctacctgcatcttaatcagctgcagttcagtcgagttcatgcctaagtttttttttatggatcaactaattaatttccagaacagaacaaagcctagcttaatatgctggttttgccattttcatgctaaaaaaaatgcctatgacacatgccttgccgtgaccgattgacaatacttaattgcctttgccttgccatgagtgattgacaatgattctttcttgtacagcagcgatggatagtgacggagcactaacctgtaaacactattacatagtgctagtctgcaaataagaacagggagcacaacttcacttctacgcagcagatatgcatatatgtatactgattgatgaacctttgcccatagaaatatagaatacatgcatacagcacaagaatctcccaaatactgttgtctgatttgtattgagcggttggaggcatatgcagacagatgatgtgctagccatttatgcagcaccactaatgaattctacatttctactacttttgatactctcttccaacttataattgtcatcttttgtcccactacaaattattttcttgtacacgtacgtatgcaaccattctttaatttacatcaatcacatataagcagccatggcatgtgtgtaataatatcacctccgattacgaagcatgcatgcatgttgtcctagaatgcatagagacgaaaattgttggttaaatatattgtcacggaaatggatccacatataacgtcacaagttttctaattagtatttcaataattatatatatgtactgcatcaattgtccaaagcaatgccttactgatttgggggagaaaccacaactattttcattaaattaattgggtatgaaattaacaactactatatcattaccctttttttagaaactatatatattcttattactgttgatatcatctggtatcacacatataaaattgggattggacattaacaaactatatattgactgactgatcaatgcaaggagatgagaatccaaaaaccagaatttggaaagtgtttggtgggacattccattgatcaatcatttgcaacggttgatacgtactacgtacccgtggcgctacagtggctccatatattttttttttggcagattcgttggttgcaattgcatgcacaacgtgccggacacaatatactctctccatttcaaattgtttggcaccgttgactttttagcatatgtttgaccgttcgtcttattcaaaaaaaatttgtgaaatatgtaaaactatatgtatacatgaaagtatatttaacaatgaatcaaatgatatgaaaagaataaataattacttaaattttttaaataagacgaatggtcaaacacgtactgaaaagtcaacggtgtcaaatattttgaaacggatggagtatatttgtatcgttctgtgctgtacgtatctgtctaaaataacccattgacctcacaaccgatatggtgtgtgtgtataacaatcctgtatgttacttctagtatacctcaccatgcatgcatatattgtgtttcctagctatacattatttcactaaacaatgcaggccaggtacgtatgcctgttcaaatgctgtaatttatttttaaatatttataaaagtatatttgagttttcaagttttatgtttctatactcgataacgccctttaggatggttttttatattaaaaaagcaccatctaaaatgcattttttttcatgtggaaaacactagttagtcgcgccaatgggcatgcagcaattttgcatgcagtccccttatcactctccgagagggtgtttttttcgacccgactaagggatcgtttgatttggcgctcgataaactcaccccatgttatcagttccaacacatgagaacatgaagaggccacgtttaatgaagtcgttccaattctttcatgacagagataatttgcaatcaataaactcatctcagtttatcagattgaacacatgggaacatgaagaagtcgcacttaatgaagttgttcggctatatttgcgcacatgtttcatccaacgagttgggacagcttcactcagcatgactctttgttcccatgtgttcgatctgataaaatgagatgagtttatccagcgctaaatctaacaactctctagcctggtaaagaaacacccccttagaggcaacagtagggttgcttgcaaaattgccatccgcccagcggtcaccccgttagcacgagctgatgatcgtttgccacatcataaaaaaaatccctccggtaggttgtctttttttttaaaaaaaaacacctaggcagtttttgaataatgggaaaggaaaatgattttccacccaacaaaagacatctttaaatcctaaccgttcattatctctcttccatttaatcctatcccttcatttattttttaatcccaatccttcccccgttttccattatccaaacacactggaaggcgttgagggcatagatttattgaatttgaaaaccagactataatggccgcacaaaatccaatcgtaatcctgttatggccgcccaaccaacatgggtcgcacgtaagtcgatatcccgtttcggcccaactataatgggccgaacgtaattcatattccccttcttgggacgcacgggatcgcaagcccgttaactcccaactactatagggggggcctaatacgcgactagtcgcgcgccccccaggcgcgcgatcagtagtactagtactactactagtccagtactagtactattactatactactattactacactattgttgttatactactactagtattactactataaaaaatatatatatttttgatgtataaaaaaatatacacgtatacaaactttgtatacgatgtgtacaaactttatatacgatgtatacaaactttgtatatgatgtgtataaactttgtataggatatatacaaactttatatacgtacgtattaaaaaaataaaaacgcgaaaatacatcgcatatacaaagtttgtataggcgtatacaaactttacatacgcgtatacaaactttacatacgcatatacaaactttgcatacatacgaatacaaacttatatattcatgcatctttaaaaataaacgggaaaacaaccactgaagagaaaccggaaaaaaaaagaaaaaacaaaccgaaaagaaacgagaaaaagggagaaaaaaaaaggggaaaaaaagaaaccaaacaaccgaacagaaacgacaaaaaaaaaacggaaaactcgctactccctcctcctctcgcgcggcgcgtccgccgcccctctccgcgcgtgacacgtgggcgcgcgcgactgatcgccgaatagctttttcgactactatagacatcatgtaagttacataggcccaacacaaatgggacccaggagcccagtatcctggttgtagttgggcctccaagatgggcccaatgagacaaaccgacgacctatcgtgtttgggccgttgggtgtttctggcccaactcgcttcccgctggaatgaagaaatactcttccacttcttttcaagaatcagaaaaaaaaatgagcgacgttgtaattgatctccactagtccactacaatcatcaggaacaaaagcatatgtgtatcttccactgacgccatgcagctctgtacaaggtagtacaaattacaaaagtacagagtgtatatgtatcccagtatatataagaactaaacttatatatgtcaggtaaaaaaatgaattaatcagcaaagaatgagctactatatatgtatagacccctaaaaaaagggaatncaagaatgaaaaaagaaaaaaaatgttcagtataactagtatagcgagctagtcttgaagaagatcaagcacacgcagaagcgtaggcctgaaccttcgcaggttgagcttgacatcgtgcgtcatgacgatgtcagcgagcgccttccacccctggccatggatggccatggggtccctgaacacggcgtgctccctcgggtacctcctcgccaggttgctctcctccgccgccacgtggtactccacgtacatgagctccatggccgccgccggcgcgccgtagaagttggtcgccatccactccatcctcccccacggcacgatctgcaccaccacgccgccccgggggaggaacgcctggttcgtcagcccggcgccgtggacgcccaccagcacgtcgcacgagttcaccgccgacgcgaacctcttcacgccgccgctgccgccgccgacgccggcctcggagaccaccacctcgaatcccagctccctcgccatggccgccacctgccgtaggttcagcagcttcctcgtccgccgccgcgatatgatcagcatcctcggcttcttgccgctcgtctcgccgagcaccatgggcttgtccctcttcagcccgtacgcgtggcgcaagaacctcgtgaagtcgaccatggtgtaccccttggggttcctcgtcggatgctgcccaaggatcaggtccctgtctctcaccaagcccacgatcacatgatcgaagcaatggacatcgccgtcggagtcgaaatcgacgacggctcgatgcgaaagccgccggagcaccggcttgtacttctgaatccaccattgcttgtagtttgcaacgaacagctgtaccttccctttgaaatggaaggtggtgaggtacagaggcaccagcacgtctgccatgtcatggaagaagttgccggtgtagccgccgatggagaagatgaccgcggggacgccatggctgacattgcagctgggagcatcgccttcacttgcagctgatgtgatggccacttctctgacaagaggtagcaggaagtcgtcccggcgtgcatatggcctgatgcgccgcgccgctgcctccccttgctgcaatggcatggtcagggtaaccgaggaggtcgccggagaaactcgaacgtcgccggacaggtggcagacgattggccttgcataagggaagccttcatctttactcttatcatcacaacttatcttactcttaggctttggaacttcactctctgaaactgctggaacagaagggaaaaaaattcagagatagaattggccagtatacttctatggctgattttactggggatttaatcatgtactaggaactattgagtgtatcaagaaatctctgaaactgctggaaaagaggggggaaaacagaaatgaatttggccagttttctatgctgattttactgagaaattaattaactaggcataaaataagtgcatcaagaaatcttttgtattattgttgttaactctaacctgtctgtggtgattttgtcaaagattcttcctttccaggagggggatcattctctgtagagattgcaacctgtctctctgatcttgatttattctctgaatctgtcccattcttaaaattttcatttttaaacacggaacctgcagagcattttgaatttgtaaagatttttttaaataaaatacaacctctccctcacctcaactaaaaaacaatgcaagaatcctttattggcaccctaatcattaactgaaagaaaatttagcagattgtcactaacacatgctaacaagtagtaataagcagcattttgaaaagatcgttgatgatacatatgttgatgcttctacaagaatctacaagctgtttcacacttttcagataatggaagcaaaacaaagttgttcacttgcatgatgattgtggaatatgttcttgcactttgccatcatattctagtctttaaattgttgtaggatgttcgctcagtacatcgcactagtacattggtacatatttttatgaatttccactcatctagaacacaaagaacaagaatcattagctcatcacctagaacaagaagggaacagataattatcttattaccttgtttccccttcaaaattagcattgggtaagacaacggtttccagtgacaaaacccaaggcctttgcaagtttcaacaagaaaagtaactactctagaaacagcaagtacaaagacaattactactcctaaatatcattgaaatgagccaactaattgcatgcataattgagggccatccatatatgatcaaatcaattatagaactgcaaggggacccaatcagaaaatcccaaacctagaaaaagcacaatgtggtagtagtactagtacagtagtactttggcttgcattgcccctgaacctgatgcaactggactagtgttggcgtggtccaggacactgatgccactcacaaaacatgcagtgatctggatgaacagtgcaaatggggggggggatgcatgcatcagctggagcacgagatagatgattcttgttccagctcatttgctcacctaattccggcgatcttgtcgaaatatcttcatcgaccctgcccataatcagaggagcaacaggaattcgaggtacattcgtactggcgctgccttcccaagaactcaccatcctgctcctggttccaatccctgaatatatatatacaattcagaaaaaaagaacagcaaagtaagatcaaattggagcgaaatggaagagcagaattcgagaaatccaagaaagaactgaagagagcagcagtcttttagtctccttacttacgctgggattgagacgagagagaggagaagaacttgacgacgcagaggcagataagcagggcgaggaggcacgccggaaaaagcctgacgacggcgaggtgcctgccgggctcgaccttgctcaggttcttggcagccgccgccgcggccctcccgttgctgtgcctcggcttcctctccctcgccgccgccttcatggcgacggctctgccgccaccgtgctgctgcgccacgaaggctctggccgcgcgctcctgcagctcagctgcggcgtggtctggtctgattcagttgaagaggagacagtggagtcgtcaggaggagtggagtgtggcgctgcagctggtgcgacatgtgaggggagtagactaggttgcagtgcagggtggaaagtggccattattagcatttgctttgctgcattagtttcattaat

SEQ ID NO: 28633 - DNA, 6369 bp, Oryza sativa
ctagactactagtacatgaagagagaattgctgctatcattggtgaatggtgatgtctgatctatggcttattcggaccggaggaatttcacggggaattttgatggaaccgaactgtttcatgtaaaattcctgcatttcaagaagctcttaggtgttctttctgttggattaggactattatgaaatgatggttatgcaacttggacatgcgaatggatcatacagtatgctgcgacgagtcattagtgtcagtgaatccagcaggataggagtacttcgatcgcaggacgtcgagtgggactactcccaaatactgtagggcttcgtcactgaaatcaaaatcgattttctctgaatccagagacctaccaccgacacgccgacgccggtgagacgagtaaattcagacaaggattagttacttgtaacagcttcaatttaataagcttggatttgcacgtacagttgaaaggcaactgcacagtggccacccatgtggcagttgggcaacatgaacacgagattgagcttcttcaacaattaatattataaaccctttttgacttttaacctattcaaatattttaattttttaaagatttaattaagtttataaaaaaatatagtagcatttttaacacaaaacaaatatatcatcaaaatatatttaatggtaaatttaataaaattaatttagtatttttgctaaattattctataaacttgatcaaattcaataaaatttgactttgaaaaaattgaagtaaaacggaggaagtagtgagtattataccgaagcttctctcttcatttgtactcctactttactattctcttccatgttcacaatcacaagcttgctgaaagccgccgctgtatttgatttgaagaaggtgtgttctatgggcgcatgtgagatgctggatgatactgttgctgctgcatcggtatacaagacgagagcaaaattccaaatgcatcttccttcctactaccatcatcctatcctatccctacattttactagtaccttaccttctcccctccctccctgacaaactgaaaagctagcctctatacattcagaccgttgttcacggggacgagaccagccagtggttggtgtacgccactctctctctatctctctgcatatctgccaacaaatctgtacagctgtggttataaaacttaaaaactgttcatccaagaaaattgctccccttcaagatggaaaaccataaggagggagtacatttgagaatttcaatactgatcatatataaaccactcaccttacataacaatctgcaagaaaatgttcttttgcctaattgccagcagatgaacatgcatgatttgtactgcattctgaatatgcactccagttgggtatatgatatatccaatcagtacatatcatcatataatatattttttagataatgagagatcaccatatgatagaaactagtattaagtataagagtcggtttcaattttgaagtagagttggatttattaatggcaccggcggtttctgcaagttcccgccgtttgcatcgttgtcatgttcctgtttgccaatgttgccttgcttgcttgcacgtatctgctactactcacctgccattccggctggccttgcatcgctccatcacattacaacctgttcgttcctcctctcgttgttgacatcacaggtcaaagttggcgacggctactcctctcctaccggcccaagaacaatcccatgtgggcccaatcatacgtgggcttgttgtctcggcccatggattgaatattactatattgtttttttatggaattattaatatattgtttatattgtttagaggaaacctggcattttgtgtgttagtgacaggtgagaaggaggcggcggttagttgcgcaactgaaccgacgactcatcagtttctgttggacaaccaaactctaccaacctctgctacttgtttacaacaacaacacactcaatgcaaatctgtcatctctaacaacgacatgtgcatatgtgctacacaatgtacttgtacaatttctagtagttgttgggtattctaattgtactttttttaaaaaaaaaatgaacacttatttgatcgagttgaaactagagatcaccaaatgcgaacacaattcagtgctaataatgaatcgatttcgttccattccatcctccattatgtgcatcaaagggaatacaaagagaagtagtataatgtaactgtaatcctgatcaaataatcgatcgatttcttttttctgtgaaagaactcgaaagaatagaaagcaaaaaaaaaaaagcatagagaacgaaaatgaaaatgttgcagctaggcattcaaaaaaaaaaaaatgttgcagctagtagctaattacagtagtctttgtggatggagctcgcctctactggtgtttgaggtaatccatggcgtcgcggaggaggggctcgaagcgggcgagatcgaggcggatgtcctgcttgccgaggtagtactcggcgaccttcccccacccgctccggtggaccgactccgggtcgcgcaccgccgggtggtcgcgccccagcgtctccaccagcgtgctctcctccacgccggcggagtacgccatgtacttgagcctcatgtcctccgccggatcgccgaagtccaccttcccgatgtgctccatcttcccgtacggcaccacctggatcagcaccgcccccgtcggcaggaacaccgagttcgtcagccccgcgccatggacgcccatcagcacgtccgcgcggttcacctccttggcgaactcgccgacgtccacgttgaacggcgggtcgccgatcaccacctcgaacccgatccgctccgccgcccgcaccacctcctccacgttcatcagcttccgcgggtgccgccgcgagatgatcatcaaccgcggcctcaccgccgcggcattgtcgacgaggctcaccggcgcgtcgcgcggcaacgagaaggtgtcgcggaggaacttggtgaactccggcatggagtggcccgtgggatcccgcgccgggtcgatgctgaactccttgtgcatccggatgccgaccaccgcgccggggaagcaccggaccttgtcgtccctgtccatgtcgacgatgtcgtggcgcgacagccggtccaggacgcgcttgtacttgcccacgtaccacatctggatgttctccacaacgagctgcacctcgccgtcgaaccgccgcgcctgcaggtacagcgggatgagcacgtcggagaagtcgtgccagtagttgcccgtcagcccgcccatggcgaacaccagcgccggcaccggcgaccgcacgtcgcacgccggcgcctccgccgccgacgccacctcccgcaccgccacctccttgagcccgcccatgtgcttccgcgagtagggcacgacgcgccactcccgcgggttcgggttgctgccgccgccctcgatcggcggcgggatcacgacgtcgtgcgccgcgccgtggatgcgcacgtcgccgtcgatgctgcacacgtcggacgcccatggcccctggatgtcgcacgccggcttcttcgccggcgcgctctcctccaccgtggtggtgacgtcatctgcatcgaccaaggaaaaaaaaaacaacaattgctttaactttttatatttcttttgttctgattctcacaaggcaaaatatgcatcgaacacgtctctgctgctttccatttcagaaaaagattgaaggaatgaactttaggttggattttgcacaaaactaatcaaagatttgtactttatatttcataaatgattcgcaagtagggggagaaaagtaccagtgggcttctccttggtgtggtcctcttctgtttctttctgtatctctatctcttcagctgacggggtcttctcctgtaccaccgctgcatgctcatgctctgcctttggtgcttgccgctgctctgctccatgcaaaaggataaaaaagtgttagagatttagaagcgaaattcggatggattttggttgaattagtaagggaaatttgattttggtttgatgaaaatgattggaataatcacaggttaattaattagttggttggatgatcgatcagtttacctatgatagggggcagctgtggcctcttctcttccacaggcggggggatcgtcggggaggcgtgtcccggtgatgttttccgaattgctgcatcatgtgcagttcaatttgatcagtttcagtgtttaaatttcttttaaaaagtctgaatattgtaaggtgatgcactgaaaataagttgggagcttggattcaggatggtgatcggtgccctgattttgcggttacgtgcagaaacaagcaaacgcgtgcttagaatcccgacgaattccgcatgtattacatactcgtttgattcagaattattcaaaaaaaaatcctcgaaaaagtgatcccgattaaccatgtaatcaaaaagttttggtctgaatcatgcaggaagaatcaaaagaaaacctataaaactgcaccataattcagaattcagaaaacttgcaaatttttttttgctgaattatgctcaatcatgaaccaaatgaaactcaccgttgggtgcagcgatcgcgaactgctcggagacggtgaagtatgtgaggagaacaaggaagaagccgagcaagaagccgacgccgagatacttctgagctgcacccttcaagctcttcatgagcttcccatgatcgcctcccatctctcctccctctcctctctctctgaatgtctgaatccttcctactctttgcagctctactctttctcgtgataaatatgtgtgtgtgattgcctgcctatgcaggtatcctagagacaccaactccctgacatgggagatggagaaccttccaagaactcttctcttctcttctcctcaatagaccagttcttgatgatgtcctttatgcctggctgctctcaggaggacttagccaaactccaactctccctcgtgattgctacctctaatttactatattttccctgtataatgacgacaattatcatgcagtagttagcttaaacgtgcatcgtttgtaaggtgcaatttttttttttttggaatacacctttttttgactagctattggaggctaatttcgggaataaaaaattatagttatttggagtagttggcagaaggatttgtaaaatcctagttaagttttgtgtacatgattgggtaggaggtggcatgtgagagaaaaagaacaagtcttatgtgagctaggaatgaatgattgatggattatggatgtaaggtgtagaactaactaggtcaaatgcatggaatatttggttggaattggatgttccagtagaactcatgagctgtcagagcatgtcatcaagggccccataccttgcctaattcagaacctacattgcatttttcttgtgtacacactctctatttctttttttttgtttgggtataattcacatttacttataaatacaagttccttttggtttatactccctccatccaaaaatgtttgacgccattgacttttttaaaaatgtttggccgtttgtcttattcaaaaaatttaagtaattattaattcttttcctatcatttgatttattgttaaatatacttttatgtatacatatcgttttatacatttcacaaaaggtttttgaataagacgaatggtcaaacatgtttaaaaaaaccaacggcgtcaaacatttaggaaatgatcgagggagtagtagattatcaattatcgctcgtatgcttctgatgctcctaaacggtatgatatatctgaaaactttcttcatcgatatttgttagagaactttttaaaatcaaccattcaactttgtaatattttaactctttcgtttgttctctccaataattgtcataaactagtgagaatttgatgaatttaagtcggtcggtgtagacacgtacgtacggtatggttgtcaaatgtcaatcctattttcttgtgcctgttctgaaagcaacaagtgtcctgacaaactcgtcactcttgcatagttgcattttcttctttctcttggttaaaaaaaggtcgcattttatcttgaaaattgataaggatatatattgttatattttttttctctatcacaaaatatcactttcagccatgagagcgacggtgctatttgattgctaatttctccagggaagcagatgcaatgtcaccgattatttcattgctcatgataagtgactatggcctactgcaagtatatatatactccctaaaatacatggataatcaacacctttttagatcgagattc

SEQ ID NO: 28634 - DNA, 33167 bp, Oryza sativa
atatgagatttaatgaaactaatttaatattttatatatggctaatttttttataaacttggtcaaacttaataaagttggtctaggaaaaaaaatcaaacgacttataatatgaaatggagaaaaataaatatattatcaaaatatatttaatgtgagatttaatgaaactaaattaatattttatttggtgctgactttttttataaacttgggcaaacttaattaaatttgactaggaaaaaagagaaacaacttacccttcaaaacctcgcaagttagcctagccgacgagcacttatacacactactccacttacactttcattctcgattcttgtaaataaaagggttaatccggaagtgatatggttggagggacaaacccttataaattagttccactcttgctaaactaacgagatggtactacacatgagcacacaaaaaacatgtcctcgtatgaaaacaagctttggttactcggtcagttggtgaaatggtgaatgctgcattgcacaggttacacattgcaggagctctactaacatgaattcggtgacatacatgtactctaccaaatcaatacaatcaatgtgcatgttcatacgctccaccaatgatgatggatatactgagccaaaacaaaaacaaaaaaggatgggttgaacattctgtaccaaattgcgaccaatgaggtggtgtatcatatctatcagcaactgtaacatctgtgtcactcactcactcactcactagctatgtgatggtcgaaggtgatcgaagccgccggcgagcgtggcggcaaaccgggcgacgttgatgcggacgtcctgcttgccgaggtagtactcggcgaccttgtcccagccgctccggtgaaccgcctccgggtccttcaccacctggtgctccggccccagcatctccagcagcgtgctctcgtcggcggcgacgctgtactccatgtaccggagccccatgtccgccaccggctcgccgaagtccgccctcgccatccgctccagccgcccgtacggcaccacctggatcaccaccgcccccgccggcaggaacaccgcgttcgtcagcccggcgccgtgcacgcccaccatcgcgtcgaacgcgttcaccttcctcgccacctcctccaccggctcgtcgaaccgcggcgacatcaccgccgcctcgaaccccgccgcctccgccgcgcgcaccacctcgtccatgttcacgatcttccggtagtgcgcgcgccggatcaccaccagccgcggccgcctcgcgcccgccgccgcggcgcgggggagcgcgtaggtgtcgcggaggaacgcggcgaagtccgccatcgtcagccgctgcccgcccggcgccagctccggcttcacgctgaactccttgtgcatgcggagcccgacggcgacgcggcggaagcaccggacctccgtgtcgcggtcgaggtcgacggcgtcgtaccgcgacagccgccgcacgacggcctcgtacttgcccagccaccatggctggatgttgctgaccaggaactggacctcgccgccgtaccgccgcgacgccacgaacagcggcaccagcacgtcgctgaagtcgtgccagtagttgccggtcaggccgccgagcgcgaacacgacgccgggcacgccgtgggtcaccgtgcacgccggcgcggcggcccggtcctgctgccgcgtcacggtcacctccgcgatgccggacacggtcctgcgcgggtacggctggatcttccactcgcggcggcgctccgaccggcggctcgccggaacaagggtcacggagagagccgtgccgttgatccggacgtcgccgtcgacgtcgcaggtgtcggagtagaacccgttcgagccgcacactaccttgccgttctctgttgcaccaaaaacagaaaaaaaattgattcatcgaggtttattagctcatttattaattaatcagttaaacgatcattaatttgcaaacagagagtaattagttcaactcatttattgctcattgatctaattaagtagagtattcatgtttgggtccaattggtctgtttttagatgatctttctaatggaaagtgaaaagcatggctttgcctttaatttgacagtaacattacaatgctagtaaaacccatgaatagtactagtaagtacagaagctatttggaatatagttgggcccacatgtcaacggcagtcaagagtagtattctgagaacatccatcatgttaatgcacaaatttgtaattttgtaaagaaaacaacaaacgttcatgcaaaattccaaatactagtactttcccaaacgtcctccaaagcttataatccaataaagtcatactctcaacataaatgaatgaatgcagttcgttgaaaaaaaatgaatggatgtactatattcacataaataaataaatgaaagcaattataatcagaaaccaacaaaatgtcactttgatctctaaataagaacataaaatcactttgtttttgggaacaaatattttgtgcttaccaatcggtttggcatttgtcgagtctcttttggagaactcttctgctgagacggcaccagacgtgtcctttggccgctgccactcctgctccctcttcttctctgcatttgccgaaagaattcacgtcagaaatgaatcggaacaccaatgtgaaaataatactagcatgcaaaatttgcaaacaaacagaagtaagtaaacgtttgtgcttggactgatcgatgcaatctgttagtaaaattggctgatcatgatcagtattaacaaagtatatcactgtattgatcagaagcttcttgaggtttcgtctcgatcttttcccagatttaattgatcgtcttccatccctaagtgtaccatgatccgatcgaacgaaattaaatactcctagtcccatcggagacacggttcgctcctcccaacatgttgacttcgatctcatccatgatccatcatctccgtttcttcttctcacgatgacttttgtgttcttagactgatgaagcagtcaagaaaaacacgatcaagatgacagaaatcctgtgctttctcacctgtttcaacgcgagccttggtcaccgactcattctcgtcaatcctcggcgccctgctagtgacagctgcaggagaaacattcagcaagaagcaagaacagatcagttcatggacaaaatgatgatgaccgacgacgacaacaacagaacagaatgatctttgtgcaaagaaagaagcttcttgcaatggaagagtacgtgatgatggttaggttacctgtgggagtttccatggcgaactgctgcgagacgatgacgtaggtgaggaggacgaggaggaagccggcgaagaagccggcgttgaggtgtcgccggaggccaagcttcgccggcttcacctcgctgcccatctctcctctctatctatctctgtctcctctactattcactcgtgctagtgtatatatattctgaacccaactctgaatctctctgaagaaggattgaattgttcaaggttttgggtcgttcgagaattgcaccgagctgcctccttttcctctcttttcttgcttgtttacatggagcatgaagaaaactatgcaaaaagaaagcgagagaaagagagagaaatggagtggtgtacttggatttctccaagcttagccagctcgcttttgtagagtttgcatatcagcatcaacttgctgttttgttaagcatactaatccatccatcagattctgattttgcagttacaccccccttcacatggtacgaaattccttttttttttttgctcgtgttgggtgcagatcagggtggactagcatgttaaactagtgttagtaacactaatcaactaattatctatagtaattaagtaattattaagtgtgcaaatggtggttgaccagtgactctctctgagagttctgattgggcctgataatcagaagacagcaggctggcattatttcattaactgaatgaaacagggtgaatttatttaacctttttattttgtttttcgcctaatctgacgccgatggatcgagttcgttcacatgcacgttgtttggtccgcgtaacatcccctttgattaacaagccccaaaaggtatcacagtttttttaaggactggctgctaatcaaggctcaatgtggaactgatgtttttcagatatgcattatagaatgtgtacaattaaaattttaaaatttcaaagataatgcaaatattaatatctgtcacatatagccacttcatgatgtattctgatgtggagctcttaatttccacaagttaaatacaattaaaaacagtcatgagccttgctagcatccagctaagaacacatgaacacccaagtctactagctagcttacccataagcaagccatatgcgtgttgccgttttgaacaagacgtggtatcacaatcaagtcgatttcgtgtcaggttgtcctcatcagggcaaacagaccaagttcttcatcgatttgtacagatcatgcacgcatgcaatggtttcttcaattcatcttttagatcaaccacccaacacccggtcgatctatttaattagctatacatttctagaatcattaacttctaacgtgaacacctctcacaaggcatgttctccccccatgtctaatcatttcttcatatagctccaaccaacatggtggcaactatcttgatcatcattgttgcaaacaaagtctgatcagctttttggaaaccatgtgtatactgtattacctagaagaaagcgattgtaatcgaaaaaaataaaaataggggggggggggggggtgtgtcatttctgcatttgactctgatatatttatatctgagtgtactgtctgaaaagtaacagaaattcagaaagaggcaaattataagctgcagattattattttgtgtctctcttcctgcattctccataaggtgataattaagggtttgaatgtgatttcaacaatgcaaggtgcatttctgcagaagcacatcacatcctaatcctcaagtgatcagtttcagacttcagtacagtacatgcatcccatgattgcatgattgtgagcgcatccaatctgtagtttattggttaatcatctctgtaggcctgggtggtagctagcccatggatccaactgttcaagtttaaacacatctggagactactagctagggaccagttccttaattgcaatcagtaaaataattaatcctaattgagtttcctttttattactgcttggatggaatcatggcacgtatagtggcagtactgcagcagtagaatattatggtcactgagtggtcaacaccaccggcagaagctcggctttaacattgaccatttttagtttcttctcaccctagcaatgttgttactctctcatgtttcctaattaattatactatcaggctgcagcattgttggcgatggaattgcatccttctgatctgttttgtctggatgcatggctcacgtgagagttcagagttcctcattttattttggatggcagaggtataaataagttgtgttaaaacaccgatggcattctgtctgccaaagaaaagtaaacaagatttgtcagttaaatgtacagtaaacagacttgttttatctccataaaagtactcatgatgatctcaaattcacaagtgctgctgaatcacacttgattttcttaattttggtatgtgtacaaaaaaaatacagtacagtttggtctcttttttttttttgacataagaaggtagagccagctttaccttatagccatttcattgatataaatggacggttacaaagttacatgacgagtagaaaaaagagagggagagaaaaaaggaaaaggagaaagaatttggtcttgttgatatctagctcgtgatctgtttttttttttcgggaatacacaataaacacatctttgtattaagagaagtaaagtttatttacagtgtagcctttaaatggaaaaaaggggaaggggacagggtacaggatcggacctagagaactaaggcctaatctcccactagattttgcgaccgccaagccatgctaggcagaggtagttcaggcactgtgagatgtagctcgtgatctgtgagatggcaaagaagactcacacgttgctagctagagtagcttggggacttgtggtagctaaatgctagtactccagcgagccaatctagtgactaatatcagagttcagactaaagacaaaggtacaaagctcatggggttattggttaagagtagtagtataagcaaatttgtgaaacgaagtcgagatccgagccgcagtggagcacctgattcagatgtacattacttgaaaaagaaaaaatgcagtcatgaacggtctctggatgctgtgaccgatccagattggagttaacttactgcaacttgcaatatggagcagtagtaattaaaggttagccctgaagagagtcaactccactcagtaataaattgttggtaattggaagctactgctaattagcttcttctgtgcaaaggccatatggatcggcttgtgagttgtgacatggacagaaagagaaaaagagcacataggtaccaacttggaacacctgagtaactgggctgagcatagagctgagtcgttgaccaatgcatggatctcatcttgttttccaaatactagtaggtagtgcaaactccactggcgacaggattaggacatgctgggtgaacagtttggcagcctaattatgaaatgaatggggactgactgcaatttactctcttagattagtcagtgcggagatggagagaaactcagaaaaggaagcccatgagtgaaaactaaaaaagtgagaagttagaattactagtatagctttatttccttatttttagatgttagtgaatttctatactgccgcatactactgtactggtatatctgaatttctgaagaccggtatacgaacgtaacgaacctctgaacttccaagttggacggagcacctgaatacggagactggatgggcccagtctagatcgtattcagtgttggaacccagtagcttacatgggccggactggatctataacgagcagggcaattgcgttggacggatcgggccactagaacgagaccttattactgtgggctgaatatgattgtttgcgtgtgatccatataattgctgggccttatctcttaaataagaaaaaaaagagaaaaacctatggtgggcctaatacctagatgcagcccatttaggaatggccagtcccgtccgtactagttcagcacgtttgagaattgaacagatagaaaaaagaacatcgtttttcatgcgcacgattcttgattttttcataaaaaaaagtctatagagaagttgctttaaaaatcatatattaatctatttttttaggtttaaataattaatacttaattagttatgtattaatagtttatctcgtttaatgtttgttctcaatcatccctattcttcttttctcaaacacagaggacgtaggagtgagtattccaggtacgccgctgtaggcggcacggcaggcagcgtcaccacctgcaccattgtttttcaagtactccccacaaaaataaagattaaatacggacatgtaaaagaattatgattatttaagttttaattattttaaatatagttatctaatattttaaagcaacttttatgttgaaagttcttattgtttagcaatttgaaatatgtgttaatgacaactgagataaaatatgtatcttcataaaaaaacgaacataacctcaagcaatacgtagcaaaataagtttgtcttagtttactactatatagtgctccctctatcccaaattgtagaacgtctttttttaaaaaaaatcaaacttggtaacttttgactaataatatggtgctaattttatattagttaggaatataatatataataaattattggtcaaaatatgtcattgaaaacctttaaaaaatatagttttataatttgagacgaagtactgcttttgttcttagctttttcgatcttgagatgaaaattacacaagctgaccaactccaccaaagcctcctaggacgcgagccggttgacccgatcaaattcgtggcgtgatttgctcccattctcgcgccgcgcaacatggatgcaacccatcaactttcaagacgtgcgtgcagcaacgtcatcaattttagcgtttagtttggcagttacaatgccgaccgcccgtttattaatttcttcttccacctccgatcctccccgctgaatgatacggatccatcaaaacggacaaaccgacgcacccgacctactccctccattctaaagaaactccttctaatacaataaatctggacgaaatgcatttatcatccattgtgcatgcatcaaataaaaaaaaccaagatttggaggaagagacattcctccaaacattttcgaagaataaattgtgagcgcgttggagattgaacacggaatcttggggttaaaactacacgtctcttaatgcagcactgtcaagagcaacaaatcaaaatgattaacgaacctcctcatatgttgctgtttggcatagtaatacgcgattgttggagaggaacaaaaatttccacgcggccaagactgttgtgctcatatctgaccctgataagctaccaaactcgatcttgacaggccgacatactactatactagtgtgtttatgtctgtgatgatcagccactacaaagtcagacagccatggacacacacaaacacaagcattggtcagagtttggtatccaagaggatcaattctaccaagaaaccaagctgcatgttcctcgggtctgacaatcaaaatgcaccagtctacaaacaaaattcggtagcgttcggcaatgcaaaaaactcatctcaatcaccaatccttcttcttattattattcttcttttagagtttgtagcatgcatgaatcatggcctagtttaactgggtcaaaccgcggcctaacttcactcaacatttgcataattgtgcaggtttattccaagcagcttctgcggcttcaattcacacacatgacttgcagggttggttggttcggatcctgactttctacaactacagtgttccacagtgatggggatggaccagcccaaccccaacacaaaaccgaaccgacactcgattcaattcacacacatggcagatatatggtgatcaacaattggaagcaaagaacaacaagctaatgctcctaagagcaggtacagtagcaggctataagccaggtgcaaacatattttaagtagataaatcaggagagagaagagcagcgggctacagatttgtagccagctatagcacggactccaagacgcagtgtgtctatgacaggtggggctaggtattaatagtgtagtatgtaactattgtatgaataagctattagattggctatagatgaattggagctagtagttggctatactattaaacttgctctaagaaggaagaatctggatggaaaggctggaaagcagacggtccatgctactctgcctgattgccattgcctgcctctctcttctcaattctcatcgctttgcagctccagtccgtccacagattaactttccaagtagtatcaaccttttactatattttactggtcatcacactcactgatcactactcacaatgctagctatagattccttgattgatggccccatgatccctttcaactattttctagcctttcttttgcctgccacctcactctcttcctctacatggctccagcctgccaaatgctgttcagtttaactcttgcacatggaacctcaagattgtcatgctactaggttataagccagcacaaaattaaaagttatcaaccaccttgttacgagtagtaaattgggagtatctgacacgcaaacagattatgcacatttggctgtttgtccatgtgtaggtatcttgcaacaaaggaagatcgtttatgaaagcatggatgcttaaactatttttacagtcgtcgacaaagagcagattccctgcagatcgacagacacgtagtttgcgagatatacttgttaatgcagtgattatctcagtgagatcaaaaactccatacacatggtactgatcctactctatgtactcatcgcacacagattgaaattggcttgtactgggaggaacacatcatcactcttcctatgaaattgtcggtgacaaatctccgattattgatcaaaaaaccaatcagtgaatgaatgaatgactgactgaatatgacggtagcaattgctagctcgatatatcaccatcagctgggccccaaatcgcacatgttgaaaatggccggatgattactgattcgaggacctgtctgactatcttgtttaccagtattactcatgcaacagcctgacagagagtgacagtctcaagtgatcatgcagtagtagtagcactgatactgtatagtattagcaacaaaggtgtatacatatactactattcaaaatcgatcgattcaacaccaatcgatttcgtatgcttgatcaaatgaatgaaataattggtggtccaaagctagcacgcagacatagcgtgagatcatatcgatccccattacacgggccataccatatggtccttagcctgtactaacaattagtactactccagtgtaccagtacaatactgtaatggtatagcgatattgctagtactagatagtagtatcagtcatcttacaatttcttgctattgctattgcttcaccaaccatttggtcgtctgctcctgaacactagtacattaggtgcttagtactaattgctactatgatctgattagcaaaaaccagtacattcgttatggttatcatcagtagtactaactgcaatcttcaattcgtactttggaggtttaagaccattaattattgagtgatctgtaatctttttttttcagatgcattttgcaggtccattagtacgtcttactctgattttttttttttggcaatttggaactcgaggactagctcagcagcaacgtgcaagctgcaactgtgttggagctcacgttcctggtccatggagatggaggccaccgacgattcataccttcaccgttgcttcattgtttgcacgatctcacatgcctttctcaggtttattttatacaatttttcccagcagaaacctagcttggcaggagcatgtgcttggttaaattttagttaagaatgcatgcattaagcatgctgattgctggactagtcctcactgaacagtgaaccctgctccatagattcatcccattgattgatttttaattactatagcagcagtagcaagtggcaagatggtaaacctgacatgtttacatggagcagttcaccaatccatgcaatagaaatgcgagcttaaagaaactttattgtggagtacaaagttttttttttattagaggatgaacaaccataattgaccatccaagaccagttatgaagttactgtagtgttgtccttgcttaattgtccgagcagctaattacatttcgatagaatgagccatctgaattacagtaggagtgtacaactatctatgtacatatgtccttgattctcgtataccatatcatcatgtaatttattaataaagtatcttttttgaccgtacataaataattctatgctgtactataaaagaaaaaaagaagcaaagaacagttgttacattatgagatctggggaaacaaaccataatctaattaagcctcgtacacttttttgggttttggctactataggagtatacatgatcaactcaactaccactcatgaaactcatcttccaatcgagataaaaaaaaaacaaagagatgaatatagtattgctgctgatctcctcctctgaaatatcatacatttggtcgatctgctagctgctacagtctacttttacttactagtgaaaagatagtaaaagaagaagaaaagattaaaagatcaagaagatggtgtacattgatgcatccatggcgatcgatcgaagaaaaattcgaaatggctagttgtgtgtggtgttattgttgccgctgttcttgcggaggtgagcaatggccttcttgaggattggtcggaacctcttcatgtcgagacgaacatcctgcttgtcgaggtaggcttccttgagagaattccagcctttggacttgacgccatcggggtcggtgaagatggggtggtctcgcgggtactgatcgatcagcgtgctctcctccggcgtgatccggtactccaggtaccggagccccatgtccctggacggcccgcggaagtagccggcgacgaactccagcccgcccagcggcaccacctggatcaccacgccgccggtggggaggaacaccatgttcgtcagccccgcgccgtgcacgcccaccatggcgtcgcacgtgttggcgagctccgcgaacggcgccacctcgtgctcgccctccgacaccaccacctcgaacccggcgcgctccgcgcctcgcacgatctcgtcggcgttcacgaaccgccgcgtgcgggcgcgcgcgatcaccaggagacgcggccgccatggccgccgcggctgctgctcgccggacgccgggaacggcgcgtcgcggggcaggcggtaggtggcgcgcatgaagcgggtgaagtccaccatggagtagccgttgggcgcgcgcgacgggtcgatgctgaagtcggcgtggcatgtcaggccgacctggacgtggcggaagcagtggacgcggcggtcgtcgtcgaggttgatgaggtcgtagttggagacggccttgaacaccggcaagaacttgccgagccaccacatctggaagtcggacaccagcagcttcacctcgccggagtactgcctcgccgtcaggaacagcggcaggatgacgtcggtgtacgcgtggaagtagttgccggtgtacccgcggtcggagaacacaagcccggggacgtcgtgccgctccgtgcacgccggcgccgccgcgctcgccgccggggcgggcagcgactgcaccgtcagcacgcggacgtggcgcatggcgttcgggtcggccttgcgcgggtacggcttgatgtgccacgactcggcgcggaacgtgcgctcgtcggcgggccccggcggcgccaccagggagacggtgccgttggcgccggcgacgcggacgtcgccgtcgagctcgcaccagtcgatgcggcggttcgaccagagatcgcacagcggcttccactccttccgccgcggcgccgcctctgaatcttgggaggaccatcaatcaatcaaaccacgttgcatgttaattatgacccagaaatgcagcaagaaagattgtagattcgcaaccaaattaagaacacaaaaaacaatgttgttgtagaccctacgagatgagaaatggtgagatgataatcaaatgaaagacactagaaaatgggggctatcaataagctaaggccatgggatgatgatgctttattactcttaaattgctctcctctcaagaaaggtgaacaaggcacaggatgaaaacaaaaaaaggtggtccagaacagaacagcaagaagaacgttgggccttgcgttgggataggcaagacatcaaaaatgtgtgtccaaaaactagtctccacaatccacattttgcaactactccatgtacatgcctttgctacttgcaacgagaatttgtgctcaaaatctcaaatgtgttctactgtaggtttcaaatgtgtagctaaaaagaccagcagtatgccagtagtacttggcattttcgcaaataaaaaaggcatctttttttagcacaaggaaaacacaaggaaaagtaaggaggaactagatacctgtcttaaccactggaaatgttggaatctgctgaacaggaggaactttggcctctggaacagctggaatttgctgagcaggaggatcctttgcctcttgagtaggaggaatctgctgaacagggagagtagcagggtcggatggaaccacagagggggagctgccattgttgctgctcttctccggagaaggattagtagtagcaggagcagtctcctggactttcagctcctcatcctcaagaactgaccaagaagaagaagaacaaaaaaacagcttgttaaaaatcctgcatttcccatttctgacagaaatgaagaggggggaaaacatctcatcctggttacttcagagaagttcaattggttgtgttttttttttttttacctgaatcctgtgtgatgtttgtgggttcctctgatgacaagggaggaagaacagcaccgacaattgcgtcatcatccttggcaagagcctcatctgtggaagcagacacgcttgcatcaccgctatccttagcaaaagtctcatctttcttcttcccctccaacgctgatgcattgtggcccaaatctaaaggggaaaagaacgaaagaaagaaaacaaatctttttcagattgtctgaactttgcgtgtgagccagtagaagtaccaaagcaacacaccaaattcgaattcgatccatgcgcaagcaaaatgatctgcaaatgattgcgagttggagttgtttacctggccccaaagaggaaatcttgtcgtcgccgtctgtgtcgagcacctgagccttgctcccttccctggacattgcatctcggtccaaatctaagcagggaggagagatgaacaagagacagttcgtcaactcctcgattagtacagcgagtgaacctgtcgggacgaatgaatcgccgcttgctcacctagctgctgctgattggagccgtcagaagaagcgttcataaacccagctgcattcttggctggagagcttactgcaagaatccatggcgacaagagtgagatacacaggtaggcatggagatgcgtgaggaggaggaggaggagatgggcgggcgtactcatggcgatgtggatggcgtcgaacttggcggtggagaagtaggcgcaggtgacgatgaggaacccggcgacgaggccgaggccgaaccggcggggctccacccggctgaggttcttgagcagcttggcgtcctggtggtggtggtggccgccatagctgtaccccgccttgccaccgccctccatggccgccgccgccaccgctctcgacctctcttggcaaacagcacggcacactctctctatatagtaaaactagagctcatgtgtgtgagcgtgagagtgcagcggtgaaggattaactcaccggagcttaagtagagtagataattggagtgctcgtgagcttgcttgcttgggcttggcggtgatggctgaggtggggggagctaggagggtgtcagcatgtgagtgtgaagaagagaaacagaggaggaggtcgtggaggccacctccatttattatttctccttaactcgtggctttctgttcttttccgttttttttctcctctccttttcttttttttcttttcttctcgtcatcttgttttctggcctactccctccgtccaaaaaaaaaaagacaaaccctgggtttccgtgtccaactttgactgtccgtcttatatgaattttttttataatttgtatttttattgttgttagatgataaaacatgattaatattttatgcatgacttgtctttttaattttttttataattttttcaaataagacggacggtcaaacgttagacacagaaaggatttgtcttttttttttacagagggagcaagtacttccgttttttcagtgtgtaaaggatggagaaggctgacttttttttttttgtagtgaacgaaaccgtttcatctcgccggcacacgctttcaaaacctctaatatagagtagcaattaaagatgaaattagccctaatttagtaagtacgaatcagcctgttatttgacctaacctaatgatatgaatttggacaagttaatacgtagtaatctggataggtaatcaatctcatcctagataattacctgcctagtttgtgatagtgttatcccatccttaattgctactacaattctgggatagatgaagtatgtcttaattcttgtagaaactttatatataatattgatttctcataaaattattttaaatctattattaactttatattatttaattaatgtatttgtaccatcaactatttattacaggccatatattcagctattcatccatttagagagaaaaaaataacgcatataaatagtaagggcccctttgaattgcaggattgagaaaacgtaggattttgatagaaatgtaagtgtaaaatagatgattgtaaaacgtagaaaaaacataggaatgaccatttgattgaaccgtaggaaaaacacaggaattagatgagagagatagactcaaagaaaatttagtaagaggttgaagctattcagaccatatattcaactattacagaccatatattcagctattcatccattcagagaaaaaaaaaagaacacacaatagtataaatcaataatgtactgacgaagtaatatgaagtaggggatgcagcgcgcaacttgtggctctgactggatgcatagtttctgcacggcgtgattgattggcaattggcaccgacgagagcatagcagccggatctcacacgcacagtcaagatctgcaactctgagcttctgatgaagttctgaactgatgaattaagattataacaggggaatctctctgctaactagtactgtagttcccatctaatggcctggttgatctctctattaggagtatctgaggatgatgctagtaccatctttccagtgatgagtgattgaatgattggttagtacacatacgcgcccatctgatctgatacggccagcagaatctgcttctgtactgaaatgctgctggtactggttacagattgattacagataattgtcagtgtattgcctcccatagatgactatagtaaattgcagctaatcgtgtgactcatcggtttcactgaaaaagctcataggaaactggctgtctgaaaggcaatgatcagttagttaacacatgcgtgttgcattagtctttgttgggctgatccatccatccacagattacggcggctgaagatgctaaaggaaggagaggctgcctccaaagctgctgcttccttccgtgctttctgtgtccgtttccacatgggtccaactccaacgtaagggaccagatggatcagtcagaggcagcaccacacacaaaaggaagcccatatcttgtgttcttcatcgtcttgcacctcactcaacatcgcccagtgaattcagtatttgagtgatacgataatagctgaattacatgcagattttacaaagttgtgagcaaaattcagttgtaacaagtctgaaatattcttctatctttgtgatgcagtttgttgtttggtccaaattcgtaggagatcgcttctgaatctcagaatctgcattggtgttctcctttcgtggttagcagttgctgtcttatcaacatttccttgctttgcgatgtggtcatcaaaactattctaggaaggagttgatgcatggttctgcaccccgtgaagtcatcactgtccactaaccgttcgttcggttctttgttttcagaagcaacttgtccgaattcagtctgtaaaattttcacaagcagtttgtctgaattcagtatgtgcaacttccctacaaccaatgggcacctacctacccctgtcaacactggcaaagtgctcaaccagctcactagtagattaatccaattacatacagttacagtagtcgttttgcttgcagatttactcaacagctagctttcctggataattaaaaacttgatgtgtcaggagatgacaagcagcaacaagaacaaagaggtataatactgcacagtactgtatactactggtactcatactagtatcatacagtgccattcttggtattcaggcttggtgaatcagagaaaaacaatggaatcaaatcagactagctaggagaagatgattgtgtcactagatatggtaagtaagtacaatagacaagaacaataaatgctgcaaatcgtagcgattcaggaagtggttgctacgtccattcatgaatgatccggtcgcacttgcacatcgccaacatgttgaatcgaatggcatcttgcttgacacttccctttcgttgatctctgaaggactgaaacaagcttgtattaagggcccaatgcataaacaatcgaggcttagtcactaatcaaatcatggcgagaaaaacacattcgcggcgtgccaaaaccacaccaacgacgaaaatgaaggaattggggccaacagctatgcctgaactatgcatggctgctggctggtttatcgggcacaagagaacaagtgtttttttatcttaataggaagaaaacaagaacaagtgttaggttggtgcaagaagaagaaaaagaaaaaaaggttcagaactttaggctgttcaaatgtaacgacatcttcaatacagtacacggcctaataacggaatctaatgaggttgatttgtttgttgtgatccaatcggcatcagcatttacatgaggttaggtacaataagcgctaacttgttcagtttaaaaaaatgagcgctatttggttggaatgtctcataaatacaaaacctcctgctaggctgctacaatataactgacctgcaatctgaagtttctgtgctcaaaatgtacaataagaggctaggaacttgggcagattagtcatgtaaatctcttggatgattggaatttagaaattatatatagcggcatggtacaacagacatactacaggagaggagtgccatgtagtggtagtggtactgtcggcagaggcagcagccatacatacagcacagagagtggctagcaagtggtgagtggggccacttgtcagagagagcataatttgcgtcgaaatggcgcctaaccctgcctaaattcgccagtggatggaccatctcgttctcgttcacgttcagtcagacaacctacgaacaagatgcatctactggaaattggtaacgaggtgaattgggtttgggcttttctttcaccgcacttatctgggctggccgggatgctatcacatttttttaggaacagttccttcctctaagaatagaagttcagagagattcctataaaatcttaaattcatcggctcagacttcagaagttcagagctacacactgaatctgttataccataactaccggttaccattcagtttaattgctattagaataagatcttctagttaacctaaacacatttaaccttacatctcacaggagaggtaagcaaaacaaagcgacacatgataaacagctagtgttaaccacacatgataaatttacagtacaggattcagtcctccaactgctgctcatccttggcgcttgcttctcctctcttcacaaaaaacaaaacaaaagatgtagtctgtcaaacattgtgatttaaaactgatctcagtgttgtatatctaggacaaagctagaattaatcatattgtttgaataacacttttaataacatgatgtaacgaacaatattgtccatggatcaataaatctaaatcgaagtactagtatataacattacagttaagataaaactagtaaagttataccgtgtggtcctgtaggtatgagctgaagtcagtagcaatgagatagggtgtaagccaccgcaattcgccgtgttgagatatcttcgtgaaagacaggaccttgttctgcagaatgtcaaagcggatcatataattggctttggccaccagtcgatccccaagaacttggccgaattcattaacgtgatcaggtattggctcctgaaagatatcattcagaacggcatacatgatcccatcttcgttcacgctaagaataggaatcggcataacatgtggcaacccaatctcgttgaagctctcgctcgcccagctgtctccgacagtcaatgtcgtttcctccttccagtgcttgaaatctggggagagtgaccatgtcttgagcttcacctcgttggcgggacaagaagcttcttcgcagtagccgatcaaggcgacgaacttgatggcaccagagacgcagccgatggaacggtgctcattcgggctgaagcaatggcggggtttgccgtggacgtcgcggcagtggggcagcgggacgaacactagctcggggccttccggcgacgagacgtggtcgcaaatcaagatgcccttgaggagatcaacccagaagatgctgccttggaaggagaaggccgtgtcgacgtggaagaagtaggtcgggccacagagatgtggagggagagggagacgaaccggcggcgtctcggcccactccgacgacgacgagcacacgaagagcttcgcgtcggggagccctgtggtggaggaggtgacaatgtcggcgaggatgtaatcatcatcatcatcgccggcggtgacgacgacggcggtgcggccgaggggaaggaaggtgggagagcatagggaatcggggagtgggggcatagcggtaaggtggttgttggaggcgtcgtagagaaggtagtatcgatgggcgtagatgacgacgatgccattgtggatgctggagatctcgccgatcccagccagatgcgagtactccggcggcagcagcatctgcaggctgcttacttaaggtgggtcggcgagaaagggaacgggtttcatgtccggcgccatccgccactccatctcctccaccatctgcactctactccaactccacccaccgatggttaactctttcccttcgacgaaaagcactatgcgatcgagcaacacgcaaggaggcctcgggttcgccatgagattgttgcttgacctagcttgacgcgcggctagggtttgctttgcttgaacaacaaagagaaggaaggaattggggaattgaattaaggggctctctctctctctctctctatatatatatatatatatatatatatatatatatatatatatatatatatatatatatatatatatatatctgtgtgtgtgtatgtgtatatatatatatacatatatatatacatatacgtatctactactacttaaaaaataagaggtgcttccatcgtccgtcaaaaaaaccgggtgaaaaaaaaccggaacgaatccgattcgtcaacgcggtaaaagaatatgtccgattccacaaaaataggaaacaaactcccatctgttttcgtttgagctgattaggactttgtttctgtttgggcgaataggacttggtttgaattataccaagtcctattcggttagcatcaccaggagaacaagtgcatatatacatacatagtataaaaaatcatagcacataacaaagaatcacatgcagccttatagcactttgcaaaaaaacaaaaaattagatcgaagggggtcgccgccagcacacatatatccaaataaaaacaaaaaattagatcgaagggggtcgccgccgctgccgccgtcgccgtcgccgtcgttgccgaaccgccgccgtcgccgtcgctgtggatccggtggaggggagagcaccgccgccgccgcctcccctcccgctagatccgccggcggcggcggcagagggcactctccggtggtgggggagagcgccgccgccaccgtcggtggtgggggaggactccaccgccgccgccgctcgcgggaggaggggcgccgtcgccgccgctcgcggggcgcctccccacccgctagatccgccgctggtggtgggggagggtgctgccgccgccgctcgcgggaggaggggcgccgtcgccgtcgccgccgctcgcggggcgcctcccctcccgctagatccgccgccggtggtgggggaggatgccgccgacaccgccgtgggtggtgggggtgccgccgccgccgccatcggtggtgggggaggggcgccgtcgtcaccgccgccgctcgggggcgcggaggagaggccggtgaagtgagatggcagggagggaaatgggctagggttccgcggctgagagggagtgggttttgtttccccactattgacgctcggccgtccgatcaaaaccctagagatcggacggccggtgtcgtccgggccgaaatcggcccaagagggatcgagagtgaggcctcttttccggcccaagcccaggttgcggcctgggggaggaaaagtgcgcccgcgcatgcgcaagaggccgtgggccgaccggcataggtcggaaataagtctattgttggtccctcgagccgaaaaaaagagaataagtacatttttagtgctcattttttcagaagcattacaattatagttctattgaatatgtttatttcgaagcaaacctataaaaaagtattttctttctttttccaattaaataattgttaaatgatgtttgtattaataaaattagcaattaagctctgaaaattccaataaaattccaaagagcgtaactaattatggagaatttaataaaattaaatttaaccatgtcattttatttaaccatggagaatggagaattttacttgtaaatttatttaattatacacatacctacttaaaaataccaaatatttcagcgagtttgtattttaattaattgcatatttttctgatctgtaaacttcccggtgcaacgcacgggcacttttgctaaaccaaacaacacttttggtcaatatacacactctgtaatcacccagtgcaacgcacgggcacttttgctagtatatatatatatatatatatatatatatatatatatatatatgtatatacatatatatcttgtgatagaaaatcacagctcctatcattcgaattttagactattggatatgctttaagatttgtgcagacccatttaaccctaagtcatctcctcctccctcgttcagatcgcgccgccaccactccgcctcccgtccccgcgcgattcccaccgccaccgccccatcgcgccaccgcaggcctcgccggctggccgaaaggagtcaacagtgctagcgagccccctcccccttccccctctctttctcctcgaggcggcgacgatgaggtgcccccgccccgccgtcttccccgtctccggtggctccccgccgccggatccacagccaccgcccccgtcgtcgacgccggcccaccgccctcctccatccccgttgcttcggcggcaccgttgccgccttgccgcccgctgaagaccaccgcccaccgccggtcctctgccgcccacggccatccctctaagccccgaggaaacactgaccccaaccctaacctaacccgtatgttccctactagagttggggtgtcaccggcaccggagaagaaggggagcccgccggagttggaggagagaaatcgatgcacgaaacttggtatggatctaatggtcaaaaatctaatatgtaagatttcatccccaaatttcattcgaatgacatatagcaatctcgttgaattaatttccttgttgtcgatgagaaaaatcatgggctcctatatatggcccatgtattaactgctgcaaaggaaaagcccatgtgttgagtggggccggttgttagagagagtataatttgccatggaatgacgcctaacccgaattttttttatttttgtttttttaaaatatttacagaaataatctatcgtcagaaaaatttacaaaaatagaccctgccgctctagtggaggacggtaagctgacgtggcagacggcggctcgacggcgccgtgtgcgcattttacgctttggtccggtaaggggtgaaatgcaatttgtccagctgaatagaagcattaggctggtattttttttttgcatctaggccataatgcttctatccagctctgttgataatggcccttcccggactggcttttttacatggaggcccctagccgccctggcagtgggcggcatgggtgttaatgcaaaaagttcaactttttcaatcggccgtcaccgcccgttttttcacatggtcagttgtatgtcgcattgtcaatgggtgtgtaaggcaaatgacaaggattttggcacagccgaagaaagaaagtagaccccatagagaagatcactaggaatatcgtgtataaagacgttcttgactagtgagcaaaggtaggctcgcatgatcaaaattaatttgaaaacataatatagaaaataataaattgctgatcggagtattaatcaccaacatcctcttgttttgtacaacatgccatcatcattcaagtagtatattgtgtgattatcttctccataccatctcgtgttacatgcgtcagtttgcatcgggctgataacaatactatatgttaacacgcgtgtctctctaaatatgcacttttgccatcaacaaattttagtagttgtgccacgtagatcatggaagaagacgttaatgagatgatcaacaattgctatcttgttatacattgtgaaactattaatttggcatctgcttcaaatgaaattgttatttgggtttatattcacattctcgtgctacgtgctcaatgggcagtggccggcgtgtgctttgtgtgacaaatagaaaaaaagatttttttttctaagtgcataggccaaatgaaaaaaaatgaatggaattgacctaaaggaacatccaaattcacgacatgcagaaattatattttcttgtactctatataatgtaattgcactaatatactttgttttctatgtattatacttgtgagagattatggtacacctgaataatgaaaattgatgttattttttttgaggtagtattgtatagtgttttatttataaattttatttgaggtcaaatatcaataaggttgtgttcgtttctttgaggtttccaacctccactatatcgtttcccgacggcgaccacgacggctctcggtgacgacaatcacgacgcgcagctccgccgcttccccttctcccctccccgccgctttgtgggccctgcgtcagatgcatgcagtttcaggcgagactctcgttgccaaaatgagacaaaggaagcaaacaatggtcacggcctcatctacattttcgtccaccgcagcgagtatcctatttggctgggcgagtctatacatcacgtaggagcgtggtgaatggccttagggtgtgttcggcaacacaggttcccaactcctccccctcgtgtaccgtgcgcacgctttttaaactgttaaacacagtgtgttttttttaaaaaaaaattctatacgaaaattgtttaaaaaaatcatatggatctattttttttaaaaaaattaatacttaattaatcacacgctaatagatcgcttcatttttcatgcgtacgagattagttcccatctcctttatccaaactcagccttagaacgctgggttgtgtggcaatccatcgatcaatctaaaaaaatatcctagctggagctggagggggttggaaatagccaatgtgcacctggtccaggaagaccttgtgcacgggtgtgtgtgttgagggttggcgtccgtgtccagatctacagacgccaagaaggaagtaattccccaaaccttagatcgcctcttcttcttcttctaatcttgctgttggacccgacgaagcaaaccctagcctcctcctggagtaggcagcaatcatggcagaccaccccaggcctcctccctgtgtgttgctggaacgcgtggtgcgtttcgtggaagcagcagggttaaccagcggtggcgccagcagagacccagatgttgcggccataatcgaggtcggcggatggagctggagcacagtgcaaatgatgggttccgtggaggagatggagcggctgatggcgccgtccgtgaaacccgtcgccttcctcggcgacccacctcaagtaagcagcctgcacatgctgctgccgccgccggcgagcctggatctgcttgggatcggcgagatctccagcacccacaagggcatcgtcgttatctacgccgataaatgctacctcctctatgatgcctccaacaaccaccttaccggtatccccccaattcccgattcggtgacctctgcccccatcttccttcccctcggtcgcggcgctgtcctcgtctctgccgccggcgccgatgatgatgattacatcttcgccgacatcgtcacctccccctccactagagggatcaaccccgcgctccccaaagccaccatcttcgcgagggtgaagaacggcggcgagtggatccagtcatcgattcctcccctccctctccctccacatctctgtggcccgacctacttcttccacatcgacacggccttctccttcgccggcaccatcttctgggttgatcccctcaagggcatcttgatttgcgacgacatcttgtcatcaccgcaaggccccaggctagcgttcgtcccgttgccccactgcatcgacgcccacgacaaaccccgccattgcttcagcccaaatgaacaccgttccatcggccgcgtctctggtgccatcaagttcctcgccttgatcggctactgcgaagcttcttgtcccgagaacgaggtgaagctcaagacatggtcactgtccccagatttcaagcactggaaagaggaaaccaccttgactgtcggagacatctgggcgagcgagagcttcaaccagatggggttgccacatgttctgcccttctcccctgtcctcagcgtcaacgaagatggcatcatgtatgccgttctgaatgatgtcaagaaggaaccaataccgcgactcaatgagttcggggacagtcttgggatgcagctggttcctaaagcaaattatatgatccgcttcgacatgctgcaaaacaaggtcctgtcctccaccaagatttctaaaaaggccacttcgcggtggcttacaaataccttccttgctaccgacttcagtgcatacctacaagaccgccaggtactttactagtaactgctaccccactctacttctctggcttcatcccaatcgtttgttttactgctttactttgtttcagactcaattgatgcttatatttgtcacatcaagttagtttcacttgtacaactaactagtaaaaaatattgacatcttaatttggccaaccattaattaacattcaagtattgaacaccgcttagtgtgtcatatgtgcaccagcttcccttcatgaaccaatgagcattacaagtctcatgttaaactttgctagtaatattttttaaattaagaattggtatcagcctaagttcattcgatgatttactagtatgcagtatgcagaggctcaaatttaaactgaaattgaaaaaaaaaatcagcaacttccgtagccttccgttgttatttttgacaaaaagtacaatacccttatcaattatcccatttgcgtttatggctcactgttttggcgcaatactatttttaattgacctttcttactttatagccctgtgctatgatgctttcaacatattccaatctgagacaagcttaagatatccatgcttccggaacgctttcttttctagaaaattatttttacagtcttctaagtttcacttcttcaatacaaacctgagtgaattgtctaattagttacttaatgaatctagagttttcaaaatcaatttccgaatgtatacacggttggtgttatgttttctttggtgtagaattatttcatagtggtttcacttatccaatacaagcttcctttcttttgtcttaaccaatgaaaattacctggctcttgttgaactttgatagttgtaactttcaaattaagaattattttcagagtccctcagtttagtattattttcagagtctccctgagtgaattgcctaattaatgaatatagagaggttttgaaatcaattaccgaatgcattattggtacaagcctaagtagattctaaaagatgcagcattctgaagtgcaagactaaaaccaacagtggtcttaactgctgctggcaacagtaacaacctataaccacgtatattgatgccatggctactaacctcattagcaacatgccttgaagtactgctgactggacactacccctcttcttaagtgttgaagaattataattcaagctttggcatagataaaactagggtcagatttaaatcataatgtttaattgacagtcatcttcattttgttttggcagaatgctgaagcagcaggcaaggttggagcaagcgccaagggcaagcgtaagcggatgagcagcaggcaagctggtaggagcaagtgccaagggcaagcgtaagcggatcgaggagtgctgaatggtactccctcagttaaaaaaaaaaaacaatcctgagtatgaacctggacacgtgtgtgggctcatacccaggatttgttcttttctttttaggacggagagagtagtatatttctgttgcttatcatgtgcgcctagcatgtcgcttttttggcttacatcctgtgagatgtaatgttagcatgtgtttggtttcgggactaagtgggatgggatgaaaccatccctgattttggagttgggatgattccactcacatgtttggtttgtaggatgggacaattctaattttttgtttggttgaaaggatgagggagaaatgggatggacgccgtttgccatcaccgtcaacgaccgtcgcctgcgccacctgcatccacgcgtggaacaaccggatcaagcacagcggcagcagcaggacggccaccaccgccggagcacccaacccgctggcccaccgtcgtcgccgcggctggatcgggagatcccctgcgccggatccgccgccgccgctctccctacctccaagtttcgccgccgccgagtcccccttctctggatccgccgccgccgccctccctacctccaagcttcgccgccactcgagcccgccgcgtcgacatcaccgcagctgccgcaaccgctctcgtcgagcatcacgatgagcggcgggatggcgccgagcatctcgctcgcggcggcaaccggtgttaaggcaaggggtcgtggaggagcgccggcggtcgcagaggtggtggcaggcggtcgtggcggagcgccggcggtcacggaggaggcggcgggcacgggcgcggacgagcgcctgcggtcgccgaggagacgccgtgtgctccgtccaagtgggacgagctcgtccggccgattttgccggatggatttgtcccggatctaggaggaatattcctctctagggaccaacccatcccactcgcccctcaaccaaacacctctaaaagtgggtttgtcccatcccatcccatcccatcccaccaaccaaacactaccttaaatgtgtttaggttaaccatcagaccttattttagtcactatcagactttattttaatgatatcagcctagcagttaaaactgaatggtaaccaatatatgatgtatgatcatcgtggatttatatcatcatatgctatgtggccaaaggtttggtcgtggtgctccgtggactatcagccccatcgtttggcctaaacagccaaagaataagccaaaatttgaaattttgaatttaattttgaagttgattttgaaatgcttttaacgtaatttttgttaattttggcttttaagtcgctacgaataaatctacaaaagttttacttataaactaattttaattttctaataagccaaataagccattttaggtaaaatggcaaccgatgggatcctatctatctgtgactgtgagtgactcggaatggctttttattggtttcttgtactttggtacaagttccactatctaatactagtagtaatttacctgtgctaacacgaaaacaatatttggtaatgcaatcaataaactaaagacaacgcatgttttggcaattaagcatataattagataaatttaaaattcacacaaatattaaaaaaataaagtaattttattgttaaatttataagatgtgtgcaaaatagcatcgctttttatatctttgaaactatctaattcttggtgcactaagaaattattttataactgcgtgaatattattttccgaatgatgcgcaaaataataactgcaagctactcttatggaaaatgttccatgatgagtcattgctatgtaggtaatggatccacatgccatttaaaggcaaatagtgattttatcccattatatttgaatatgtaaataatcaaaattgcattatcattcagaaataaaataagttaggtaaaaggaaacgtaaaaataaacacaatatccatccatcaaggtgtgactgcaagaccaaccgaagaaaaaaatacattatgtccgggtttagcaatggtgacgatccgacatcggcggcacacgaaggaaatcggtgacgttgagcagtgccgaggaggaggttgccggagcagcttctatcgatgtagggtcggtggccggggttcgccgcagatttggatctggccggcgagtcaggtgcacagccacgagatggcagggtgttggttgcgtcacggttggcgtgatggagctggagcctagagggaggtgagcagcgaggacgacatgatggtgaactggggcgacgaggagagggaggacatgattttggggattggcggtggagagcgacactgtgtgacgtcgaatgtaactcatcagatctgaatcgttgtatgtgtcacaaaatgaataagtaataaaacaagttgttgaactataccgtgggctaactcaggtccatggacaccaaggccctgggtccgccacacgctatgcctcttggcgcccctctgttgatcgcttctcggccacacacgcattaatggcttgatgacgaaattaatttacaggccagttgattgcaagagagattggttttggcttataccatgtactgatttatgggtgatagtcaccctctcggttcattggtcagacggtccaaccgtgaacctagaggctgaagcgcggttcactaatgtacttactccgtcccataaaaaaataatttagtattagatgtgacatatcatagtcctacgaatctggatatatttctgtttagatttattgtattagaatatatcatttcgtttttttaggatggagagagtatatatcaggtactccatacttaacacacatccggatggtacgatggctacaggagttgacttgcaaccgcgcaccttttagttggatatttgaaaaaaaaagaggctgcgagctagtgtggcccaaaaaatgagcctacgaactaacacggccatcatgtggcccattcattcattgacttgacttagagcagatataatagcagactataagccagctataaacatattttaaagagatactcccttcgtactcgtaaagaaagtcgtttaggacaatgtttaagtcaaaccttgggaatataaatcatgaatagctcttaagttgttgagtttgaaaatgtaaaaattatatgaatagatttgccttgaaaaacattttcataaaagtataaatatatcactttttaataaatatctttatagaaataagaagtcaaaattatgttttggagaccgtgtcgctgtccaaaacgacttcctttatgagtatggagggagtactcccttcatctacttttgatagtcatatttccaaatctgaaaattttatttttgataggcatatttcagttcaacaacctatcatcttaatgactttctcggatttaatgcatgattctccattcttccacacaacattggctacattggcttgtttacgaggaatgactagtagcatatttaaatgaatgataagtagaattacttatccttggtctatgtgccaagatgaaatatgactatcaaaagtagatgaagggagtaaaagaagagagagaagagcagcgggccacagatctgtagtcagctatatcatggactccaaaacgtaatgtgtgtattacaggtaggaccatatattaatagtatagtgtcgacgtttgatgtcgcgattccggtatttgcacagtatggggatcgttggtactaggatatacgcgagactgaggtaaaagagacggagacagggatttttatacaggttcgggcccctgaattgtcaggtaataaccctacatcctattgggcgaagccggtattgctcttattcaccataatcacaccagtacaatatttggggtagcccatctaactgctgtcgatatgacggtctgaagttctgactcgtagtcaacaacagggtagttttccttctcgaatccgcatccggcgagatcagagacaacgctatgtctctcctgacggtagccataggtatcgtaggggactagccatgcctatctctgaagtcgatatctggtatcttgtcttggcgtatgttggcttatatgttgatcttgcgtcttgatctattgttccgtgtcccctctcctcctagggggccttgtatttataaccataggtgtccccttgtctaagtagaactagggaaaccaatatggatacaatccgagtagtccttgtcgtttccatgtagaactctagtcatgcttccttatgtggaactcctcctatatccgaaagttgtttccgtataagacatggtatatggtgggtcctgtcgagatttagtcaactactattaggtatgtggtatccacaaccctgacatatagtaagtaactattgtatgaattgactattacattggctatagatgatttggaggtagtagttgactatactattatacttgctcttagtacggtccgaccgaaggcaatttgtgactcatgagacaacgaacccaactgtttacttggtcgaaatagctaataggcgatcagtcgccgcgcgaggagaggggagcgcgggcagcatgcggtttctttttt

SEQ ID NO: 28635 - DNA, 2025 bp, Oryza sativa
gccctccctcgctctacccgcgccgagcccacgcgccgccgctctctggcgaactccagccgcgccgcgccgccgctcccgtccaccccgcactgcgccgtcgccctccccggcaccgcagtcgtcgtgcacaccccgtccaccgctcctcttccccaatccaccaccgcaacgccgcttccacctccaccccgagccaccttcgccattagccgcctccatccgctccccgccggcgagcgccgcctcgcccggccgtgcttttgcctccaacggcttcgccacgtcacaccgtaccccggcatccactccgtcctccccttccacccccgcagcaccattcccaccatgcaagccgaaaccaccgccattcaccgcctccagccgcccgctactgcagccctatgggtcgccgcgccgtgccgtttgtgtcgtcggcatcgctgtgccgagctctacccctgcccctactccatctcccctctccgcctccggaacatcgccgcctcgcgcaccacttttctcgcgccgccgccatctcgcctccctccgtcggccgcctctctccggcgtcgccccgtggtgagcaccccggtttcctcctcctctccctcctagcgccgtgcgctgccgcttccgtgcatgcgtcgccgccccgcgtcgccgccgctcgccgctgatggtcctcaggccggtgcgtcgccgccgcgccgtgtgctcgaccggccggctgccgctgccctgctcgcccgggccgatcggtcccctttgccgcgcctccctcgcgtgcaccgccgctccccgcgccgtcgccgccggtggtcacattgccgcgcgccattgctcggtcgggccggcataagccgtgcccgtgcccagccgcgccaccccatggccgcccgatcggctttgggtcgatccgggccgtcggttcccgtggaccgacggtggaccgcctcggtggtctcggtccacggtggaccggcgcccttgtgccgctgaccggtggggcccgcttgccggcgctgcccctcccccttgatgacgtcagcaaccccgttttcctttggaaaaataattaacaattgcatcataaatcatatttaattctagaaattcatttaaatggctcaaaacttctaaaattcatatctaattcattcgaactccgaatggagccattcaacttgcaaaattcatctaaaattgagctctacatgtttgtttagtttttatgtactatttccttggtttttattagagtttttcctcgttttgcgtgcaagcgtgtagtttccgccgtttcggaagatcgcggtcgtgaggataagagtttggaagatcaaagtgaagaagcaaggcaagtcacacattccccttgagcatgttgatcccaatttactaatgttttaccgtttgcaaataaatatgcatgttttgctaattacatgggatccggttattacctatctgctcgcttgtaccatgtttacttgatatctgtcatttgtcaaccttgggcgataaatcgactagctcatgttacttatgtgacctagctagaactatatgcttagccatgcttaattaccactagctcagttgatgggataattgcagtattagacctttttagtatctgaatgagctgcgtgctcgagacatctggccatgcttcatggtcgtaattatccaactaaaatgcgactgaatggtgggctgtgggtgcatggttttgctagtcgcacccatggcaattaaggaccggttcgcgggaaaccctgcaagaattcctcgtacttaccacaagccagcgtgggctgtgggtgcatggtttacgctttatttacgtttggaactgtatattacttatcgttttgtgtatcctggctggtcctggacagggatttaatacacaaaatagtctggaaatttagggctaaatttctgggcgtgacatatattttgtatacatacatatataaacttttatatacgtcgcatacaaactttgtatatgacgta

SEQ ID NO: 28636 - DNA, 35389 bp, Oryza sativa
catcctagttattgggttagaaatggtctaatcatgagatgtacgatactaaacgtctgttcgcgttccgcgaacgttcacgtattagcctcacccgctgctcgggcggtgctgcgagaccgcatctgtctcgtgccaacagaccgcaaacagcgtctctctcgtgccgatgttgtggcgttgcggggccgtaacaacgtcacccatttcgcaccacgacaccgcccatgtcatgactccgtcacgcgagcaggacggagctagaactagacagagagatgctgctagcttaatttattttacttaatattgagtttaaactgacatagatacttatatttatattgagagggtgcatatatagcgaaaatagataagatatagttataatttttttttcaccgggttactaggaaccccctaattactctacctccaccctgcacgcgagaccgcacacgaattcagcacgtggtcattattttcacgcaacggtcgagcaatatcgtgtcatgcccttccactcagcgacgacggggtgtttagatccacgggtgtaaagttttggcgtgttacatcggatattatataggttattgtatgtgttgttcggtcacttaataaaaaactaattacagaatctatcagtaaactgcaagacgaatttattaagcctaattaatcctcattagtaaatatttactgtagcatcacattgtcaaatcatgaaacaattaggcttaaaagattcgtctcgcaaattagttacaatccgtgcaattagttattttttactctatatttaatactttatacagatatttaaatgttcgatgtgacagggtggggttctaaagaggacagacgacatggaaaaaatgcatcctagatatttctgataaaaaaataaatgaactgtatagtttcaaatagatgcatgcctcaccctatcaccagcgtagcacgtccttgaggccgagtttgcttccaaaatttttcttcaaatttccaattttttcatcgtatcgaaatttttctacacacgtgaactttcaaatttttcgtcacatcgtattaattttaaccaaatttacaatttagcgttaactatgctttcctgttgcacgtaaaagcaaaagcaaaagcaaaaccaaaccacaaggcatcacagcacatcacatcaggagtagccgtgctaggaatagctacagctgctactccaccagtacatcgatcccctccaccagtacatcaatccagcctgcgccctgcggctctgcgctgcgagatggtggtttggtatggtggtgttacgcgcgcgcccttcaaacccaaccaaaactcagcagcttttttttctctcttttttattttgatcttgaaaacaacagcaactaggtgctttcccctgttcgtgcaagcgaggtgaagacgtgaagtccattttatgtgtatggcctgtcccctttcccatcaaactttattctgcgtcctccatttggcggcccaacgcgggagcagctgaagccgtccgatcgaatggctggtccagattaatcctgacctaaataaatacacctaaaacctaaccctaactttagaattcattccccccattgcccccgatctcccccaagcgatggagccccctccccccccccccccaaagcataggggtgggcacatttagaccgaattgaagaaccaaatcgaaaaaaccgaggccgaaaaatttagtttcctgttcggtcccaaccatcgaaagactgaatttatttcggtcaattgggttattgggctcggttaaccgaattaaccgaaaatgaccgaaattttggcccaacagacgaagcccaataagcccagtagttatctaaccctagaagtgataccataggcgcacagcagtcccagtcacgccgcattccccatcctctcggcctctgcctccaccgcgcgtgtcagggttatggataccacatacctaataatagtcgactaaatctcgacagggcccaccacataccatgtcttatatggaaactgacctcggatatgggaggagttccggataaggatagacaaccagagttctacatggaaacgacgaggactactcggattgtatccatattggtttccctagttctatttggacaaggggacatctatgggtataaatacaaggccccctagaaggagaggggacacaatcaacatacacggaacaacagaagccacaacatacaagccaacatacgccaagacaagacgccggatatcaacttcagggataggcatggctagtcccctacggtgcctatagctaccgtcaggagagatatagcgctgtctctgatctcgccggatgcgaattcaaggaggaagactaccctgttatcgactacgagtcagaccttcagaccgccatgtcgacaaaagttagataggctaccccaaatattgtactagtgtgattatgatgaataagagcaacgaccggcttcggccaacaggatgtagggttattacctgataattcaggggcccgaacctgtataaaaatccatgtctccgtctcttttatcttagtctcgtgtatatcctagtatcaacgatccacatactatgcaaataccggaatcgtgacatcaaacgtcgacagcgcggtcgcgccgctgccatccaccgcgcccggcctccacctccaaccctccaccgcgccagagccgcctccgcctctgccctccaccgcgcaagagccgcctcgcctccgttctccaccgcgccggagccgcctccgtcctccaccgcgccggagccacctcgcctccgccctccaccgcaccggagccgcctcgcctccgttctccaccgtgtcggcatccatcgcgccacggccgccgcctccgccttggcgacgacggctacatcctagttggctgttcatgtacttatttactactgcttgatcacaatttgtgaacctagttggctgttgcttcttgcttgatcacaatctgtgaactactaaacttatttactactgcttgtgcttgatatgtgatgtaatgttactcatcaacccggaacttcagttctgagacctgtgctatttattcttgtatattatcttgtatttttgtgatatatatatgtgaaaaaatgtctcaaaagaggggaagtgctgtcaaaatttttcatttcaaacttactactaaaaatttcggtcagatcgagactgagacccaaaagaccgagaccgaatttaccggtcctgagtttttttggatgaaattcggccctgagttttcgaagactgaaatacccgaaagacagaagaccgagaccgaatttttcgatctgaccgaacgcccacccctacccgagcggctgcggcagcgcggagcagcgaccgacaagcgatgcccctgatcctctctctcaaggcgacgacggtggcggcgtggagcagcggccggcctcctctccctcgccatggggccccgggagagctcgactgtggcagcggcagcgcccttccctcagctggatccagcgggaggggaggcggcggcggcggcctcccctccaccggatccagcgggaggggagccggcggcggcggttcggtggtgacctccccttcggtctattttttagatatatttgtgtgtatatgctttctccgattttatttgtgtgattgaattccgatttggattttttttttgggggggggggaggggtgattgaattccgaatgggattttaggggcggagggaggggggcgacagacgaaaaattggcgtactgacgaggtgacgaacggaaaaatatggatcttttaattagttaagatatgtaacgaatcatgacttggatatgacgtttgcttgtatattacggaacggcctaaagtctaggtttgataatgttgtaaagtagatttaggaaaccgataccatattggttaaggtttctatcttgtaataatgccccacatcctatataaggtgggcactgggctggaagccttctaaggaatgattcacaaacagatcgtcagatcaatactacacccggcggattcgaatcctcaaacaggagtggggtattttctctcattgagagggcctggacctgtctaaatccttgtctctacatccatctacttttaggtctcatgcactatccctttatattgtcgaaattttgtttggacacatatttttgcctctcttttcttgttcgatcgctcacttccatttcggggagccattactgcacggccaaacagtttccttttccgtgaaacgaagcctcccgaggagatggatcgatgtcgttcgctactaatccgaactatacgcgaatcccatcacagatgccgcatatcccgtccaaattatctatatgcggtcctacttcataatcgcatcgcggttttctttttatcatttgttatttttaccaaaggaccacagcagggtttttatttttaaataatgacctcagcagggtttttttttttgttgtttaagtaaaaaccgctcctctcagatttacaaaaaaccaacaaaagggacaaagcttgacaactttcgatcaaaaccgtatagaaaccaactaatataataccgatcggcttccacaaacagagaatcaccagtttcacgaaaaccgttgaatcctggacctcagtccgtttcttagtccactccctcttcgtctcattactaggctgatccaacagggtcggtgctgtggccgctaccccgatttggcgcagctaccgtcgcccgtcatgggtaagcgtcgtcgaatcgcgcctccgtccactagctccccctatctgcctctagccctctaccaagaaacaccatcgttgtaaccttcgccaagccaccgtgtgtgcgggtcatggggtgggttgggagggaaagatggagagagagaggaagaagtacatagattgacatgtggaacccactagctattagattggagagggtaataaagagaatgttagagtgaaagacaaatttgactctaatattttgtaagctagccaaatagagatttaaaaagttaaatttagagagaccgttaaagatgctattatacactcgggcaacagctgcatcatatcattgccttgatctcctctaggaggaaacaccacatggctttgtctggtgctctcttcacattaggcatgaccgagctagctacacgcaaatactcccttcatttcatacttattataagtcgctttaattttttacataatcttttaattgtttgatcaaacttaaaaaaaaactagcaacatctaaaataccaaattagttctattaaatttaacactgagtatatattttgataatgggtttattttatgttgaaaatgttattgtattattcaataaatttggttaaacttaaagaaaatcaaaacaatttgcaatatgaaacgaagggggtagtatatgcgcatatatcatacatgaaccatattgacaagtgaggatactcgcaaaaatacagacatttattttttaaagccccaggctcagtatggtttttgatgaaattgatggacgacggaatttctagatatagtagtctgttagtatttgttaattgttactacaaagattagggttgaactctgtgtgtgtgtgtgtgttttgtttgaaggagagaattaggatagactagatcaaatctacccgttggagttgaactctaagggggagagagagaagcagcatgaagaggggagagggtagggccgggtaacacagtactatgcatgcagcttcttcttcctccctcacttctttctccactgcagtagttcttgggtttgtgagactcccacagagagcatgattcactccggcggccgccgccgccgccaccgccgcggcagcaaagggccgtacgagcgcggcggcgacggggaggtggacggaagcccacgcgaagccaagggctgcatggacgcagcggcgacggacgcacaggcaggctccactttgggcagcggctgctgtgctgctatggctcacgcatggatggaggagtttcccggggacaaggtaactcttcttgtacacgtcatccgtggtgtttcttggttctgtcttgtgtgtctccttagatctacttagggctccctcacaaaatagacctattttctttctttcttgttcaaatatacctcctccccgcctgccttcggatgcgaccgagaatgaaatctgttgttcccaagtgtgatgcaaacatgctgctgctaattttttttaatgcattgggttttgtcttattaacatgattttgggtaaagatggtacggcgcttcgtcttactaagatcaatctcatgttcgttctgctatatgctattgtttatgctcttttgttgattcttttgtttgggttgtcttggtaacgcaggaggaggtgaaagatgtcttgcttgctcaagtcttcggtaaaaaaagaaccctctaattttcaagttaggcgtaaatttgtctacttttccaactcacggtttagttataaagtatgacataatttctttcttttttgcagctaagcataaacccattgaaagagactgacatgattttgcttgagaggggattctgccactgtgagaaggtttgaaccacatcttctatgatttagttacgggcattctattttgtatatgctctttaacttctcgaggttttcaagtatagcttcccatgctaatttaatactttgtctcggggatgttttgttggaatcagacattatttcttatgcctgcacaattgatgactgatgtatcctgcacacacctcttagttaagcaatgtgtatgtacataattaacatgtaatgccgtatcttcctctatttcaaatttgttatagagatttattttttctctttttagggggaagaactaccaaaaaaaaatcaacaggaaccaccaccgcatcaacttttacagcagaagaaccatcagcaatgtcagcaacaagctgctcacactccaaagtcgatggtgcagaagcctgaggtacgttgctactttaacaccgtgaaatggatcgtatctggtttgcgtccaatcgggtgttgcgagtagcgacactttgaacgggacgtgcatctcttcttcttcttctgtaggctgtagctagtaactcgtgatggcgatctaatcctttccccatttcgttcgcccagctgttgcttctgggatcaccatggcatgtcatgtatggtgctggttttcttctttgttttaaggagagaatttgcatagactgatcaagtctactgtgagggacccacgtttcacattttttataaacttgattaaatttaaaaatgtttggctaaggaaaaagtataaactacttataacatgaaacggggaaatattgtttatgctcttttgctgatttcttccttttggttgtcttgactgcagtggaacacgcatgaggaggtgaaggaggtccatttgaaacagaatgtccctgaaccatcttcttacctgcataagtcctcggtaaaaaagaccccctctaattcacaagtcagccataaatttgtctactttcctttaggttgtcctgaatgtagtagaacacgcaggaggaggtgaaggaagtccatgtgaaggagaatgtccctgcaccatcttcttacttgctcaagtcctcggtaaaaaaagatcccactaattctcaagtcaaccataaatttgtctactttttaggcccggtttagttacaaagtagtatgacctattttttttatttctacatcgaaccataagtatcttggattttcaatttttaacctagagagaaatgttaaatctaatccgaatacatgattataatctgtaaacatcttaaagtaatgtgtgcgccacttcttttaatgcactgttgctcttcatcttaagtaatgtgcacgtacataattatcttcatcttaagtaatgtgcacgtacataattatcttggattttcaatttttaacctaaagggaaatgttgaaactaatttatgtacatgataataatatgtagacaacttagagtaatgtgtgcgccacttttaatactgcacatcaacttactaacaagatttattcaatctcgcattcaaataaatcttgcattcattgtttgttgtgatatgctgttatttatgctcttttgccgttatttctctgcaggggttaaaatcattatttgtgaaggcttctggtgttagtgtatccatacaagtagatgtatctaacacaaaagttgattatctgatcaattctgcctgtgaaaagttaggtgtcaaagctcaggatacctatgcagtgttgtgcggtaaagttttagactatgataaatcattgtcggagtacctattgtatcaaaactcaaccgttgaaatccgctatcgaggaagagctggacagtgagtattatctatttaaaattgttaatttttttatttgtacatgtctataacattgtaacattgtgttttgctgtaggctaaattgggatcaaaaattcaatgttaatgatacagttctgtattatgatgttaacttagatccagctcttcaaaatgctggaatccaggcattccaatatgcacggtttttctcggatttttcctcatacaatatattcagaaggtgttgatgcatgttactgaacaacatccgtgcagggtggagttatgatgggggttttaatagccagaacattatctttcatgatggcgcagttagtatagaaaatgtccctgtagtggcatttgataaagatccatgtgctcgggattatactagtctctacaatatattctctacaaggtttggaccagtgtatccagtacatttcgatcatctccttgaattcctaagaacatgtccttgtggggtgaactccagaaacgatgcaatagttgcgtttgtcacaaatcatcctagtattgaaacatatgttgataggatgaaacaattgatgattttagacaatgtggtacatagacaccctgcacatcttcaggctaatataaaagctatggcagcatatgcttcacacgctagtttaagagctagtatgggaccatatgcatatgcttggaaaggttctgcgcagcttgttcctgaactcaataatgttcttatctatcaaccatccgggaaaccattacaatggaaaaatcccttatatactgataatgcaaaaggttgtcttcattttgccaataattttttgaagcatgcaagaaacagggttagtataatacttactccattattttttcactagtgaaaacatatttatgtctaacactgttttttcactaaacagttcccagaagaacaaattgaggcagcatttgctctacacatgaaaaatttcctgccaaagatattacagggactagctgaacttgctgatcgcaccccaaacagacaatacatcaatgacatgtaagtggatctcaaatcttgacaaaatctttctcaacctaaaatatttctcaatcaagtttaaaagatgaaatgagattatttttgtaggctttcaaacccactggcggatataagcacgggaaattagattcggagatgcatgtaagacaaattgatcaaaaattgacttaatattttattcttcatactatcattgcattcttatgtttagtatgtaggaagcaacaatctggagatattttaattggaaagctgtgaaggaatgtcattgtatcggaatgtcattgtatcttgctcaggcctcatggaggcatgtatcttctctgtttctttggaccggtgttgattgtgttgcagcatggtgggatggcgtcatgctggaatgcaaagataaacaaccatgttagaagctatttaatttagctagttattgtattgtatgaacatcactacattcgctcttaatttagtagtactagtaacttgttgtgctgaggagtactactactaccactactactacatgtgtgtatgcctgtctgtttggattggtttggtttctgtttggattagtagccgcttgctcagctcaaccgaaccagagatgagaggccctgccggagcgcgggcgatctgcttgcatgcatctacgcgtgcagtacagcgaaagtcggaccgagaaaacgtacctcgcgagtcaggcccgcttctcgctgtcgaccacgtctctcgacatggcgcccgagtcgtcctgagctcggccggccatctgcggtgacgaagccaccagatccggcgcctcccggccgattcgtcgcaatcgcctccctcgctggatatgccggccgcaaagctcgcagccgccggatgcccgtccgctccgaggccagcgtcttcctcggcggcctccgttagctcctcccgctccgaggccagcgtcttcctcggcggcctccgttagctcctcctcctgctcttagccggccgctaccggcgacaaacacaagaagctgctccccctccattttgcctttccttttctttttcttctatttttttccatcggccttgcgctatttatagaacgtactatgacgtcactgtcaaacggtggtgacaacatcattttcaataatattctaaaagagaacaatgccaccctcacttctttcatggagtactacaaaatcattcctatgcatattgttcattgttgttatatgtatgtactttcatctcaagtttatcagatatccggacggataagtttagtttcacgggtaaattttttttcctatcatatcgaacgtttgaatataagtacgaagtattaaatattgaaaaagaaaactaattgcacagtttgcatgtaaattacaagacgaatcttttaagcctaattgcatcatgatttgacaatgtggtgctacagtaaacatttgctaatgacagattaattgggcttaataaattcgtctcgcagtttacatgtggattatgtaatttgttttgttattagtctatgtttaatacttcaaatgtgtccatatatccgatgtgacccgatattttttttacggtggaaccaaacacagccttattctaaaagacctcacaattattttggggactaactatctaacatgttatagaaaatcccctaaatagtataagtatagtgtactccctccgttccaagatatttggatagatgtggttgataatatgaagcatcacattcgtccaaaatctcttactatattctaagacggatggagtatttacagtgcaactagcatataattacagctgtaattaggatgtaattatagtacatctagagtgtataggtcacatttgacttaaaatcttggtgtagctttagtggtagagatgtgtgctagtatgccacagttggtgggatcgactagtcatcgcgtgtatgatttttatttgttttattatgtatattacacgagtctttgtgcatatcggacggtcaacactaatctcaaagaacatccaactgccaaaatagtgcaagacatagccatcaattttctatcattagactagtagtatgtgtgtaattcatacttcaccctagcaaagcatgaatatttgtgtattcatggttagcaagagtaattaaacagcatccccatatactagcccacatgcaagtaaccaaacgccaccctgatatattgtttaacatctccaacctcactcaatatcacccactgcccactggccactatagctaggctagtatttggtttgcttcaatgctaaattttaacattagaaaaacctaggcaagttttgacgttgtcaatttctttcacaatttatatgtgctgttggcatatttggtagcaaattaaatactagtattaaagtaccaacgatttgatagcgcatattttagctccggaacaaaatgcctccctcagctctttttttttctttttttcctttggtatagatttgtgctccaagataccctaaccctagaccagtccaaaaataaataaataaaaagaatggtgcccagaatctcggttccagtgacttcacttcgaacaactgtgcaattaaatatgttctctatttctagcattaatataatatataagtttccctttaaaggctgtgtgtagttcagcgcaaagtttggattttggttaaaattggagatgatgtgactaaaaagttgtgtgtgtatgacatattaatgtgatggaaaaggactgaaatttggatccaaactttggatctaaacacagccttaataaaaatcatctgctaggtttcgtcctttaaatttatttaaatttcactcattttgagtatgagattctaataattggctgtaactttttgagcaaaagtcggaatgctctgttccattatctaaaaaaaaatgtgtattaaagcgactgcaatagaatgatataaatggattatacgagttgtcacattgtacctgtgcttatgtagtgggaagaatgagaggagagaagaaaaaaaggggttattacatatttatagccagttatagcactggaatggactccgataaataaattatgttagagggacaagttagttaaatattaaattgtgtaatggtatatatctacaactaattttaatttttgaagctaatgcttaacttgtactataagctttgctgtccgatccgggggttagactcgtgtcaatctgccgcctcaggccaccctgcacgcaaatctcgttcgtccacccctgtgggttcgtcacagtctggagcaacgcgcggctgcatgccaaagggcaaaggcgccagctcgtcaacccaaccctatcgacacccggtgaccggtgttggtggagcccatgaccatgggggaggtggagctatgctttgacgcgtcgtgtcgtgcgggtagatagatgccacgcggcgatagatggcgcatgatgatcactagtggagtagtcatggatgcggctgtgtcgtgcggtgcgggtgggccacgcggcgatggcacatgagcaggaagcggttgagagttgagacaaataatgtcatggaggcgtgcggctgtgtactgtacctccgcgcgcttgaccgacgatgtcagtgactgacgcggaagaattaatccaagggcaaagtatatactccatggagttgaaggagcaaatgagcgtggaatatgatttgttcttaagcttggattaacgagcatcgtatttacgcggctcatatactccctccgttttttactttgactttttttctatagtaaattccttttatgtttgatcaaatttgtaatagtaaaatataataacattttcaacataaaaaatatattatatttaatcaaattaatttaatattttagatattcataataaaaaattgactaggaaaaaagtcaaagcgactatagttgaaacggagaaaatatttatctttaatatggtcaaatatactataatagatctcttcacccggtagtcaataaaataattaactatttaaaaaaatgggattaacaaagtcttgaataaatgtgatttagaaattatgttttttacaaacatattctgcatcttaaaaagtttccaaatatgtcgtgttcaaaagacacaactttattaaggctgtatccttccccagttttctcaactcacatctctcattttccacacgcacgctttttaaactgataaatgttgcgaaagttattttaaaaaatcatactaatcattttttaataaaaatagttaatacttaattaatcatgtaataataaataattaatcatgtaataataaatgcttcgtttggcagcctgaaagtgaattcatggtgtgttcgacaagagagtaaagcagtggtggattgagaatatatgcaaaagccattggtacataattaattgtattaattattttaaacttgaaaatatatttgtatgattttaaaagtaatttttctatctatatatttttttgggataataactagtttagtccctaaagtttctctataggatcagtttagtccctaacattttaaatggtccaaagaaatacttaaactttgtcataaggtgtagaatagttcttgggtccactaaaatcattatatggatatgccatgtcatcattcatgcaaaatctatgatgaattgtccaatatacccttacgtatatcatagaaaaataaatataagggtgaattggacataaccataggaaaaaaatacttatcctttttttcacccttttgaggtatatttttgctcttacattttaccttttgttttttattttcctatgatatatgtaaggttaaattggacaaatcatagattttgcataggaatgtaacatggcatatccatgtggcgattttggtgggaccaaggactatatcaacccacatgacaaaattaaaggacttgtttggacaatatgaaaaattaaggactaaaatgagccatgagcgaaactttaggaatcatattagctattctccctatttttttaaagaaaaccgtttatcagtttaaaaacatgcaagcgaaaaattaagaaatttttctttgccatgccgcttgtctaaacacagcctttcgtatacagcatatagataacccacacagcacatcgtccattgagctatttcaaacagattaatccaattagcgattttgttctataggtgctattaaattgtctatttgatcatcttttttaattaacagttagtaatttaatattcctattctctatttctttcattctatacaatagtgatattcttacgatgactcagcactctaaaatgacactcatgattaattaacaatgaagcatgtgaaatgaaccaaattactactactacggatagtataacttgttgttagtagtacgtggatgaaacatgagccacgggttttttttaagaactcatgagcgagctgttgtttttgcctattgtacatcactacattggtcttgtttgtaatattgctatttaggagtattaaacgtatattattaacaaaatctattttataacctctaggctattttacgagacaaatctaatgttgtatattaatccatgattaacagatgattattgtagcatcactgtaacaaatcatggattaatatacctcgttagattcgtcttataaaataaattaggggttataaaatctatggctgtgtttagatccaaagtttggatccaaacttcagtcattttccatcacatcaacctgtcatatacacataacttttcagtcacatcatctctaattttaaccaaaatttaaactttgcgctggactaaatacaacctatgtttaatatttttaattagtactaagggcagttttgaattgctaccaaaatttgccataccaatattttggtagcataaatagtatccaccatttgtttggattggtgccaacattttagtaatgcccatctcaaatttggtagcaatctagaactttcttcactatgatatcacaatttggctagattttggtagcaaaccaaataagatgaatacaaatttattctaccaaataattggtagtgccaaaacttgcctatgttttggcactaccaaaaaattggtagggcacctatccaaacaagccctaagatttcgaagggctataataacatgaggatccaaacagggccattgatttggctctcctaccgcctcgggatgattttgtttggcagggtccgagtggacgtgtcgtaattcgtactactacgatcgtagcctctccatctccagtgtccagtcccatcccatttccagtccaagccgcttccaccgactccagtaataataatactactcgtactagctctaaataaagatgtcagaattgggcatcgtcttggaatcgtcttggaatttggaagatgtggtggatgtcacaatgaataagcgaggtccggcgacacgcaaccacccttggggatttaaggcgatagccagtaggccaccatagagtagaggcggtgcatatcacgggagttgaggagtgtgtccgagtagtactacacaaggagatggtaaggcctcgttgacaaaaacttttaggtgtgtttagttagggctttgcaaaagtagatagaaaggtggacctatgcaagatggtaatagtagattgaagatgcaccacaatgtatatatgtgtagagtgggtaataaggtgggacccatctgaaaaaaaccctaaacatgagccatgccacaattaaaaaataggtaggatccaccacaaagtgctataacctggtagtaagcttatgacttggcagtagctatttactactttcacaatgtatcttacctagtagtaacaatattttaatccctaatacccacttctccactacattgtggatgcccttacacgttaaaattagaagtttgaagaaattaaaatgatgtgataaaaaagttaaaagttaatgtgtggcctggtttagttcctaactttttctttaaactttcaacttttctatcacatcaaaactttcctacacaggtctgctttagtttccaactttttcttcaaactttcaacttttccatcacataacttttctacacatacaaacttcctatgtgttatcacatcaaaattgaaagtttggttaaaattagaatgatgtgatggaaaagttggaaatttgtgtgtaggaaagttttgatgtgatggaaaagttggaagtttgaagaaaaagtttagaactaaactcggccttccaacttttctgtcagatcgttctaattttactcaaactttcaactttggcatgaactaaacacacccacacacaaacttccaacttttctgtcacatcgttccaatttcaatcaaactttcaattttagcgtgaactaaacacaccatgtatagaaaagttcgatgtgacgaaaaagttggaagtttgaagaaaaaagttgaaatctaaacatggcatttgttctgcgtgtcacatcgaatatacggatatatatttgaagtattaaacatagtctaataataaaacaaattacagattccatcgtaaaaccacgagacgaatttattaaacctaattaatccgtcattagcaaatatttactgtagcaccatattatcaaatcatggtgtaattagggttaaaatattcgtctcgcaatttatgtaattaattttttttctacatttaatactcatacatgtgttatttcgggaactaaacaggtactaactcctgcatcgtcttgcatatctaaactatagattcaaccacaatactactcgtactcctttaatgtcaaaatcataaatcttcctatttccctccgattctataataattattgacgttttgacaaggttgtaattaaacttttataactttaaccgtcaatactaattttaaaaatatttagtttaaagaaattagaacaatgtatacagaggctgtattcggaacacagggttccaacccaatctgtccgcacggaaaacggagcggtccattagcgtattattaattaagtatttgctattttttcaaaaatagatcaatatgattttttaaagcaactttcatatagaaactttttgaaaaaaaaacacaccgtttagcagcttgaaaagcgtacgtgcaaaaaagagagaaaaacgtgcgcgcggaaaagagagatgtaagttgggaaagtggaggaatgaactcagctagatttgtctttcaaaacactataataacaataaacatatatttatttattgtattatactaaaaaataaggtcaaacatatatttgttcaaaacgtcaataaaaatgaaaccggaggagggagtaccttatattttcatcccgaaatcacaagacatttaattcacactaaggcccggtttagttccctaaatttttttcccaaaaacatcacatcgaatctttagacacatgtatggagcattaaatatagataaaaataaaaaataattgcacagttaagggaaaattgcgagatgaatcttttgagtctaattagtccatgattagccataagtactatagtaacccacatgtgctaatgacggattaattaggctcaaaatgttcgtctcgcggtttataggcgagttatgaaattagtttttctttttcattggtttccaaaaacccctttcgacatccggtcaaacatccgatatgaccccaaaaattttcttttcacgaactaaacaaggcctaagctgagttttgcgtgcacgcttttaaactaataaacaatatattttttaaaaaaattctatacaaaagttgcttaaatatcatatttaattcatttttaaattatttttaggtaattcttaattaattatgcattaataaactaccaggtttcccatgcggggaggcagagttccaaactccagctcccaactccctctttttttcatgggataagtccatttgacacccttaaactcttcgtttggtttaaaacgcaccctcaaactttgaaaccggatatgtaacaccgtctaactttcaataccgtttaggccccgtttgacacacctctagctcccaactccaacttacctggagccggaactgggccaaacgttccagatcctccattttttagagtggagttaacagagctactcctaaaaaatgaactagggggtggagcaatgctgctccagaactccactctatcccaaaagacccactaccatttaactttttagactatatacacaaaaataccactcaactacccctccacacctcctctcctcccgttctctctcctcctcccatcttcctctcgatctacgggcagcggtggcagacaacggcagaagtgtctacagcggtaggcagcgtcggcgggaagcagcgggcaacagcagtggcggcggcagcaggcgggacaacgacgggcggcacatgtggagacgacgcgcgaccggcggcatgcctggggatggcgaatggccggtgactgggtttcttttttttcagatctagagctgaaaactaggcaaacattttcaacaagtctccaactccaacaggagctagctcttactggcgctagcgatgaccttgagcttcctctcccacatcacacccctgagcaccgacgaggttgatctttctctccctcatgcctccctgttgatgaaaaatttgcgctcggtcgatggtgccggatttgtgttggcacgaactaagtcgacgaacagaacgtccagggagatctgcttagctccagtgtaggtccaaaatattgatgagatacggacatgctagtcagtttgtcttgcaatttacaagatatataaattgaagatcaaagaaaaaaaaatccagcctcgcaaaaaaaaattgaagatcaaagagccgatcggctgacaagtcgatggggggtaattccaaccgatgctgatattagccgatgtcgatagggttttgagcaatcggctatatgtccaatgtagataatgatataaatacaatcggttggtgataatgtaataagagtagaaaccaatcgactaataatgatatgatagaataaacactaatccgatggttaaaacatacatcggctggaggtttattgtcataaaatccaaatgattagataatcagtgaaacctttgttgcaatcggctaaatccaacttaattgtaatccttataagccgatgcaacgttcagataattcattggctgaatgtaacagccctaaaatttgacaactttttaaaaccgatttagtttgctttgattctctaaaaatataaccgtcgaattagacatttatttaaaatattattttccatacttatttttgatgtttcttttctcgtttaattttgtcgcaaagtgcatatcatccttcaaataattcctttgaatccaaatttaattctatcccgaatgtcgaattctatatattttaatcttccccatattttccttttccctatttccaccttaattttctttttccattttttttcctttctctttccctatttctctgtttttcttccgctctctgtttttccttttctttcttcctctactcggctaggccgagccagctcgtgctgcctcgcgccaaacccgtgccgccttgagcccagctcatgccggcccgcgcatgccacacgctcgcaagcgcgcacacgaggacgaacgacgaacgaatgcccggacgacacctccagcttcctgcctccataattccgtcgttcctcaactagaaggctcaagaccggaggcaaaagaagcgcaatttcaacctctttcacctcctcaaatccgcaccaacccccgctgactcaatcatcatcaccggaggaaaaatccccgaaaccctaattttgcgccattcacagagcttcaaaattcgtcgcatacgttgcaaatcttctgaaattgaaggtaaaaacggatttgacgtgccgagtactcccattcccttctgttttcccatccaatccgacgccggagtgccgccgtttccgcctcccggcgtcgccgctctgttcggccgcctccagccgcacggcgcgccgccgctcccggcctccccaggctgagccgccgctaccaccacgctccccttgctccactgatgctcaccatatccgccgccctcacctgagttcgccggaaccaccgtcgccatggccgccgccgtctccagctcctggccgccgtcgccagcctcgccaccggcgcttctctcgccgcagaccacaaaaacggaatcggctcgacttatagatcgcaaaaccggcgccccctttcccaaaaccggccatcttcaccgctggcgccagggagttgccgaccggctcccgtgcacagaacgagatgaataggaaatctgattttcctgttgaaaaataaataagaaaaaacatttttattttcctatcaagttgaccatccgtttgagctcgaaatcaaaatccgagacctattccaaactcctagaattattccgaatccaaccgtatcagtttcgttgcaatccgatcacccgttgtcgcgaccctaattttagccctagggtacgccgttcaccgaaattccaaaaatccctaaaattatttctttaaatccttttcacccattgttgcagtttgtgatactattttcttttggttatctttgcttttctgttatttattatggtgatgattgttgcgtaaatagaaagcactgacgttggtccggtagtcggagcaagtgaaatctccgcgccaggaggagacggtttgtacgactacatcgagcccgaaggttgcaagacatgcaccctcccttgaacaatttaatcccagtagttagagagttattttggtagcgtactcgtcctttggagtacgatagactgcacgaattcttttaaattaattatattactattattgcattatattttctgttgttgttataaacaccttaatgagccttagagtataacaaacttaggataaaatttgagaaacacctaaacaaatggttaattatttaacatgctattgatttaatatggatattattactgcatatgaaaacatgcttatggaactatttatggctatatgctgagaattgttggcaccgcatgtgagcgggtggtacacataatagagttcatgtgtttggttttatggacctgtttatggtcgtgttgaatatatggatatatttatggctatttcttatttaaaattgatataataatcaacccccttatgtcaataagaatgacatagtttcgccatccacacgatcgagttatcgaacctggccgtatattgctctaattgattaaacttctgcatgcctttcggtgtactggccattagctttcaagtgtgtgaagcaaagtgacatggttcatgtttatatgatttatatatgtgggctcgatgggccccgagagttcagaactgccctattggcccatgaagttctgggctgcccatcgagtaacgaacaatggtaagtggatgtggaggtaggttggcacacacctcggactggatcactccgagcaacatctcgagcatcctttaacttactaggcagaagggagagatatatggagcaatattacaccttgttacttttcagcctggccagctatgggtatcgtgtaggtaaagctgggcagacgctacagagtcgttgagtattcgaaaacgccgtgctcccgattagtggagatgtgtctatgggtgattccagattatgggcacaagttaaactaaatggctattaattaatatggttaacttatttattacttgatggtctattcaagttatttataagtaacatttatatttttatgctcattattactgtttaaattaaatgttcaatagtgatgtttatatcaaatgtttattaagataggctctatgaaataactgttaaggttagggtttaaaccttccagctcttaatattgcatgttttatattgcaattattgtatttgttatcataagcatgtcttgctgagtaccttttgtactcataaatgggttcagatcataaggaggaggatgcttgtgaagatcatgttgatccgttagagtgggacagctatggtttctaggtcattctacgctcaggcagttcctgtggtggagtctagcagtttatctgtttgtagaaataaggctttgtaggccatatatgtaatggtttgtatttgtgttctgttgtgaactaagtgacttaagtattgtataattgaagtttatgcttttatatcatttcatgcataactgaacatcctgggcagttacgtattcgtagggcaccatgactttatcaggtgtccccacactgaaaccccgataaaacccttattggcaataaaaagcacgctagagattatgattctaagcattactagaaaaagtaacaatttcggcatttatatattacttagattgatgactccatcttttcaattatacttatgcttgttcgtatcgcttattactaaaaaaaatatgggtaaaactttttgtgcatgtccttaacaattgaaaaacaaatgttgcaaaataaactatgataaaaaatacaaaatttggcttatatgcataagcaaaacgataaagatgttagggagagtggagaaggagagattgtattggaattgtcgagtgaaatgaaaaaaaaaatctactacaaacaaacttacgagtgtattccaatgaaattttacaattcaaaatctatatctatatctatgcctaattaaaaaataagtaagacttccgaaacgtttttgtccgtcgttgtttttatatgtgtggtacgcgatttttcatttggccaagcagactctactacacgagatcgccatccgtatcctgtgcaaattccaatatatcccaatagaaacacataaattgaactttcagttgaattgaataaagatcaaagaaccatacgcatagatgggaatgccaacaaaattattttcaagtattttcttgcattcgctagcatttgatcctaacaattcaaatagaaaataggaaaaaaatcaggcaaccatttggaaactcaaagttgacgacaacaaagatgaggacgacggctcgtcctcccatctgcctccgcctcaacccaattcgcttttttttggcgagggggggggggggggggggcatgttgttctccccgatatcggtgctcatagaatcaactagccgcgcggaagcttcgctcgtggtgttgctcacgaagtcgaggggagaggaagaggaataatgtagggtcagggattcagcatggctatgtttatctaaatcacgacagaccatcaccgtttgatcgaatacggcgactctcagcgcacctacgccgacttgagccgtagcctaccacgtaggtctgtgcacttaacagtcgcggtgtgaaaaagatatatggcagggtcgtgcttctaattgtgggcttatttatgttttgcttattccccattgatttagatatttttttcaccaacaaaattagtgtaattagcacgatttgagccattaaaaattgctgaaatttgatatagtttttccttcttcatattaaattattcctacctaaatggagtcaacaaatagtataattatatatttgccacggtatagagttatttcttgaccatagttgtttgtaatttcatgtcattatttttatgactatattgaattatcatttatgtccagcagtatcccagctaatttccgtgaaactcaggaaccatgttggttttacctttttttttttaagaataattagagtacgtgtttgattttagaaatgatatcacatgttttccatgcgagagttgagagagagagagagagttatcagaatttgagtatatccatatgcaatagtgtttttttatccgttctatgagtatatcaatcatgcgctaatatctttctttctttgtgcgtgttaattttatcttcatcttcattaaaaaaacaccaacttactagttcatgtggggtattagaggtagggcccataactagagaaaattaatgcagtatataaaacatccataggaatctcaccaaagatatagcttgcaagtaagagcatcttcaacggagttgccaaaccactctccaagacaaaatttagcaaatgtggaagaaaaatgccctccaacagcctctccaaccggctctccaagctatccaactgggccaaatacacctctccatggccaaatctggccagcctcgtcgacgtcgccaccaccaccttcctcttctacgccgacctttgtcacgacgctgcactggcaccggcacggtcctgcgttgcatcccctgcacggcaccggcacgttcctcgctggcactgcttcctccgtgacggcccccatcattttccctccctcgcctccggctctcctgataccgctgtcaccctagctcctcccgaagggggaggaccgccggcgcccccgtcgtcgaggtcaccgtcgccatccgccgctgcctaggcatctttcccatccccctctctatcctgcatctctgccattgcggcctccccatccgccgccatcgctgccgccagtgacaaccaccaccatccactgccacccctgagaccaccttttaccttttctactttttatttatcatccggcggaacttggcacctgacgcggggatgcatcggttttcgatctctggcgaagggataagtccaatgttccgccggcccagacaattgtattggatacattggcgtcgttcaaggctgcatcagtgtattcaacctcttgggttgctccggtttggttaatatatttgcctgcctatttatcatatgtcttagtaatctagttttagtatctcaatttagctctatcggctgtctctagctttatggtttctgccggtatcggctaaattgttttattagattagattagctaaggcatctatcaccctaaaaattagtcaagagcttgattgtctagatattatgtttcttttcatacttagtgctgcatcagttaagtttgatctactaagtcgtgcttagaaccataatctctagcctgatagttgattgccaataaggttttcatcggggtttcagccgatgagttatctaaacgttgcatcggcttacaaggattacatattagttggatttagccaatgataacaaaggtttcactgtttaatctaatcttgtggattttatgacatcggacctccagccgacgtatgatttaacctttcggatcagtgcatattctatcatctcattattagccgattggtttctactggattacatttaggggtgggcatttggtctaaccgaaaatttcggtctcggtcttcggtctttcggtcttttcggtctttgaaaagtgaagaccgaatttcagcgcaaaaatgttaggaccgacaaattcggtctcggtcttttcggtctcggtctcggtcctgaccgaaattcaacaacattttcatatatgcaaagaaataatggaaattttcaacacaaaaatcacaaaaaaatttcataagcacttatgagtaaagactcttgttaggttgcatgcctagaagaagtagagatgtgaaaattagagtttaatcctattaaacatagtggattgtaggttgcatttagacgttttttgataattcggtcttttcggtctattcggttaaccgaggagactaaccgaattgaccgaataaaattcggtctttcactacctaggaccgaattgatgaccgaatttctcggtctcggtcttttcggtctctgtctcggtcttttcggttcggtctttttctgcccacccctatttacattgttatttattattatcagccaattgtctttatttactcaagtatcaagatctacattggatatatagccgatagctcaaaaccctatcgctatcggatggtatctgctatttgtatatcttgtcagttgcagggtcaaactgactggcacgtccgcatcccaccaagatttggacctgcaagctaagaagatctcctaggccgttgctgttgtcgacctagtccgcgccaacacaattccggcaccatcggccgagcgcggatttctcatcaacacgggtgtagggatcatcgcagttgaagcacaaccccttccgccgtcgctcatccatctccggcggcgtcagacggcaaaccgtgcggctggccacctgagcggacgattggcccactgaagatgtcgtatctgagaggcaaagaggtaggcgcagccgatgatgatgccagcacccaagcgtccctgcacggcatggcgcagcacgcatggcgaactcacggcgttcataggaacgcgctaaactcatggcgacctccaaggtggttgggtattgaagctgcatgtcgatgcttaacggttcttggagaccggtggtgaagagatccatttgctagtcctcaatgaggggaccggcgcgagcgagcaggtcgaggaagcggtcgatgtagacagccaccatagtcatacgccggcaggcggcgagctcgcccagggcgcctagcgcaggggcgatccgaaatgcaaattaagaaggtcggagaagcgacgccaggttggggtacccaggtcacgttcgacgcacatgtaccattggcgtgccgcgtcgagcagatggtaagacgcgagccaaaccttctcctcttccggcgtacggaaatggagcgggtcgccctaatcgtcgaacttggggaaatcaatcttgtggtagcgcggtggccgatcaccgtggcgaccgtcgctgtcgcggtccccatcagcatcacggtcgccagggtgctgatgacgttcgcggccagcccgttccaggcgctggatcgcaatgtgatgcgcttcctgctggttgtccaggtcagaaagtttcccccggatggagtcaaggtgatcaaggaccttagcgagaccctttttccagttttcgccgacgttggtgacggttgtcatggcgcggcggcggtgttggtgagcaggatcgtggaagtctgataccaagatgttaggaactgggccgaaacggcgtagggcgtagccgtgctcgacaggacggcgaggctgcacacctcgtcgccttggatccgtggtggaaacaacgagaatttagggataacttgttgcttacttcattactctgatcgaatggtatatataggtggtgttcttttcttctaaagacgaagattaagattaagttttttacacaaaatgaggtggtattaacgtatgattgattgtgttttaattattacaaacttgaaaattagattaatatgattttttagaacaactttcatatataaagttttcgcatgaaacacaccgtttagcagtttgaaaagcgtgccatgaaaaccttaatcttcatcttattggaaaaaagaagggaccatagccttacaatggaactaatctgctaattaaaagggaataacaaactcctaaacaaaacacctaacttctgacgaactaatccaatccttgcgatatcactgtgcctgcgtcggcttctcgttccttcccttccgcttaaacgttaatacccacataacatgccttgtgttgaaagcctccaggttcgtaacactatgacgcacatagaaccatatacagggtgtgtttagttcacgccaaaattaaaagtttagttgaaattaaaacgatatgatggaaaagttagaagtttatgtatgtaggaaagttttgatgtgatgaaaaatttggaagtttggagaaaaagtttggaactaaacaaggccacaaaatggagcgtgatgcacaatcaatcagaattaatgaataatagtgaaacctggaataaagaaaaatagaagtataaagagatacctgctcaaaattagatatgccagagaacttgatggacacggatgcaccacatcaggtagggttttgcatcagtgcaacagttgatttctttggtgttaagactccagagaatacagctccagtattatttggtcgttcaacaccttgttggaagatcaacatggagggttttgctcattgtcaaatcctccttgcgtatatgcgactgaacagtacacaacagaagtccagaaactggaaaatagatattaataaatatatattggctgtgtttagttcatggcaaaattgaaagtttggttgaaattggaaagatgtaacggaaaagttgaaagtttatgtgagtagaaaagtttgatgtgatgaaaaaagttggaagtttaaagaaaaatttgaatctaaacacggtgattgttaggtttgatagtacttttgtggtgcaaactagagtaaccttgcatttcaatcgcttaaaaaaagcttctcatcccgtgaaaattgtattctgagagaacaaaatcattgtaaaatgaaaactatgatcacatgcagtagtatcacaaaagttgcatgccaacaactacaaatgctacaaaagaatggaaatttacacatttctaatgtctcaataatacctacaactactcagccaggccttcaacgaagatcgatggcaacgctggatcgataatcaggtccttgccttctgtttatctaggtataacattaagaatccttccaggcacataaattctcttcctgatgcccttcccagtcaaatatttggagagtttctcgtcggaggctgctatttggaatgcatcatcctcagagcactctttgtcgacaagaattgtacccctggtcttcccattgatttgcactggaagcacgagctttgattctttcaagtactcactttttccctgacagaaaagaaaaaattcgctaaaatttatggtaatccatggaaaagtttatatcatacccataggtagaacttttaatatcagacatgtagaacaccatggaaggtttgcacactttctggctgatgtgcagaagcatggaatgtttagggttacctctggaaattgctcgtgggccaatgatcttgagttcccaaggcgaaaccaaagctcctcagccatgtgtggtgcaaaaggcgaaagcaacagaataaaggattcaataactgactttggttgggtgtcccactgtaagaagaaagcacaatgagagaagtaaaaaaacacgtctaccagagtacaggttttgttgccaatgccatgttaaactgatctcatcttccattcttttgcacttcaatttgaatactcaagacatcctattgggttttactgacatcaggtttataaattgcaagaggttctgtgccaatttaccaagtgctaagcagaaaatgaagaagtacaggcacaaaagttcttaagcacattttaagccttgctgcacgaaagcacatatataagcttgcttggatttgaataactgcagtacaaacaccagctccatattcctgccttaggctgtattcttttcccctctttcccaactcatttccctcgttttccgcgcgcacgcttttgaaaatgctaaatagtgtattttttgcaaaagttttctatatgaaagttgctttaaaaatcatattaatccatttttcaagtttttttaggttagtacttaattaatctcaccataatcgtgtgcttcgttttccgtgtcagttgggaaccttgcctcctgaatacaacctaatcattgactagcgatgatataacaatggagacatacggtaaaataatccgagcaaaatattttggaaattccaggcaaataacttgaattttaacaaagcagacacattttttaaacttatgttcatatgggaacagtgtatacaaaacattatgctggttatttaatagcaaagtcatctggcatggaacttaaatagataatgtgtaggcaactacaaaatggatatgcaataaaattatataaatgacggcaacaacttcatttaaaagtatgaaactatgcatgtaaacattacttaaggttaccttgtatgcagcattcacaaattccatcattgcagaaattgcagtgttaaatcttgtttcttgaatttcctctgtgacctataaaacataacaatacattatagtcatcaatcaccaatcacatcagcacaactacaggaaaaaaattatcagtgcataatcatgtttagcagtaaggagaccctgagaattgtgtgatgatacaatcttgaaatagtcagtacataggcaaagcttttcacagggtaactgataggggaacagttgcaaagtaccattacaactaatccatctcaatattggaagcataaaaggtacaaaaataattgaaatggtggcacaggctgtaaaattaattaatagaatttatattccccaaagggcatgtcatgtataggaattatgtgccgggaacttggtaaaactgtacaaatttccaaaccaaactgctagtaaacctaaaattttgaatggctttcatttcagagtgaattagtgaaaagatgttatgtgatcatgctgtcaactgtgacgtactcttgcaatgcatttgtgaagaactcggagctgatccaaggttggttcctcatcagtaaccgtagttccaactccatatgatccatctggtaatggtgtaccaactacgagtctccatgtccttcctagaaatctatgcacaccttcaattccaccagtgctccatgtttttgaatctctgtgtacatcagatattctgtcagctttctaaaatggctgtaacttcatctgtaatatggatgcatacctcagtggtcccatgaacatttcatataagcggagagaatcagcaccatattctgaaaccacgtcatctgggttgatgacatttcctcgacttttactcattttataagcacgagcgtttagacgtatgtttgcatcatccttcagtacataatgatctccaacttttgtgacctttaaaaacatagaagaaagaaaaaaaatcaaactaaaaaacttttatcatgccaattgaataaagttataaatgtaccagagcccaccttatctgcaggtactttttcttggtagcaatcaatcaaacttgagttggaatctgcagaaacccatctccctttattgtctctatatgcagtatattcaacctgttatgatattacctgttaggaacacatgcacaagatagtaacgaacatgggcaacttttggaggtaattagtttcacctacttctcctagaatcaatccttgatttatcaggcacttgaagggctctttagtggaaactacgccaatatcataaagaacctaacatagaaatcagttagtttgaagataaggaatgccaaaaggaaccagtagatttgcatgctacagagtacagaaataaaaacaaattaatggcataagctgggaggaaaaacaaatgcaaataagtttactcaaaagaaaaaaaaacaatgcaaacgagaaagtaaccgcctgtacccggatttcttaagaataagtcagtcccctcgggaaaaaaatcatattaaagcagcaaaatctaatacaattgaacaaacagacacgatcaacaagataaactaaatggtttgtatatatttgcacgtcaaaaacttgctagtagcatccgatagaattatcaaagagcagatatttgtccatggaaaaagagaagtcagaaccttatgccaaaatcttgcataaagcaaatgcaagacagaatgttcagcaccaccaacatagatgtcaactgggccccaataactgcatgatgccaaaaaaagggaaaagaataagtaacagaatacatgatatcccttactgaggtcatatgaaagaaggagcacctctcttttgccttgtcaaccaacatactggcattttgaggatccataaatctcaaataatacctgaaaacattgaaatgttagggtttagaagccacttgtaaatttaagagcatatttcaacatggcaataaagattttcgagtgcgatagcgttagcaattgatatatctataactaatataaatattcgtatttttccggtcgtcacatctaattttcgtccgtttttcgtccatacacaatccgattcggttagcaatagccatggaaaaaaaattgcaaaaaaaaaaaaaaaaaaaatcggcggccgccgacgcctccaccgccgccggagggagaagagaggcggcggagggagcgccgctgccagatccgcccgcggtggccgccaccgccgacggatccaccctcggacgaagccaacgccgtcggcgccgccgttgagagggcgccgtcgaggccgacggggagagggagagggggagggagggacggccatctccgccgtctccgccgcaccccgccatcgccgtgccgcccacaccccgcaccccgcaccccgccgtcgccgtcgcccgcgccataccccgcaccccgccgtggggcttttaactatttgccactcttacgaatggtccttaacgatttgccactaggcccacatgtcatagacacatgagggcccacgtgtcattgacagagcgtggcaaatcgttaattgccatgtcacaagagtggcaaatagttaaatttcccccccgccgtcgcccgcgccatgccgacgagagggagagggagcggtccaccatcgccgccgcaccccgccgtcgcccgcgccgtgccggtgggacggaagggagagggggagagggagcggcaccgccggaggggaggggagaggaagcggcgccggtggggagaggagaggaagcggcgccggtggggagaggagggggagaggcggcgtcaggggcgagggaggcggccggctcggctgggggggagggggccgcctgaggggaggggagggggagagccggtgttgggggcggtggaagcggccggctcggctaggtgaagggggagggggagggttagggttagggtttcatccatttcaaaattatctgagccgtccatcaaaatgaacagctgagatcgatcaagggtttgggccgcaccacttgggccgcacgcgggccaacagtctagcaagcgagaggaagagtatagggatataaattagactttggtcacttgtaggctgaagaagaaagtgggccgaaaaaggcccatagagataaaagaatttttatttagatttttatttaaataaatacttaaatgatgtttgtattatcaaaattagcaattaagctacgtaaattccaagaaaatttcaatgagtgtaattaatgatatagaaaatttaataaaaattaaatccaaccataacattttatttctcacacttactttacttataaattaatttaattatatacctacctacttaaaaaatacccaaatattacagaaaatttatatttcatttaattagaatttaatatgttctaattcaattttatctttttttctttcacgatgcgagctaagcaggaatatttttatccatcttgattatcattagcgcaataaataatttacctatcttggaacattattatatacatgttaacggtgtactttatagaatttaacagttcctttacccgtagtgaagcacgggcattttgctagttaaaacaaacattgatagacgcagtctatttggagtcaattatgtaaattgttataaaattattgaaattgtgtcatgaataagttaccagcatgatccagcccattgtggcatggtgcttgtttcccttctagcaggcttcccagacaaaggttctacggttttaacctaaaaaggcagcaaaaccttttaatagatttgctatgtataagcaaaagtaagggggactaaaacctcaaaacacatctccatgccaactttgccgaacatataaatataaatatactaacaggtagtagtttaaattagatctcatcattcaattccgatatgattgatagaaacatactgactaggagtgttctcagtcattacaaaagaagcaacaaattgttagtaccaaactgctaacaacacatacccaatctgttgccttggtcagaggaggctctccagtaccagttggagtgaaatcatccaattcaggaagagttaaaggcaactggttttcttgaaggggcagcatttcattggtatcatcacggtaaatcacagggaaaggttcaccccaataacgctgtctagcaaagagccaatctcgaagcttgtagttcacctgatagttgggtttgcttaattattttatagtgaaagaagtagcatgaagaaggctgttacatgatgaagtgggataaagaatgcacctttttctttccaaagccattagcctctacccattcagtaactttcaaagcagcatccttggaaagcataccatcaatatttaatccagatgaagaactggatgagtttatcatgataccatcatctgcatatgcctcctcagagtcacaattgccattgagtggacttacaaccttaatgattggaagtttatatttcaaggcaaattcatggtcacgtgagtcatgtgcaggcacagccatgatagccccagtgccatagctgcaaggtagcatttaaaatttagagcatgcaaaactaacaagtataaaagtaggtttttcatttcctcagataattgttaaatttactgcgagtgtgggataacaccccgcaattgggtaccgagctcgaattcgcc

SEQ ID NO: 28637 - DNA, 9522 bp, Oryza sativa
agaccccttcacatgcatgtgaataaaagcaaatctaacttccaaatgaagaaatggtttaaaaaatatatactaatcataacaaggaaaatcaaaataatcttcattgagaacctaaagcagagaatgtatgtgacagctccacattcagactgttctgtttaacattacagtaagtagcataaagtgtgtatttattttaagatgttgaattaccatgccctctggcaacctacagtgtagagttaatagcatcatttttgtttcgaagatgaagatgatgatgcacaatgtaacttctgggtacacaggaggcaaagatgttttgacaaaccttcctaaaacataatctgccacccatattggaactatctccccagttgctgggttcttagcataagaaccactaaaaactccagttttttccttctgaagatcagttctttccagttcactctttcttgctgtgagttctatgtattcctctacctgcttttccagttagtctatattatgcttctaaacatgataatggtaatggtgagaaaagggaccaaaaaaacatacatgtacacgttgttcctcagaaattagagatgacaatagagaatgctcgggtgccagaacaacatatctgcaacagaaaaggtgtaatttaacattgaccatctaagagaagactaataattttgtgcaaattaaagaaaggatccagaatacacacgttgcaccaaaaattgtgtcaggtcttgttgtgtaaactaacaaattagcacctagatcgtgcccttccttgtccacagctgagaattcaagctcagcgccttctgatctccctatccagtttctttgcatttctttgatgctctcaggccaatcaagttcatccaaatcttcaagaagtcgatcagcataagatgtaatcctcagcatccactggcgcattggctatacaacaaaatataaaaatcgatcacagtggtatactttattttccatacaggttcttagcaacaggtactttgacacgaaagagtatagatggaagaaaaggctaaactgacaatatagtgcagattctaaaacatacctttcgtataacaggatgaccaccacgttcactgacaccatctattacttcttcattcgccagaacagttccaagagcagggcaccaattaaccggtacctcagcctgattgtaagatagcaatgccagcctaaaaatcattgaaaaccacaaatacaacactaagaacataacagaatcctaaaatgaatggtacagagcagatgatcagttcaaataaaggagatgcgaaacaggaaatgtatcaaacaataaacatgacatgtttgcaattcaaaaaattggacaagcaaggatactagtagcattaacctgataggccagtcctcttttcagtagttgaaggaaaatccattgtgtccatttgtagtaagtcggttccgttgtggaaatttcacgatcccagtcatatgaaaaacctaacgatttgagctgcaacaccagaaagcatatgctccaaataaacgattggtaatcaatgaaggagcaaattagtggcaaactaagctactgatgcaaatcaagtatttcttcagcactgcattaggctctcaggctatgaactatgggtattcctgatgagaattaatcagtatggtcaatcaaagcaagcatcagaatgtatgatttacctaattattttacatcatataacctgcattttatggttgattagtattactccacctttgcaatatggatgaactgataaagcattaggaactcagtagcagaagctaaatgcagcaaacatgctctatttttttaacgcaacctagtgaaaaactaccaccaaaatacagtagtaacatatgtaattgctaaccaaaaatgaaagcatgatggcttcagtttacttgctaccgtgacatcaattaaaaaggtttcaaaatataaatatgacacctgtgagcggaatcgattgatgttccgttcagtggtaatcttagggtgggttcccgtctgtgcaaaatgtaaatcggtcagatcatagcaacgcatcagcacgctataaagaagaataggctaaatgaccaagtcccacaagaaagagtaaaaacctcgatagcatactgctccgcaggaagaccaaatgcatcccatcccatcggatgcaacacattgaagccttgcatgcgcttgaacctcgacaggatgtcagttgccgtgtacccaaggggatgcccaacatgcagcccagctccactgcacaaaaaaaaaaattgcacaatcatgtacaacgaacagcatgtatctaatccaatcatacaattttcgatgagtttatgcatctaattgatccaagtaagaagtaatccaactatccaagtttcgcactacatggtctcagatcaagcttaacccgattacaccattgcagagccaatgtagcagcacagaaagcatagtaagctgaagcaagtgaagcagcaaacctggggtaggggaacatgtcgaggatgtagcacttgggcttggaggtgtcgaggccgtggccgatgtccggggtgcggaacgtgcggtgctcctcccagtgcctctgccacctcggctcgatctcgtcgtacgggtacgccctcctcgcctgcgcctgcgccttcccggcgtcggcgttcgcgcagcagcggcaccacccaccacctcgccgcggattcggcggcgggaacccgctttgcaggcggcggcggtggcgggcagcaacaacggccgggggccgcggctgcagccggagctggagcggcgtctgcatcatcgctaccgccatcggggttgggagcggaggagggagaggagtcgtgatggggaggttggggcgtagccaaatataagcgggaggtggaagaagaagacgagtttaggataaggtttcggaatttcgttcccttttccaaataattaggatgaaaattataaattagaccgattttacttacaagtgtttttctcttcttctttttcttctgctaaattcacacaaaaaaaaatctgtcatcgaagactgatcaattcagaacaacaatctgaagattaaaccagcaaatctaatctagtacaatttcctggatataattcaggaaaaagacacatatagtccatggtggtacaggaagttacatatagtgatgtgacacgaaatttagcatagaactaacagtgctttccaaaatattacatgtaattactctttgtctaaacatagattttttaaaaaaatcatttggtatcagccttctgatttcactgaatgtttgcctcttcactcctctgacaaattccaggtgccaaatgcatgggtaaaaagaatcatagactgacactgtaggagactttggtgaggcctttcttgactcttatgtttgtgacctgaaacattgcaaattagatcaatctccaaatccaaggtttatataagggcaaggtacaaatcacaaatattcagtcatctgccatagaaaggcagcaccaaagtaatggtttgcagaaaacaaattaaggacagatgaatggacacgaagatcatcgattcatgcatcaactagcaatatgcaaaaaaaaaaaaaaaaaaaaggtagtactaattaaatacatctgaatgcacagatgccactaaactgttccagtctttgtgctggatggtttcaaactgataatcatgattgattaccatttttcactgctttatgatttgtgattaagccttcaggaattttgtaaaactctgagaaaatccaaccagtgaaaaatagcaccgaaatatacaccatcaataagcattacctttatgttgttgatgatagagatatcggcaacatgtgtaccaccacaagggccaccaggataatcaccaaatttcacaatgcgaggggtgctatcctgaaacaaaaacattaggccacaaacaattataataattcatgaaataaattagaaacaaaaataaaggtgacatgattcataacactactcagaatttatgatataaagaaaaagaattggaacttaatagtatcacactatcatttcgttatttcagacagtttctatgatagttcatgatgggttcacatataggacgaactcaacactccacatttaaggaaatgtttctgcaactgttgcgaggaaagtaaactggaataactatggagaatccattagaatatacaaaaactaaccatgattttgagcgaatttataattagtacaaccaaaagtccaaaacaaatgcttctgaaaaaaggaacataggactaacttttgaaatgtagctaggcagagcacctccacacaattgagctgcctcctcataaggtaaaatataagctaatacctgcatcaagtgtaaaaaattgaagtcacaagataaacattataaacttcaacaagaacagcttcgtgtgtcttacttttgctcctttagtaattaactcatttgcttctttttccaactcgtttttcttatcctgcaactgatctggtggaatgactcctttatactcaacgaaaggtctgcagtgaacaaagaacacttaattgtgcacacaataatctaactacaaccaaattagtttgagaacacatgataagttggacgcaaaggccaagagtaatcaattgttgttatggagcaacagaataaagcatccaaaacaagcaaccatacccatcagggaaatgatgtcctttcccagggtcgaaatgtgataagccaatattgctcatgcagatgtctatcaaatgccctgcagaatgaagcctgcaagcaaacatcacaggttcagcacgacgattcaacaagaagctaataggtctgcaaatgcacatagcaattattttttttgaaaggaaatgcacatagcaaataaaacatgatgaaacgatgatgattaacgcaaacttcttccatgaggtattgctgatacaacatcatcccaacatagcatcctaatggaaattcatatccaagtcactaaaatcatgcaatagttatcatgccagcaattaattaacagcgacagtatgaataaatgagaagatgtagtttggttgatatggagttatagacttcaagcttgacgatttcaagcaaacatcacaggttcagcacgacgattcaacaagaagctaataggtctgcaaatgcacatagcaattattttttttgaaaggaaatgcacatagcaaataaaacatgatgaaacgatgatgattaacgcaaacttcttccaagaggtattgctcatacaacatcatcccaacatagcatcctaatggaaattcatatccaagtcactaaaatcatgtgatagttatcatgccagcaattaattaaccgcgacagtatgaataaataagaagatgtagtttggttgatatggagttatagacttcaagcttgacgatttcagtaaaatttcttggcgtctcaatacaagtttacaccgtgcacacctggaatttaagttgcggcgttccgcatcgacttccaagctaacgctctgcccttcactgaacccggaattgcatccatctccagcatcctcaaatctcccatagtggaaaaccttgatttaccagcacaaatactcaattagcctaaaaaaaataaatccaacatcctcagcaagcttgtatccttttcgagttctcggttctcaccactccatccttcatccgcacatcatcgacgatgaacctggtgccgccgccagcggagatgacgccggtgtcggccggctggccgccgccctgcgggtagaagacggtggagtccaccaacaccgctcgccggcccccctcctcctgccgacgagacaccaggggcttagtctagtcaggctctagggttttgcgcgcgctctacagtacggccgcttgttcgtgcacatggatggggcaagatcctgaggagaggagaggggaacctggaggagggagacgacggtggcggtggagctgagggcccacatgtcatcgaagtacgcgagcttggtggggcccatggccctcgccggagctgcggcctccgttcccatctccgcgggggtggagatcaccgccggtgggcagaatggagcgccgagtcgttcgaagttcgaactcccaaatttttggaacaaccttgggtgagatgaaatgaaatgagatgcatatttatagcctcatatgctacaagtcaattcaaatacgcggatcgaaaagaaaaggtagtattcggttaaaaaaattagaatgtcccagcatatagttgaatttgaccaaaattatagtgatctttgcaaaggttttcagaagaagacaaggaagtagaagtaagccggcagctgtggaaaccgtatataattccatacgaagtttccaggagctaactgcttccaataaccttcgatcatctgctcaaaaagttggatgctttttaccccttaaatttaacaaatgtaacaaaagcactactatacttgttgttttcagacatgttatctgcgtgttactcatatctagtactaatcagaaaatctatcgtatggtattccgtggagacggaatagtactactgccttatctcctgttcccctcttccagtctcttcccctccactcactctctctctctctcttttcccctccactcgatccctctctctgtaactaccacccatgagcacggaggcggcgacgacggtgacgacgacggcagcaacgacgacgacagcgacggcggcaacgacggcgacgatggcggcggcaacgacggcgacgacaacgacggcggcgccgtcaccaccagcccccgcgaacgacctagacgacagccagcggagctcccgaccaccacgggcgacggccgccatcgagaagcctccccatcaagctcctcaaggcgctcctcctcttcgtcgttcttgtcggtagcttccttgccgctgccgcctcctcctccttggcggcgctggcgcctcctacggtcggagagcggtggacgcggccaccgggggcgagcgcttggcacaacatgagcgacgaggagctgctctaggcggtgtcgatggagccacgggttcggcggtttggagcgaggcacgacgacgagcgacggaatggcacaaggtaggcaccagatctatcgcctcctcttcctcttcctccgccgccgccccgctgctcgacttccctaacccgcgactcctcctcctcctcctctctcttgggatatcacgctgatacccaggtaccaaggcctgatacctaggtatcagctcgatacccagggtaccaggtatcagtcaatacccaggtaccaaagcctgatacctaggtaccaagccctgataactaggtatcagctcgatacccagggtaccaggtatcagtcgatacctaggggtatcagtcgatacctaggtaccaagacctgatacctaggtaccaaggcctgatacctaggtatcagctcgatacccagggtaccgggtttcagtcgataccagggtgtaccaggtatcggtcgataccagtgtaccaggtaccacctcggtaccttatccaagataccagggaggattggataaggtggaatcgcaggatagcgtgggcctccccacgaaattgatgatgcgtattaaatctctcgggattttagttatcccgtgactgctaggagcaacggaataccgtggggtagcagccctcactactatttcactactacagtattatgcaacaatcagcactgccatcacatgatcttcgatggttccagagaaaggcattagacttccatgcttccaggaaaatctgtgaaagccgccgggttcagtaatcacaaggggatgatggtcaattatctcataatatactccatatgctttgcatctatgctcaatcgtttggcattctataccaacacaatttacaggtacaggcagacatcatcgaactggtatcattttcaatacttcgtttttttacacatgtagaagatgaaaaattatctatacataaactgaactgaacatcctggaatgatgactgaactgaatcttcagagttcatggaacacgcttacatctgcaccagtaagccactccccctcctctgccttgtgccacagcgatttcctcatcaacatagaaccacacaaagaaagggtcctttgtgctcggctccctaccatcattgccacctccgaggctgatttcgagggggccgaaagggccgacctttatgcgaacccgctcgaagatgaatgcgagtatcttcttcttccatgacagcctcccctcaaaggttaaggacccaacaggccccaaatacacgccattctcaatcctctttccctgtacaggttcaggagatgtggatgaataacacacagtatatagcagataacagtagcaaacatttgcaaatttcaagaacaatgaagccttttgcagcaaattcaggttaagtttgtcggttccctgtctttatcagtatcaaatagttaccacggtagtatcacagaagatggtttacaaagggggtttcttgcagtgttcaggaaacagtaagcagtaaaaacattaaactacaacatctgtgctgtcaggttcgtgcatggtgttgggccaaatttccctccacatggagcctttgctctcagcccattgcagcccaaaagtccaacaaatgtgagccattgattcatgtgttgattaatggtggagattgcctcatcctttgtgatgggaagaaaaaccgtagcctccattaagagaggttagagcagcagccattgaggaagtgaaagaaccaacaaaacacaagagagggagaggagagtggagaataagagtggcagtttgttcagcttggggctcttacccgatcttcatcaagtcagcgattggaggctcaaacgtggttggattagcaccaaacttggtgagtttgttcctcactttaagcactttaatttgattagtttgtgtgaggattggttgagtagagcaccggatttgagtggtggtttgtcagctcgagttactgcagttacagcttgcacaacagttggtagaatgttagtttgagggatcaaacggtgtccgattgggctgttttttttttggatatcttggaagggactcatagaccatcatttttgccaagtttagtgcaatttgcatctgtggtttgggagatctcatctgagaaccgaaaaggacataatccgctatttctttgcttatttgttgatatatctcttgttagctttgatggttgatgttgatgatgccaaatgtgtaacttgatgttatagctgctgttgtgatgtgcctctagatgttctagagaagactccatatgtacccattgttgattatggtggaagcttggagtggactgttggtctcgtggtttttactcctcacaccgagtatgtttttccac

SEQ ID NO: 28638 - DNA, 2351 bp, Oryza sativa
ggattgattgtgtgaaatatgtttgccagttggtgaattgtagtttgcacatgaagtgatttggttcagccccaacaaagtggtactagagttgtaactgcagtaactcaagctgacaaaccaccactcaaatccggtgctctactcaaccaatcctcacacaaactgatcagattgaagtgctcaaagtgaggaacaaactcaccaagtttggtgccaatccaaccacgtttgagccttcaatcgctgacttgatgaagattgggtaagagcccccccaacttgaacaaactgcaactctttttctccactctcatctccctcttttgctggttctttcacctctctcaatggcttctgctctcacctctctcaatggaggctagggtttttctttccatgaccaaggatacgccaagctctaccggtgacccacacgtgtacccatgcctggaagccgctgggccgtcgcgctgggatcgcctgagagcaaaggctcaatgactttcggaaggtagtgaggtgcttcatgatgtcgggagggggagtttgttgggccaaatttccctccttatggagcctttgttctcagtccattgtagcctaaaagtccaacaaatgtgagccatgattcatgtgttgatcaatgatggagattgtctcatcctttatgatgggaagaaaaaccctagcctacattgagatgtgagagcagcatccattgagaaagtgaatgaaccagcaaaacacaagagagggagaggagagtggagaagaaggccccgtttggcacagctctagcttccaactccaacttacctggaaccggaactgtgccaaacggttcagatcctccatttttgggagtggagttagcagagctactcctaaaaaatgaactacgagggtggagttgggtttttgctgctccacagctccactccaacctaatagacccactaccatctaattttttaacatatttacacaaaaataccactgaaccacaccaaactcacctcctcacccctctctctctctccctcctgtaaccctcacctctcccacgacaggcgcacaggcggcggggtcgacagctcacggcttggaggcgcacggctgacggcgcgtgcggggacaacacggcgacggtgggtggcgcgtgggggacggtgcgcggcccgcgaccggcgacgcacacgggacggcaacctagggattcacgagagataagggattgttttttttccatttttttttaatttcagatctggagctgaatactagccaaacacttttcaactggtctccaatcccacaggagccagctcccattggagtgggagtttagagctaggagttgtagtttggagctagcagttggtagaatgtcagtttgagggatcaaatggtgtccgattgggctgttttttggataactttgaagggactcagaccatcatttctgtcaagttttgtgcaatttgcatctgtggtttggaagatctcagctgagaaccgaacaagacagaatcttctatttctctgcttgtttgttgatatacctcttgttaactttgatggttgatgttgatgatgccaagtgtgtaacttgatgttatagttgatgttgtgatgtgtctctagatgtagaagactccatttgtaccaattgttgattatagtggaagcttggagtgaaccgttggtcctgtggttttttcctcctcacaccgaggaggtttttcaacgtaaatcaccgtgtcttgtatgcatgtgtttattgttgtttcgttgctgatttgctagttgaaactatactcaaagtttatggcaagatgaggggttgattgtgtgaaatatgtttgccggtcgatgaattgtagtttgcacatgaagtgatttggttcagccccaacaaagtggcaactgggctgctaaagcataaagattctattatcatggcaagtaacgaagagagcttactgcagcatcaaagcgctggactgcggtcactgggaagtactgtcctttctccagccgaccctgcaaagacattttcagttctttcagtttcaccaccaactaagcaaccaagcacgattttttccattttctttcagaaacaccaaaatggctgctcctctcgcgagcaatgaggcgcatgttggtgaccttagcagtgaagatgagcatccatgtcctgcccggggactgtgtcccaccgagggtctcgaagaaggtggatgtgtcgagctttgccttcttgatcttggccaatgccgcgagcaactccggcgacggcaccttcctcgtcttggccgcctccttcagcaccttcacgctctccg

SEQ ID NO: 28639 - DNA, 11244 bp, Oryza sativa
agcttactgcagcatcaaagcgctggactgcggtcactgggaagtactgtcctttctccagccgaccctgcaaagacattttcagttctttcagtttcaccaccaactaagcaaccaagcacgattttttccattttctttcagaaacaccaaaatggctgctcctctcgcgagcaatgaggcgcatgttggtgaccttagcagtgaagatgagcatccatgtcctgcccggggactgtgtcccaccgagggtctcgaagaaggtggatgtgtcgagctttgccttcttgatcttggccaatgccgcgagcaactccggcgacggcaccttcctcgtcttggccgcctccttcagcaccttcacgctctccgccacggcctacgctaaatccacatcaaaaaaaaccaaaccatttttactctttcaccaatcactaggaagagaaattgatgggaaagaaaaaaaaaggaaaaaaaaaagagatggggatctttgcaaagggatactcaccgacagatcaccaggggatttctcctgcggcgagggcgagggcgattgcgagggctccttctctaagtccggtgaggcggcggaggaagcggcgagcgagaggcggcggccgcgacggcggtggggggagccgcggatggcgaggtgctggggcggcggcttgcggagtggcgagaggacggggacgaaggtggaaggaggagggagcaaggaggcagacgacaacgccgccattggcgagagacggggagctcgcagtcgcaggtgtgtgtggctgcagtgctggggaaggaacgagaggccatggcgacgagcagacgtggacagggttagctcgcccagtggccaccacctgccacttggtcactctcattctgaaaccaggattagcatgttgaagacaagtcagtttagttatgcaaacaaattcatgaaatcattctagcaacttgatcggcactgggaaaaaaaccaggaatttatagaatttatatggtttctatgaaatttctactgtggttatatctaacacatggacaaattttactttgctccatagcaggttgaaaaattaaaatatcctcttcgttcaaaaaaaaaatcttaattgaagtgtagtggtagtttgtatgttagttcatttttcctcaacctgtataagataggatgtgcttattttaccctgacgataggatgttgctttcttgtttatataaggagttttttgatgataaaaaagatggcgtaaagtctataatctaataatctcataatttttcaaatgtatggaaataattgaacaacctgtgattgtgattatgtttaatttttattcatctacatattatgatgatatcttcactttttttaataagcaacatgattgctcatctttgtattaaaagaaataatttatgtgcaaaaccaaaaagaaatgggggagagggaataaaaaaaagaaagaaaagaaagactgcctatgatctaatctcacgatgactttaaaatgaccacgccatacagttattacagcgataaggtcgacatcggagaccaggatatatttgcatttgctttagagtttttaacgtatatgatgaattagtacctacgcaaattgtaataagtaccatccttcgttttacgttagcactctttcatccttactatcaaggtgaaggaaaccccaaacacaattatgatatgagctgatattgttattcatctcaacttttctttttgaatgcgcttataatttctttcctctagttatttatttattatagctagacaaaacaataaacacaatcagattacagcttccctgctgtttcgttttctaattctgggatgcaccttcttttctttctgaagaagaagaaaaaaaaagagaggagaaagaaaagaaaaaaaaaatttctccaaagaagaagagagcgtgtacaattcagtctcctcctacctccccggagcccgacgagatcccgccaccgccacctctcctcctcgccgcgcccggcgacctcctcctccacatgctcctccggtcggcgccgcgccgcctccaccacctccgcccgcaccacctctctaccgccgccgccctcgcggcggcgccgccgaccccgaccgagtggaccacggcgccggtcgcctccgtcggcgcggccaccgccgacgcgtccctcttccacgtctccctcgacctctcctcccgcgccgacctcctcgcctcccacgtcgccgccggccagttcctccccttccgcctccccgccgcgccctacccgatcttcctcgccatctcctcctcccctcccgcgccgggcctcgcgacctccttcgatttcctcgttaagcgactccccggcaccccctccgcgtgcctctgcgacctgcgccccggcgacctcgtccacgtcggcggcagcgtcgtcggccgcggattcgaggtcggcaggatcgctgacgcgcgcgatgtcctcgtcttcgccaccggatccgggatcaggtaacctacatgctcctctgcgacaagggcttcctcaaatcctcgtcaaaattcgctcacactagtgacctaaaccgattatagatgcccttgtgagatgtaatggctaattagaatctgtgcaagtcgatttcaatagatttatagatgatagaaatgatagtccccaccgtatgcatttgcatttcagatgatttagttgctgaatagctgcagaatgcatgtctgttttatgctgccacatgccaaaagctgtatctttgatggccttgatttcattttccgcatcggtagctttgcctaattggtttcataatctgcgctcttgcttacaaagcacaaatcaaccctgtttataagaaatcatgactaccctctctatcgtaccaattacacaggaaaaatatatgtatacaagacattcgaatgttattgcattgaagtgtgtaatcctgatcacattatttgttctacgtatgttattgcagtccaattcggtcactcatcgagtcaggttttggcgaaaatgagaacattgatgtaaagctcttttatggggttagaaatcttcagaggatggcatatcaggtaaatgtcaagtcttatgtgtgcaactcgtaagttcacttctgtatatatctcaagaccctactctgacaggagagattcactaattgggaatccagtggaatcaaaattatacctgttctctcaagacctgatgatcaatggaccggcgagcgaggctatgtccaggtactgttatcattttgcatctcggttatttttacctgtttgttcgttgttgtattcttatagctggttctgcatttagcagaatgctttttcaaggatgaagaaggttgtaaatccttcatccatgggggcaattttgtgtggacataaacagatgtctgaggtatgattacatttccttctgttttctttgatatgctgaagttgttgacttgatacaaccctcagaccgtgtcatacattaaatgtgttatgatttttttttgtccaagtgtttcaatgctttatgcaattttgattctgaattattctcttctattgaccatctatacataaaagcatagccttaaaggcttcaaccactaatactctccaacaatatgccttttcctgatatactggaacatggtttacatttcctcatatgaaactgtcatataaaatacagacaccagtgtggaattgctttgtagctaatgctcaatctgaggagatgaatgaattatctaccttactagtttgcgccagagagcaacaagttactgtaccgctaagatttgcatttaactgcagaataactatggccaatttatcttcatggcctgatagtttctgtggtaatccgtaatcgccaggggtgggcgtgtgttgagtgactttgttgtgtacattcattctgattttcatctatattgatatgttgcaggaaattactagagcacttgttgctgacggtgtgccaaaagatagaatcttaacaaacttctgactgcccctagcccactagaacacaattatcagccttctagatgttgtatccttattactcattacagtgattattctttacagcaagcgcgatggaaactcgcaacagagaaacagttttgtactacttacatataggggcttctttttccaattttcctgcacgatgcaacatgctgcgctgtaatctggattttgccagcctgatgtatcaatatcaacacttggtgggcattttcgcatttgaaccgaaaggccctagttcatacagttttgtacctcctgaaacaatacccccttggaaggtgttgatatactccaaattacaaaagctagctcaataaaaggggtagagatgagtggcctcatgtatttgccttataaaagaggtagagatgagtggcctcatgtatttgccttcagttataatttgtcttcagttataatttgtgtattatttccccgcaaaaaaaataataatttgtgtattagaaggctataacaggatcagttttgaattgatttgagatgcgtttgtttgtatgtatatacaactgttcttcccactatcaacaaaataaagagtaatgttcttttcgatcatacataaatttatatgcatgcaacaaaagcggacgtaaagcatgcatgaaaattttcatgcattgacatttactaatgtactagccgataacccagtacctgtagcagtcattcgagttgatttctacaattcagcatcacaacggtaaaacatagcacaactgtgccagtactaagcagaaagcatctttagttctcattttttgagcagtcaatagaacaattcgaaccaccgactgaagttcaaattagccaacacagatgaaacgaagaaacgacgagacataaaagtcacaatcaccgaaccgactttgtatcagtacaacgtcagaatccacaacgttggaataaagagtgaccaacataaaagataagacaactaaaattcttttcacgcgccaaaaaccaattcaactagtgccgctggagtttaatcaacgttgccaccttcaagggctttctggccatcttgccgcttcttgtcattaggttcagaagagctacggtgatcatgatggtgatggtggtggcggtggtggtgacgatggtgtccggtcttgtgaggccttttaccatttctcaccttttcatattcaccggcagctgcatcatcggatgactcctccagggagcgactcctacggtgcttatggttgttggaatctgatgttgcatcctcatcgcttgatctatgatgtttcttatgtcttgacctgcccctctcctcagactcagaccctgagtcatcaccagatgatcggtggtggtggtgcctgtgactcctggaactggaatggtccttcttggaagatctcctctcttcatcatcgctgctatagtctgaagcatcagaatcagaccttgatgaatgtcggcgatgctttctcctgtgtgagcgcttcttccttcgattttcttcttcagacccactatcatattcatcactatcagtatcatcgcttgagtctgagcttctcctctttgatctgcgcttgtgcctcttggcttcatcggaatcagagtgaccgtgtttcctgtgccttttgcggtccttcctcttcctgtgcttccgatcaccatcactgtcggaatcactttcagagtctgaggaagaatggcccctccttctgtgctttcttgacttaagcttcttttcctttgcttcagcatcagcttttgccttcgctgctgcttcgagcttttgctcccatttcagtggggcttctttcttctcaaggattctcttctttttctcttcaagcagctgtaggaacttcttggagtccatcccgacagatcagctacagacttaaaacctgtagggccgtgaaatgatgcaaggaggtgcatctcatagaagagacaaaatcactgttagtttttgaaatatctagaataatatagcatgataacagacagcaaaaatataagctgaacccaaaatagataaaataaacctaggcaaaactgacatccaaatacattggaaatcaggcatacatgaaatcgatccccccaaaatacaactatagaagaatagaatgtcttgtttaggcttcacgtaaaaagcaaagcaagcttatgcggttcaaatatttgagcaaacttccactaagcatctaaatcatgttgctagtagcagcagacttgcagcttctcagctttctgagttcatatagctatataaacaagagactttggtgtaatatttatccaaaatgatgagaaaagactacagacagtcaacacagatggtgttaatatgtatccaagaaaaaaaaaagaattggatatggcgccagtttaaagatggatgtaattttgaattccagagacatgtatagggtacaactccttacacgaacacggatggtagaaacagcttggtagcagagttgttgttaactaaagacgcgcataatgtgaattatatacactttcttaccttgtcgtccgtaagcttcaaatgtccagaaaagatccctcctttttccccttttactgagccgatagttcacctgaaacaacaagagaaaatgtgtgaattcgtagcggatatgacgtagctttcagcaagcaacttctcgagtcgccccctgatctcgatgggaatatatatgcacaaaaaagcatatcggggcatagccatagcccacaggtagtctgggcccaattcccatccctagcgggggggtgttcgcggcaacggtgaggcgacggaatttgaaaaaccgaagccccacgaagattccagcgacgagtcagatctgaattgcgagggaaccctagaacaaggacgaaccgcgcccaaaccctagacgcacagcacaaaaacctagccacccactcagaatctcccgcggctcgcgcgtctatacgtacagatccggagcctgagcaatccgcaccacgcgatctaagccctcaccacgaatctatctagtaagaaaaaaaattcaaaaaaaaagttggggaggagagaagtggatggatgcagcaagcggtgcagaggaggggggggggggagaggagaactcactggattggacgggagacgccgccgcgaggggaagagaagatctggagcagccgccgcgtcgaggaaggaggagaggggtaaggcggcgcgcggaggaggaagagagagagagagagaggcggagtggaccgagcctaccgactagataaagaaagagcagagcgcgtggcgtggggggggggatggcccacacggcagtgacagcgtgtggaaccttgctctttgcccaactcaagttgccgacgcctttcttttttttttcacttttcgttttctttcgaaaaaaaaaatttgaaactggggtggtagaatgttggtattcacaggaaccgttggatcgagaacgtgcgataaaaggagacaagcgaacgcatcctgcctcccaactccattccgagtttctgattaccagatggatttactgggcaaagccaatgggatgccaaaaatgacaacactcatcgaattttggcatgatgtagagggatggcatttcatgttgtacagttcagttcattgccatccatacttctatgcaaggtcaaacagattggcagtctcatacttctatgcaaggttaatgttttacttgagcaacattggagaacgttaatgctttacttgagcaacgtaggagaccgcggataggtaaggttgtatttccggtgcaaatcgagctccgaaatcccagtgcatcaaactaccaactgctagcagtgcgttcctgcttggggtacaccaccatgattcatgtttccgccaactcttcgtcaaagcttcatccgagtttggtgttaatcaagatcaacaagtcatattagtttgatgataatcaaaagaaatgcgatgtacttgtagcaacgaccaaacgaacaaagacacaaagacaagggcaatattccagtattactaacagcgccaaagtttggacaaacttaacgagtagcaatccagtgtgcaatggagtaactgcaacaacgaaataacatttgacataacttaggaaaggtgctattgccctgaagcaggtcctaactccaaaattttacgagcatttgatgcgcaaacagtcaaacattcaaccatgtttcacaggcttatctcagcaatggccctggacagcaaaaaatctcaccctagcagtccacatctgaaagcagacggcttcagttgcgcctgctgctccaggttgaggaagatgatgaacttgagtatcttgaaggtcgccatgtgcctggaggaccatcttggcgggctgggggagcagcatcgcgagcagggggtgcctcttggcggagcggacgcatatcaggacgtgggcgatcatcccgtgaaccccaacggtcttgctcaggtgccacagcaggtctctggccgccagcactactgccaccatcaccacctcgtttaaacttcgggacatacttaccagcagctggtgcagcagcggcagcagcagcagccggtgcagctaccggctgagctggctgtgcaaccggagcagcatcaggagtgcgtgcaggctcagcagctccagctcctcttcccatgagagcttccattctctgtttttccttcttctcttctagttccctctctctctgcagctgcttggctgcaattgcatccagcttagccttcctctcagtctcttccctctttctcctctcttcctctgcagagaaggtgaaatcattatcaacaatatgtataagctagaatttgatttcattgcatcaggcaaaaaaaaaaagatccgcaagataattatgcacaagcaaatcacactttgatgccaaataacattttaagttttaaagctatccattgtctaagggcttgttcactttgatgccattttcaatcttaccaaattttgttaaagttgcaagaaaagtggctacatttagtttgttgccaaattttggtaactatataagaaatcctgctaaaattttggcaagttgccgaaattttggctatgccaaaatttggtaaggttttttttggcatcaaagtgacaggccctaagtaacacaggtccatactgcagtaaagtcacagtaattcaacaagcaatgttcactaattctcaagaaattccaaaattagctggacgatatatggcagtgtaaattaatctaatctaataaggtaagataagaacaagtatttcaaagcacaaagtcatgaattcttgccttcacgttttctagcttcctcttcctcacggagcctttggaggcgctgctcttctaagttaagatagtacattaacttccgcactgtatccctttcacgcttccttgatgatatcaattgactagtcctttcatccctctctttcttaagacgactaaactcagcttcacgacgttggacaattctttcctggaaaatgttctgcaagcaaaaagggcaatttaaaatatgtgcgaaggagagaagacagctgtctattccctgacaggaacaaatcgcctggtgtattcaaatgtctagtgctcaaatcatgtgaacacacacatagccaaagaagacatgccaatattagattctcagcaagtatagcacatattatatgttaaattaatctgtatctaatcagacctttgcacagataatatactaagtatttcaactgttatgcttggaattgcaaaacatggtttcggaaaaacacaggattaattacagtgggacatttggtccttcaattaactaaaaagaagatgaaatagtgcaagaatatctggtctgaatacagatatgtatttgcttaccttatgctccaacattcgagaaagtctgttcttctcctgcaggtcacctgcatggtgttgcttgctgagctcaatctctctctacaagaagagattaatagtgatttttgtgagcttaagtaatcatatgctattgtaatgtgacaatcaaggaattgtgagaaacaaaccagctgctcttgctcatgaaggattttctctacttcaaggcgtttttgaaaagcttgctcaattagaggtgcctcttcctgcctttttgccctctccaagtaatccatttgcttaccagtcttctgtagttttttctccatctcttggcgctccttaaactgctcattcatagccaattccatcacagcctccttagtaacttcctgcaatgaaaacattcaaagtataaagggcctgtgtggagaaacaaatattaagctgtaattggcttgggatagtacaactttatagttccgacttcggagaagacaatcaattcttaatatgaaacaagagtaggacactacagaatataaagattcaaatatcatctgcgttctgcgttcttgtagtctataatggttagccacaaaacataaaaaacagcatattagcacaccctctactactccactagaatttctgagcagttaagacaaaaaagaatcaatattggactgaacaaacagacataactaataagcatattgatgaaacagaagtcttcacaacaaatataatgccttacacaaaaagaaatatataatgaaatatcgagcaaatataaattgagcaatacattaaacagaaaaaaaaacattatcaacaaataactagtcagcgtaataaataaaatataatgattggaaactaattattctcaccccctgaaggacaggtttttttcctcctctctttgctatctcctttatctgtttctgaagcagttcttctgcctctatcttttctttttcaaccaattgtcgacggatcctctcctgttccctcaattttacatcattgagaagccttatcctttcatcttctgcagatttcttgagaacactcaatctctttttttcttcttccttttcctggaaaagagagaatatgacataagcagaaattcacagagttggccactttgaacagtaccaaatagacaccttttccaatatttggcgctcaagatcttctttgcgtttttcaataattgatttcctcgcaagaagacgcttgtgctcattctccactactgcagcaagactcgttaagttttcac

SEQ ID NO: 28640 - DNA, 764 bp, Oryza sativa
cgatcattctccaagcctaaggctgagttcgctatgggttgttcccaatagcacggaaaacggaacgatccattagcacgtgattaattaaatattagctatttttttcaaaaaaggattaatttgatttttttaagcaacctttgtatagaaactttttgcaaaaaaaacaccgtttagcagtttaaaaagcgtgcgcgcgggaaaacgagggagataagttgggaaaatggacgtccgaacacagaccgactagatactccattacacagcttcaccaaatcgcacatcgtagagacaagtgttgcatgagcagagcaagaaacatggcgagagataagcaatctgctttaatcgtcgcagcgttcgtactcctctgttcaggtaagcaccatggaatgatgcttggtttgatttgttttcaaaatttgcaatgtgctcaaatttgatcggttttttacttctttttttttttggttcctgtagggtgtttgtgcggagttgcagatggggcgaagggagggaggaagacgaaagggccggtgatcggcatcgacctcgggacgacctactcgtgcgtgggggtgtaccggaacggccacgtggacatcgtcgccaacgaccagggcaaccggatcacgccgtcgtgggtggcgttcaccgacgacgagcgcctcgtcggcgaggccgccaagaaccaggcggcgctcaacccggaccgcaccatcttcgacatcaagcgcctcatcggccgtaggtaaatg

SEQ ID NO: 28641 - DNA, 531 bp, Oryza sativa
tctccatgtccttcctagaaatttatacacaccttcaattccaccaatgctccatgtttttaaatctctatatacatcacatattctatcaactttctaaaataactagaacttcatctataatataaatacatacctcattaatcccataaacatttcatataaacaagataaaatcaacaccatattctaaaaccacctcatctaaattaataacatttcctcaacttttactcattttataaacactaacatttaaacctatatttacatcatccttcagtacataatgatctccaacttttatgacctttaaaaacatacaataaataaaaaaaatcaaactaaaaaacttttatcatgccaattaaataaaattataaatataccaaaacccaccttatcttcaaatacttttttttaatagcaatcaatcaaacttaaattagaatcttcaaaaacccatctgcctttaatatctctatattcaatatattcaacctattataatattaccttgtaaaaacacat

SEQ ID NO: 28642 - DNA, 7429 bp, Oryza sativa
gcaggttctgctgctgctgctgtgcttgctgatgcacctgctacaacacctgatggtgctgtcgctgcatctgttgcatcatcattgtcatcatctgagtctgattgtccaacacctgagcaatcgttgggttctcgggcggtggagatgaactgctgctagatgcatcgcttgcacgtgctccactgatctgctcttcgctgccactggcgttgttggattcccgggaaccattccttgtcttcaccatctgaagggggataggtagaaatatgagaaaaggaagaaaaacagggggctcagaatctaatctttcttataaatttaggtacaattatcttaattttgattaaaacaccgaaaaggaagcaaacaactcctaattaaggcagccataccactcacacatgatatcgaccgccgactaacccacaagcagcagacctaaacacagaaactagcaaacaacaaactaagaaagacgataaagctaagggcggcgactctgaagctcggagcggcgcttgcgatcggagaacaggtctgacatctaaagatggacaagggataggaaccaattcatgctcaaatccaaattaaacaaagcaacaaatgactcaaataaataacctagcatggctgatttttatgcatagaacatttttcgtgaactcaaatgaagatactgatgcaactggctaatcaataaattaatgcataaaatagatgcatagctataatgatacgcataaaattgccccatcgaacagagacacgacttagtgcatatcacccgttagatttccgactgactgtcgaataaacctcaaataaaattttactaaaaccctagactgagctaattttaaagatccgatccgaatgaactaccaagatttttcccgcaaaccaaagaggcaaaaccccaaattttcccgaaacaaatccaggtgcaaaaggcatatgcagatgaaaagcggttcagagggctcttaggtttccagttggcttgtcctacggtcaaggctggctctgttaccaacttgtcacgcccagaaattcacgaaccagaatttctaagaatttttcctgggattaaatattgcactttggtgatttttaattggttaaaattatttccaaggctctgaaaattccactaaaaatcttgttaatgcattagagcatggggaactcaagaaaaaatccaccacgccgaattcgattattaattgcatttattaattagggaattagctctatgttaatttgaacaatttcttcggacgatttatttaacaaatttttaaagcaaggaaaaaagggggaaacttcagggcgtgacattacacctccaccaatcagcctaacccattggcaccagaacagaggaaccttgagaggtccatagtaaagttctcatatgtcctcaatggcaccgtaatacgtgccagttgtaccatcgtgtcccatggcatccatacgaacagcactgttctggttcgtgctctttatgtcttgggctctcgtgtagaatgtgtacccatttatctcatatccttggaatgttgctatcaagccagatggtcccctcgccaggtaggcaagttgttggctaatcgtctcgttacccatgagatgttgtcgcagccacacgggcaatgtatcaatgtgatgccgtgtaatccatgcatcagacttaccgatgtttctggcaggaactagagccaagtgctcctcgatgtaaggagccaccaatgaagattgttgcagaaccgtgaaatgggctttacggaataaattgttgtctaccgtcattgctgcgttccttccgagagtcccctttccccgtagtctcccttcatggcgtgattcaggcactctgattgggcgaaggtcttcgataaattctacgcagaattcaatgacctcctctgttccataccccttggcgatgcttgcctctggatgagcacggttacgaacatacttcttcaaaacgcccatgtacctctcgaaaggaaacatgttgtgtagttacacaggcccgagaataccgatctctttgacaaggtgacaaagcagatgcgtcattatattgaaaaatgaaggtggaaatattaactcaaagctgacaagacattgcaccacatcattttgaagggcttccaatctatccggatcgatgaccttctgtgaaattgcgttcatgaaagcacattgctttgttattgttgcccggacattgtctggaaggataccccgaattataactggtagcagttgtgtcatccacacgtgacagtcatgagactttaggtttgtgaacttcttctccttcgtgcttattattcgctttatattcgtgaaggacgtccaagaattcccaatagggtaactcccaaaatatatagttctttttccacatcgccgcgtgaccatcttcgctatcaataggctggctgccaggcccctttccaaacactactttaagatctttcaccatagcaaacactgtttttccactgcgatgtttaagcttcgtacggtggtccgccttatgttcaaagtgattgcctttcttccgtacagggtggtttgcagcaaggaatcgacgatgacccatgtacgcaaccttcctacagtgcttaagatacgtactttctgtttcatctatacagtgagtgcaagtcttggaccacttattagactgccccgataggttgctaggtgtaggccaatcgttgattgttacgaacagcagcgctcgtaggttaaactcctcatgtttgtcctcgtcccacacggggacactttctttcttccacaacagtttcagatcttcgaccagtggtgttaggtacacatcgatgtcgttaccaggttgcttggggccttgaataataatcggcatcattatgtacttcctcttcatgcatagccaggggggaggttgtagatacacatcataacgggccaagtgctatggccgctgctcatctctccaaaaggattaatgccatccgtacttaaaccaaaccgtatgtttcgtgcgtccttaccaaagtctttgaatgttctgtcgatgtttcgccactgcgaaccatcggcggggtgtgacacagtatcccgtcctgttgatgttcttcagcgtgccaatgcatcattctagcatttccccttgctcctgaactaacgccttagccgtggtattatagggaaataccacatcaccttagcaggaattctcttcttcgttggctgcccataaacttcacatggatcatctcgtctaatcttgtatcgtagtgctttacaaacagggcatgcttttagattttcgtactcctcaccgtgatataggatacaatcattcggacatgcgtgaatcttctgaacttctagtcctagagggcagactatcttcttagcctcatacgttgtctcgggtaatttgtttccctccggaagaatgttcttgacgagtttcaataaatcgccaaatgtcttgtcactaacatcattttttgccttccattgcatgaactccagagtggtatccaactttttgtgcccctgctcggaacctgggtacaacgacgttctgtggtcctctaacatacgcttcaatttatgggcctccttttcactttcacagtcctccttggcgtcctacaacatctgaccaagatcatcgcagcgtcgttattgtcagcatccctgtccacctcgcccgtttgatttccttcaaatccagcgtactgagcccagtccggaatgttctcgtcttccacttcatcttcttccatctcaaccccttgctcaccgtgggatgtccaacaattatagcttggcatgaaccccgactaaaacaagtggaaatgagtagtcctgcatacagaatactccttctagttcttacacttattgcatagacaacaaataaaacccttatgcttgttagcttcggccactctcaaaaaataatgcaccctgtcgataaactatttggaccaccggtcagcgtacatccattgccgatccacctacatgaaatgaaaaaaagtcatacataaataaatattcataaaataatgacagccatacaataatgatcaaacaattaaaaactctttcaatagtcatacaataatgacatatcattattcatacaataattataaaataatccaacaaacaattcttatttattatttttgaatttttaaactaatattaatgttgtacttcttttaattttcaatttagtttgttttctatttttcaagattaattttcattatattttaaactatgagaataaaacttttttaagtaaacaaacaaaattcctatatattcttcttccccacacaatttgtttctctcatcaacttacgacaaagttttggagacaaaaaatgtgtgaaacatagctccaaaagtaatataacaacaaaaaacattggaggatgaagttactaaccttttagatacctccgatttgtatataatcaccaaaaaaattcacaagaaattttggcatgacctcccctcttttttggagaaaatttgaagcttgctcgggctggaggaggaagaagacacatataaagagggagataattagtcccggatgatgttatcatccagggctaaaaatcgccgagatctttagtccccgggggcctgacaaggcctaacatctttagaaccgagactaaagatgatcttaccaactgggattaaagatcatatatgcccgctgtagccaccaaccgggactaaagatgatctttagtcccggtttttagtggaaccgggaatattgtgaatttcggctgaccgaccaaagatggtttctccaccagtgctatgataagatctcttgtagtgacggcttgtttggttattagagaggcagtttgagacatacggcatacagtttcatactgtgtgcgtgccaagttggcaattggatcctagtagcagcaaattttgaaacactcaacccaacccaatccttcttctcttaatcttctcttcctactcttgtgtttgtgtgtgtgtgtgtaagaggctagtagagttagctagcctaaatttttttgcacgttgcagctactagctgtgctgctggcttgtcgtcctctgcttgaactttaaagagagagctaatagatcggtgatccgcttgggtttctggtgatcatatgcaacatggactagctacttggatttgttcaaaggatctgcttcttggatgctgtctgggcacgtcgccatgcatgcgaattttgcggatggagtcaaaagctgcatgcacggagctgatttaattaagggcatgttcagattgtagtcaaaataaaccttaccaagtttttggcaatgccaaaattttggcaggatttcttatgtattaaccaaatttggcaacaactaaacgtagatatttttttggtaactttggcaaaaaatgatttggttgaaaatgacatcaaagtgaacaggccctaattaacttgttgacagctactccctccattccaaaatataaggcataaccacccttaactcaaagatcaagaaataattattatcatcttatagtttgaatcatgctaataaatataatgcatgcatccaataggattagataacatgagagtaaaggatttaaaaaagtaataacttaatgaagaagatgtcatagttaattgcatgcttgcatacatgccttatattatggaacatctaagaaaagtggttgtgccttatattatggaatagagggagtagtacctaattaagcatgtgtgttaatttattattaactagtaatctgcccgtgctaacgctgcggcgacatttagaaatacaaattaagatcgatggatatagctattatgttgttaattaaattgccacatgcataaaataacatagttattatcctggttcaaatggagtcattagtgacaacataccatggtaaaagcaaaagtaattaaactttggaacttggcaccttgaaccatcaaatccttgtctaccatgctgtctccctgtcaccccccccccccttaattctaaattaaatggatgagagaaagagattaatatagtttagtgtgatagtgccaacacatggaaaatttagagcttctagttctctccttctacatctctcttaaatgtcggaccaagttcttatggggcccactcatcatacaaccatagccaacacatcatctgctcttctctcatttaaatcttcttttatttctcaaaaggtgagagaaaggtttaaattgaatttccacccaaaatgccactctaccactccaagccttctaggaaacatctatatatgggcctatttgtcgtccaaatacctgcaaacaaccttggtgaatcatctctttatcctaaattatattttcaaagagagaaagaaagagagagagggagttaaagtccaatttacacccaaacttcaccatacctctcatcttctcataggaaacatctaaatggggccactagacagccactcatacttggttgagtgaagtacaagtgggatcacagcctcaaaccactgccaactcctttaaatcgtttctacccctcatgttgacaactagctctcactttccaccttcacttttaccattcactactacaaccaagatttttgtgtgagggctaaaacgatttttgcgagcgggtaggcggcccgcacgcacctaggggtctaggaaaatgatgatttttgcgtgcgggtggcgcacccccacgggaaaacaaaaatccgaaataacataattttttttaaaaaaaacgaaaccctagaatccggcggcgggcttccgcccgatagccatagtgccggctgcctcccgccggcctccgcgccacccaccgtcggatccgcgctcccctccggctgcaacgtcgacgacgcccctcccctccgccggatctagggagggaaagaaggggagaggaggggagctggatcccacgcggggagaaggcggctggctgccggatccatgcggggacgaccgccaccactggattcttgcgttgacggccaccaccgttggatccgtgtagggactaccaccgcccgccggatcccgcgccctccaccgcagccacatggaggaggccggcgcgctcctactcccaccaccgccgcgccgctgctgtcgccgcgtgccgccgctgctgccgccatcgggaggagaggagaggagagtggagagaggagaggagaggcgtgagagagagagtactgagaagagaagctctgcgtggaaattttaaagtggaaaaagggatagaggggaggggagaggagagaaagaggggaaattttaaagtgggtgagagaggaaagagggagctagtatttttg

SEQ ID NO: 28643 - DNA, 2935 bp, Oryza sativa
ctcgtcggcgttcccggtgtccagagcgccaccatcgtcccactttgtcattcccgtcaactcgaatcatctccggctgtaccattgcgccactgacatcgcctaggtcccagcagaacgacgcccacatatgatgaagccaatacgccgccacgaacgctgttggtcgccgttgctctcctgctgcctctgcttctcttgccgccgagtcactgacatgtgggcccggctgtttagccacttcattaggtgctaaggactttaattagtagaaatttaaatcttgtaaggttctttttgtaaaattgctttgtttgccatgtgggtttatggacctaaatgcaattcacctaatgcccagggacctttttgtatagggtttagggcttaccctaaaacatgaaattactatttcatgcactcattacttgagattttgccgaagccaggagtttaatcatataaattagtttcattccaacttagttcccaactctagattagatagatggtttaattctatagcaaaacattagagttggctcatcctatagcttctatagtaatagttagccacaatcttgtaaatacccaattattttatgtaaagaaatttccattggagccttaatcaaatgtatgcgatgaagattcagattgttgaacctgtatcaatctactgatccaggggttgattgtcacgcccggaatttctatccaaaattccaaacgcttacatgtgcgttaaaccctcatccaggaatcagccgaggcacacaataacaaatgataatagagtactatcaaatatctaattaatgtgtgcaaaataaattattacagaggtggatagttcctctcaaagaataaagttctacgcagcggaaaaaaaaacaaaagactaaacatctatggcgactccactccacaagcaactcgacccgaacaaagcctaatcctcctgatcatcaccttcattgaagcactcctcctctgaagaatgaatattgcaagaatgagcatatgacatactcaacaagccacacagcaaatatgcaaatgcataggataacaaaggatggcataattaagctcattcgcataaacagcatttaataaacatttgagagaatagtaaaacagttaagtaattaagcaatattaaataaacactatacatcacacccatgttgcataggcccaaccttatctgaacaaccaacccctaggtgtacaaatcaaacctccaaactaggaaatataccattccaaaccaggagtcaatttagttatcacagtattttcattaatactgagtaatatgagactaatcacgaaaaatattgttagacccacccataaccgctggcatggctattcgaatagttttactctgatcagagatgtaccactgtacccacaagacacaactctacaacatgacacaactccacaagacacaactccacaacatgtcacaacatgtcaccacaaaaaggaatgtgtagcaccggaatcaaaaagcacagttgcgggtatagagttagtaggaaacgtacccaaaaccacatcaggtgtattctgggcttctgcggctgcaacatgattaacacgagccttcggtgctggagcattggagttgttctgaacaggagcattcttcacacgccgaggcttgggacacttatcagcataatgtcctggatcaccacaattgaagcacacccctggcttgcttccctgttccttcctgacaggatgattctgagttggagctgctacaggacgagtgaccatattacgattatcgttgctgcgattaccagtgttgttgttgtagaactggcgttgagggcgagcaactgaagaggatcctccctgtgggtatggtgcagcttgaggtcccaaagcaatgtgcggcctctggctactaccctgttgtgccttgaaatgagcagccctacgctttttctgttccatcctattatacttgtcttcttggcgaatcgccttgtccatcaactgctggaaatcccagtaatccatagccatcaatgcataagacaactcatcattcaatccctctaaaaacttctcctgatgttcttcatcagtgcgacatcttctggggcataacgagctaagcaattaaagtcatggaggtactctgtgacagaacgggatccctggttgagtgctctgaactctctcttcttaagggccacaacacctgatggtatgtgtgtcttcttgaaagcagcagcaaactcccgccaagtgataggctgtccctcggctctgtttagacgaaactggtcccaccacttagcagcaggaccatgcaactgatgtgaagcaaaggaaaccttctcctgctcagtgcactgaatcaaatctaacttcttttccacagcatgcagccaatcacctgcctctactaggttagtggtgcttgagaaggtaggtggtctcacacgtagaaaatctgccaacttgttctacggaggtggtggttgattgttgttatttgcctgttggttctgcgcttgctgcactaacagattaatcaactcggtttgctgggccaaaacttgggcaagtgtgggatctccttcattgtgaccatttccacttccacttccacttccagtgcgggtgttcaccatctgaagaaaagcatgggcaaaaggaaagaacgacagagagatacccttagaacggagaactttaattaatttaaattctatattgctcttaactgtgtatgattacatttaaattgaattaacactatctcaccagctaacttactctctgacaagcaaaagaactaaactcatgtagttacatcccaccattgatgtaagcaacatgctaaacccacacacggacaagcaatcttaagctagcaaagtaacacagcgaactacagcaa

SEQ ID NO: 28644 - DNA, 37547 bp, Oryza sativa
  unsure (1)..(37547): unsure at all n locations
ggcggatggggcggcatataaaggaacattgaaaggaaggaattaatgcatatttttaagttagctgcacaaactagacttaattaaattggacccaaagaaaaagaaaataaaagaaaaggagcaaacatgactcaatttttttttctttttggaacataaatcaaccttgaacagagacaaataacttttgacaaatgaataaattaaaactaaaatatttaggatctaccaggagcacggtacagagtcaccattaacagggatgagtagtactgatgccatcttgattgaatcgataccataatagatgtacagtgccgactaaccaatgaaattcagaaaattatactatttaataccctaaacagtaaagttctttttctttcaaaataaaagaacaaatttctgttttgctaaattagaatttaataaattttgtacataaccttgcatgtggtgccaacttaattaatttataagagaatagagaagagcagttctattttccaaaataatttgaaggaaacttaaggtttaccatttggcttgtcctaaggtcaaggtggctctgataccaacttgtcacgcccggaatttctatccaaaattccaaacgcttacatgtgcgtcaaaccctcgtccaggaatcatccgaggcacacaataacaaattgataatagagtactatcaaataattaattaatatgcgcaaaataaattattacagaggtggatagttcctctcaaagaataaagttctacgcagcggaaaaaaaacaaaagactaaacatctttggcgactccactccacaagcaactcgacccgaacaaagcctaatcctcctgatcatcaccttcactgaagcactcctcctctgaagaatgaaaattgcaagaatgagcatatgatatactcgacaagccacacagcaaatatgcaaatgcacaggataacaaaggatggcataattaagctcattcgcataaacagcatttaataaacatttgagagaatagtaaaacagttatgtaattaagcaatattaaataaacactatacaacacacccatgttgcataggcccaaccttatctgaacaaccaacccctaggtgtacaaatcaaacctccaaactaggaaatataccattccaaaccaagagtcaatttagttatcacagtattttcattaatactgagtaatgtgagactaatcacgaaaaacattgttagacccacccataaccgcgggcacggctattcgaatagttttactctgatcagatatgtaccactgtacccacaagacacaactccacaacatgtcagcatgcgcctcagtaccaccacggtaccttggaaaggaactatgacaatacctctcacacaacacaactcaccacattgcaccgttcctgatcataatctccccctcataaccaggggcaatggactccctcgcgacccccacggacttctcgccgcttcacagtctggcaccccgtaatgaatcatgctatacaaaaggtaaagccgttgcccacgctggcttgtggttggcacggtaaatgtttcacaacagtagctcgtgaaacggtccttaattgttatgagcacgaccatcaaaaccatgtactcacaacccactttaatcaggtttatgtatcaattaattatcataacacgattaaccatcgtgagctaccactaaatataaccataagtaatatccttatatgattaaccccattaatgagctaatgtttctaagcatggctaagcaattatacctatatagcacctagctaaaccaaaccaatatataaggtccaagctattcaatttattacccatagaaaaataaagtcattgtcggccattaattaactgggaaaggctcaccacccgacgacattcgaaaataatgcataagttgaaataaaacattagctttaaacaggttcaacatgctcaaagggttgtttcagatctgtgtgacttgccttgagcttattcaaacacttctgaaccttcctcaacgtaaacgctctcctccggaatatcggaaactaaagcaaataaacaaaatcaacaaaacagtaaaaaaacaagcataaatagtacatgtggatatttttaacaagtagatcttgattttagatgaatttagcaacttgaaccactcgaatccgagttacgatgatttagttatgaatttccgaagtttaatcgattttcaacgaatagaaaaaactaataaaaaggatttatgacgtcatcgatgacatcatcgccggccatggtacggctccacgcgaccaccggcgatagagagctcggttgggctatccggggacacctacgagaagaggacgacgacgcgaactcatcggtgcaagaaactacgacggacgacgatgtacggcgaccggcgatgaggacgaacggcagcgcggctcgggtcgacgacggcggcggcattccagcggcttgcgacgacggcgaaggggtggccgaggtactcctccaccgtgcgaacccggcggcggcgacgctagcggcggtgtggcgcgactggatagtcgccggcgacggcggtggcttgagctacgcggcggcagcgctacgagcaacggcgggactcgggacttggggcaaatggaagaggacgactaggggatgctttatataggcttggattagagagatcggactccaaccgagaggaatcgagctgggaaaaactagggttagttttttttaccaggaaaactgccagggctttgcccaacagtgtaattttataaataaagaaaatatttacaaggttacaaatattacatgcggttcacacagagatactataaggtttgtacccaattaaaaacagtttgctttaaaggttcattcattatgcacatatgcagaagaacttctttgacgaaaagagatctccatgcctgaaaagagggttggatgttctgaaatatgaagccatttctttgtttccagatgtgccaagctgccaaaaagaaaatttccaggaaacccttgtgagcaaatttgattcttgctagagagatcatttggaaaaactccaaattgttattccactcaattcctaggtattgccaacacctgatgctgaaagggcataaaaagaagaggtgcagtcttgtctctctgcagttcgcattgcacaaaacacatgtgagatcatcttctttggtacaatgtcttctatccagcatatctcttgtattaagtctatcacagaacattagccaggcaaagaccttgatcttcatgacacattttgttttccatagccaaatcatgtgtctggggggttgcaatgcagaataatttcttagcagtgtacttatctgagccccagataaaattccaagcatcccccatccctgattgtaagttcaaggtgtccagaaccccctgaagttgcaagaattctgaataagcctcatccgagagggatagagcaaaagaatcttctaggggtagctggtagacatggccttgactgaatcagacttatacaaagtcacagcaaagagattggggtagctggtgcacttaaaatcatcattccatagatcattccagaaaagggcagttcttcctgtcctgatttcacattttgctatccccctgaatatgtctgcaagagttgtgatgtccctccaccaaaaagaacccttattcatcgtcaggtgtggaactttagaaacatagtatgattgtgagattaatttcacccatggtaaatcagcaccattatagaacttgatcatatgctttaggagaagggctgtgttttgaactctcagattgatcactcctaagcctcctttctccttaggcatgcacaccctatcccaggacgctagagatttccttgtcgaagaagggttattacctctccacaggcaattcttacgagctgtgtcaatgaccttgatgactgtaactggtagctgtagtgaggacatgtaataggttgggatagaggacaggactgagttgatcaaagttaatcttcctccttgcggtaaaaaaattgagcttgccgtcagcctcctttcaaccctgtctaccaatgtagcaaatcaaccactctaggcctggtggttcctaaaggtagccccaaataagtgaatggaagagaaccgatcttatatcccaagacgccagataataagatagctttgtcttgagacatattaagtggatacaggcttgatttattatagtttaccttgaggcctgtggattgagcaaacatatttaaaatagccttgaaacagaagacttctttctgagatacttttaacaagatcaaagtgtcatcagcatactgaatgattgggaaaccatcctcactgctttcattaattggttttgacaaaagtccttgatgaaaagctttattgattattctttgcaacagctctgcccccaagacaaaaagcagaggtgagagaggatccccctgtctgactcctcttctgcatttgaaagtattccctggcaccccatttaataacacagcagtagaagcagtagagaaaaccatctgtacccactcaatccattttggagaaaaacccatatgttgcataactgagaaaattgcagaatgctcaatacattggtgaatatattcaaaagaccaggtaagacaatcctgtatggtttttcctttgatgaaaccatattggttatcactcaccagtgtaagaattaccccttgaagtctatcagctagcaatttagttaagattttaagactgatacccgtaagggaaataggtctgaaatcattaacagtctctggggaggttttctttgggaccagggttatgaaggaggtattaaggatttccaaatcaacatttccgtcagtcgataatagtcctgagctatgataggccaacactttttcatgaaaaatccattgaaaccatctggccctggtgctttgtcagctggaataatagagatgagactatctacttcttgagttgaaaacatgtcaaccaagctactcaagtctatatgtctgccaaaaagggagtccaagtcaaaagccatctgtggggaattagatacactcaacctattctgaaagctgcgatgaaacaatgaagccttctgctcatggagatgtagaatctgtccatcatgatcaagcacctatgagatagtgtttattcttaacctttctatggctattgactgaaagaattttgtattttcctcccccaacatcatccatctactagtacacctctttttccaatagatcttcctgaattccaatagtttcaaaatctataccttaactatttctctgaaattccactcatagactgatagcattctgttttcttcaactaagtcaagaaagtccactactttgttccaattttttagcaatcccatcaactttgacagattcttactccaggcaaggagctttttcctaagcactttcaatttgaaagaaatgcaaactagggttagtttggagagataaactcaaaacgaattcgatttggttgatccgggcaaaattgatctccgaaactctaggggaaaaggaggagatgatttcccctcaagcaatcggactcgggggcgaccggttgaggaggaatcggaggagaggctgcggcgctcgggctcagctcggcccggccggaggtaggggatgaccccgacatgagggccccatatgtcgacggctagaggagaggaggggcggctcagcttggattgggccggcgtgggccgcacggctacgcgcgagggagagtgatgttgggccggaaacggcccaacgggctaggggaggattttaaagactttttcaattaaaataattcgtgaaatgatgtttcatttattaaaaatacttcccttgctcaaataattcccagaaaaatctagaaaatagataaacaagcaaagtatttaataaaattttatctagctcaattttatgttgaaatttttcctagattattagagtttaacttgtaggttttaaaataatttctaaaaatgcattgaaaactgaattattaaattaggctattttcagggcgtgacattgatatagtttaaacatgtatgttaccgaatctttaattttaggacccgacaaggtgtgtgggtgggggcccctgcgatttgggagcctagagcggctgtaccgctccccccccacaccaagcttgccctgactacatgggccttgaaaggccacatggcatcttatgacgatttctgggcttgatggcgacgaaaatggacgtcatagactctatgacgacagaaggatcgtcactagattagtaacaaaaagataagctttctttatagaacgccattagagacgcatgataggtaacgaatgatattcgtcacacgaatgtcatagatttcacaacatggtgaatcatctatatatgggcctatttgtcgtctaaatacctgcaaacaaccttggtgaatcatctctttgatcgtaaattatattttcaaagagacaaagaaagagagagagagggagttaaagtccaatcttgtcacaccctgaaaatcccaaatatataaattgttgtttaattagaattattagaaataattttaaaagcctagaagagaagatctaattttaaataaaaaattccaatataaaagtgggccagataaaattttattaaatacttctcttgattctatagttcctagatttttcagggatttatttgagccaaggaactatttttaataaatggaattgcatttcatgaataatttaaattgaaaaagttttaaaaatcctccttttggctttgggccgaaagttggcccaaaaccctttctctctctccctcagcccagtcggcccagtcagcccgcagccacccgcgcgcgcgccctcgcccgctgacaggtggggcccacctgtcaggcttcccgagccgcgccgccgtctccttccaaattcgatcgcgtctttccttctccggtcgaatcaatagaggggaaatgatctccgggacctcctctaccttttctcttttggaatcatcgtctaattttgtttggaaagcgccagattcgatctcgaatcggattcctctctctctcccgccgaaccctaatttttccatcgccgtcgccggcagccatgggcctccaccgccgcccctagcccctttataagaacccccgagacctcctctccacgctgccaccctcgccttagctcgcgccgcctgtagcgccgcctccgcgttcaaccgtgcgccgccgtcgccgccgcgagttcagccgagcaccgccgtcgctccagtcgtcgtcgtcgctcgggaaggacaccgtcgggatcaccaggtcatcgccgaggatcgccggaagaccgccgtcgtcgtcaagccgaccgtcgccgccgcttcttcctcgtcgtcgtcgtcgtccggtcgccgtccgccgccgttcgtgcctcggtaaggatcgccgcgtcacccgctacgtgtagatgtcctccgtttgcgccgccgcgccgtcgttcgccggtgagcatccgtgtccgagccgccgccggtgatgacatcaccgctgatgtcagcgctgacgctagccgtggaccggcggtagatcgataagatctcggccgttcgttttggataggatatatctcggccgttcgtttccgtagaccgccgccgtgcacccggtccatcgtgaacccgagccgctgacgcaataatccctttttccttttcaaaaataattcattattgcgtcataattcaattaaaatctatataaatgatttaatccgatttaaactttgaaaattcataactaattcatcttagctcggatttagttggttcaagtctctaattttttctaaaattgagatctacgtgttaaaaatatccgcatgtactgttcatgcttgtttatgtgctgttttggtgattttgctcttttctctttagattccgacgttcccggagagtccgaatttgcaggagaagactttgaagagttccaaggccagcaaggcaagtcacacagatcccaaacaaccctttgagcatgttgatcccgtttaaagctattgtttctattcaactatctacctctgtaatgacattatattcacttattaattagagttataattgtactctattatcaatttgttattgtgtgcctcagttgattcctggacgagggtttacacacatgtaagcgtttggaattttggataaaaattccgggcgtgacaagttggtatcagagccacctagaccctaggttatgccaaatggttaccgatagaagccctctaaaaatattggaaaagtagaactgttctcctctctttctcttttaattaaaccaaactaatggcacatgcagtttatagtctcttttaatggttctcattcaaaatttatttatgattcctgtgttgttagtactgtacatctattactgtactaatggcccatttaccagcaaaagtttcacaacattgatttatttaatcttgctgcaatgaaataagcttagcatgttgattttataactttcttttattttatttcttttgaaactcgttattaaaaagtgcaaaatttctaatcatgttttcaactgtttcaacttatcttgcaagattggtttactttatttatttaccttttactttgattttctaactttaatttaatccaaaaacttgtgctattaattggataaatgtcttaactctgtcctttcacttgtctttagatgccgcgctacaagcctgagtacttgtttggcactaagggatttgtccaggagttgcgtacgatgtcctttgccataggatttgggactgctcctttgtatgcccagattcctcatgatcgtgatgaagagaagtgccgtgtcaaagtcaccttgaacagtaatcgtgaagatatcccatcggtgatgttcgaggctggttggggaagctacattcatgcttgtcaggaggtggcaaggatcaccataggagagctccgcgaaagctacaatgatcggttggccaacactaagtatcgctaccatcctcgccaaccccagggaagcgatcgtggcagctaccttgaacctgcagggattgagaatgatgctaccacaaggcatttggttgagatgctgtgggccatggatgagacccgcgctgagattgtgatagcagctcaagatcgtgaagacaggaatcgcggcaagatctgcaagctggaggacaaggtggatcatttggagaaggaactagccgcattgacgggagaagcaccaccgaaaaaggccagggtttgtcttaccgcaaggaagagagctctattcgttcctcgctaccagttggcgccaaaggttcgtgtggtggaaaaagaagctaccccagccccagcggatcctccggtcgtcaacgtaagtgatgatgatgaagaagaatccaagcgcacccatttaaaggtcgagtggggagctactcaagatgatggggacgcgccgaacgagccttcaatcaactccgatgcccggaagacctagaacgccttgtcaagccgttgccttagatcgttgtgttagtttgcttgtttaagtttggttgtgtgtgtgggtcttgcatgtgatttacatcattggtgggatgtaaatgcatgcgtttgtttgctttcgagtgattaggtagttggtgagttaagtggtgtgagagtcttcagttttgtaataatgaaactcagttaagatcaataaaagtcaagctagtaaaaaaaaattaatttcctgtcctaagtagttttttcccctgtttctctttttgtgctcctgtctatgccagatggtgaatactcgcagcactgggaatggccccaacaacaacaacaacaacaatggagagaatcccacgcttgcccaagtcctggctcaataggcacagcttatgaatatgatgatgcagcaactccagaaccagcagaaccagggaaataaccatgcacctccccagaacaagctagcagaatttcttcgtgtgaggccgcccactttttctagcactaccaatcctgttgaagctggtgattggctgcacgccatagagaagaagttggacctgcttcagtgcactgatcaagagaaagtctcctttgcttcacatcagctgcatggccctgcctctgagtggtgggatcacttccgtctcaacaggactactgctaaacctatctcttggctagagttcaccgctgcttttcggaagacgcacaaaccatcgggagtggtgtctcttaagaagaaggagttcagagagctcactcagggatctcgctctgtcaccgaatacttgcatgagtttaatcgccgggctcgctatgctccggaagatgtatgcactgatgaagagcgtcaagagaagttcctggaaggactgaatgatgagctttcttacccattaatgactggggattatcatgatttccagaagttggtgggtaaggctattcgccaggaggacaagtacaaccgtatggagcagaagaaacgcaggattgctcacttcaaagctcagcaggggaatagtcagaggccgcgtcttgcttagggacctcagtcagtacccagggaggttcttcgtctgttgttcgtccgcagcgtcagttcttcaacaacaatgctggcaacaacaaccgcaatcaagctccacgtccggtggcaactccgacacagcatcagcttgccaagagggagcaagggaacaagctcggagtgtgcttcaactgtggtgaaccaggacattattctgactagtgtccgaagccccgccgcgtgaaggttgtccctgcccagaacaactcctccgcaccagcgacaaaggctcgtgtcaaccatgttgctactgcagaagcccaaggtgctccagatgtgattttgggtacattccctgttaattcagttcctgcaacagtgcttttcgattctggtgctacacattcctttttatctatgagttttgcaggaaatcatgggatggaagtagaagatcttagacgtcctttgatggttagtactccgagtaaccaagcactctcatcgcaacgtagcccctctgtcagaatagagattcaaggagtaccatttctggccaaccttattctgttagaatccaaagaccttgatgtcatcctagggatggactggttagccagatataaaggtgtgatagactgtgccaatagaaaagtaactctcaccagcaatgacggtgaagttgtaactgttcatgcattgtcctctgaacctctaaggtcaagtctgaaccaaataacgttggaagagattcccatagtacgggagtacccggatgatttacctggtatgccgcctaaaagagatatagaattcagaatagatctggtaccaggaacaactctgatccataagagaccttatagaatggcagccaatgaattaacagaagtcaagaggcaagtagatgatttgctttagaaaggatacatcagaccaagttcgtctccatggggagctccagtcatctttgtggaaaagaaggaccatacccagaggatgtgtgtggattatcgtgcactaaatgatgtgaccatcaagaataagtacccgctgcccagaattgatgatttgtttgatcaacttaaaggtgccaccgttttctccaagatcaatcttcgatcagggtatcaccagttaaggattaaaaaggaagatatacctaagaaggcttttaccactcggtatgggttatttgaatgtactgttatgtcttttggacttactagtgctcccgctttcttcatgaacttgatgaataaggtgtttatggaatacctagacaagttcgtgctggtctttattgatgacattcttatctactcctgaaccaaagaagagcatgaagaacatcttcgccttgcactagagaagctacgagaacatcaattgtatgccaagtttagcaaatgtgagttttggttgtctgaagtaaagttccttggtcacgtcatctcagccggaggagttgccgttgatcctagcaatgtggaatccgtaaccaactggaaacaaccaaagacagtttcagagattcgcagtttcctgggtctcgcaggttattaccggaggtttatagaaaatttctccaagattgctaagcccatgacacgactgcttcagaaagacatgaagtgcaagtggtcagaagagtgcgagcagagttttcaagagttgaaaagtcacctaatatcagcacccattttgattttgcctgatctaaagaagggtttctaagtgtattgcgatgcatctaagcttgggttaggttgtgttctgatgcaagatgggaaggtggttgcctatgcatctcgtcagttacgtccgcatgagaagaactaccctactcatgatcttgagttagctgcagtggtacatgcgttgaagatttggcgtcattatcttttcggtactcgtatagaggtgtacaaggatcacaagaatttgaagtatatctttacccagccggatctaaacatgagacaacggagatggttggaactgattaaggattatgacatgggaattcattatcaccccagaaaggctaatgttgtagcagatgctctcagcaggaaaggctactgcaatgctacggaaggacgacagttgccatgggaattatgcaaggaatttgaatgattgaatctgggaattgtcagtagaggtttcgttgcagccttagaagcgaagcccactctcattgaccaggttagagaagctcaaatcaatgatcctgatattcaagagattaagaagaatatgagaagaggaaaagctattggatatttggaagatgagcaaggaactgtatggttgggtgagagaatctgtgttccaaagaacaaagatttgaaagatgcaattctgaaggaagctcacgacactttatactccattcaccctagtagtactaagatgtaccaagacctaaaggaaagattctggtgggcaagtatgaagcgtgagatagcagagtatgtagctgtgtgtgatgtttgtcagcgattcaaggcagaacatcagaaacccgcaggtttgctgcaacctttgaagataccagaatggaagtgggaggaaatcggtatggatttcatcactggtctacccagaacgtcatcgggccatgactctatttgggtgatagtcgacagacttaccaaagtggctcatttcatcccggtaaggacaacatattccggaagtcgctaggcggaattgtatatggcaaggattgtgtgtttgtacagtgtgcctaagaaaatagtatccgatcgaggtagtcagtttacttcaaagttttggaagaaacttcaggaagagatgggttctaagctgaacttcagtaccgcttatcatccgcagacagacggacaaactgaaagggtaaatcagattttggaatacatgttgagagcttgtgctttagacttcggtggaagttgggataagaatctgccttacgcggaattctcgtacaacaacagttatcaagctagtcttcaaatggctccttatgaagcactgtatggtcggaagcgccgcactccgtttttgtgggatcaaacgggagaacgtcaggttttcgggactgatatcttaagggaagcagaagagaaggtaaagatcattcaagaaagattgcgtatagctcagtctcgtcataagagttatgccgacaatcgccgcagagatttaagttttgaggaaggagatcatgtgtaccttcgtgtcacgcctcttcgaggggttcatcgttttcacaccaaaggaaaattggcaccgcgttttgtgggaccttataagattgtcagtagaaggggtgaggttgcttatcagttggagttacctcaatccttggcaggtatccataatgtgttccatgtgttacagctgaaaaagtgtttaagggtacctactgaagaagctaatcttgaacagatagaagtccaagaggatctgacatatgttgagaaaccaatccgtatcttggagatagatgagagaagaaccaggaatcgagttatccatttttgcaaggtacaatggagtaatcactcagaggaagaatctacttgggagcgagaagatgaactaaagtcagctcatccgcatcttttcgccagttcttccgaatctcgaggacgagattctatttaaggggggtaggtttgtcacaccctgaaaatcccaaatatgtaaattgttgtttaattggaattattagaaataattttaaaagcctagaagagaagatctaattttaaataataaattccaatataaaagtgggccagataaaattttattaaatacttcacttgattctatagttactagatttttctgggatttatttgagccaaggaagtatttttaataaatggaattgcatttcggcccaatgccaaaatgaggatttttaaaactttttcaatttaaattaacgcgcgcgcgccctcgccgctgactggtggggccggcttcgtctacctcgcaccgccgccgcagccgaaccctagccgagccgcgccgccgtctccttccaaatttgatcgcgtctttccttctccggtcgaatcaatagaggggaaatgatctccgggacctcctctaccttttctcttttggaatcatcgtctaattttgattggaaagcgccggattcgatctcgagtcggattcctctctctctcccgaaccctaatgtttccatcgcagtcgccggccaccatgggcctccaccgccgcccctagcccctttataagaacccacgagacctcctctccctgccgccaccctcgccttagctcgccgccgcctgtagcgccgcctccgcgatcaaccgtgcgccgccgatgccgccgcgagttcagccaagcaccgccgtcgctctggtcgtcgtcgtcgctcgggcaggacaccgtcgggatcaccaggtcgtcgccgtcctcgtccacccctccgtcatcgccgaggatcgccggaagaccgttgtcgtcatcaagccgaccgtcgccgccgcttcttcctcgtcgccgtcgtcgtccggtcgctgtccgccgccgttcgtgcctcggtaaggatcgccgcatcgcccgcaacgtgtagatgccctctgtttgcgctgccgcgccgtcgttagccggcgagcatccgtgtccgagccgccgccggtgatgatgtcaccgctgacgtcagcgctgacgctagccgtggaccggcggtagatcgataagatctcagccgttcgtttccgtagaccgccgccgtgcacctggtccaccgtgaacccgagccgctgacgcaataatccctttttccttttcaaaaataattcattattgcgtcataattcaattaaaatctatataaatgatttaatccgatttaatctttgaaaattcataaataattcatcttagctcggatttagttggttcaagtctctaaatttttctaaaattgagatctacatgttaaaaatatccacatgtactgttcatgcttgtttatgtgctgttttggtgattttgctcttttctctttagattccgacgttcccggagagtccgaatttgcaggagaagactttgaagagttacaaagccagcaaggcaagtcacacagatcccaaacaaccctttaagcatgttgatcccgtttaaagctactgtttctataaaactattgcatttattttcgaatgtcattgggtggaaataacctattgccttgttatagcccttttgctattgattccctattctttgtcacttggttaataatttgattagctagaacattatatggctttagctaaagtgaataggatgcttagccatgcttagagacactagctcatataaaggggatactcatgattcactattatttaatgttggtttaatgatagctcacgatggttaatcgtgattggttaattaattaatttgccaactaaaatatgataatggtgggttgtgagcatatggttttgatggttgtgctcatgacaattaaggaccggttcacgattttcggttgtgaaacatttaccgtgccaaccacaagccagcgtgggcaacggctttactttctgtatagtatggttcattgtagagcaccagactgtgaagtggtggagataagcccacgggggtcgctggggagtgcactactttgaattgtgttatatagagggtattgtcacaatctctattcgggtacttgttaagtatcacgacgcatggttgacatgatgttgtggttgtgtcttgtgggtacagtggtagacctctggctagagtttaaactattcgaatagccgtgcccgtggttatgggcgggtctaacaatgtcttttgtgattagtttcacacttctcaccataataaatgatgctgttaataatttgtttagctcctggtctggaatggtatattcctggtttggagatagaactgtgcagccgggattggttgttcagaatggttgggcctatgcaacagggtatgttgtatagcgttggattaatactgtttaattaatattctactgttttattaaattctgaaatatttattaaatgctatttatgcaaatgagactatactatgccatcctttattatcctgtgcacttgcatatttgctgcgtggcttgctgagtatgtcatatactcaccttgtaatcattcatcagaggaggagttctacagtgatgccgatggtgtgtaggattacgcgtagccctggtcaagctgcctgtggagtggagtcgtctgcgccgtttatcttattttccgctgcttagaactttattgattgagagaaactatctacctctgtaatgacattatattcgcttattaattaaagtaataattgtactctattatcaatttgttattgtgtgcctcggctgattcctggacgagggtttacacacatgtaagcgtttggaattttggatagaaattccgggcgtgacaaatttacacccaaacttcaccatacctctcatcttctcctaggaaacatctacatggggccactagacagccactcatacttggttgagtgaagtacaagtgggatcacagcctcaaaccactgccaactcctttaaatcgtttctaatcctcatgttgacaactagctctcactttccaccttcacttttaccattcactactacagccaagatatttgtgtgagggctaaaacgatttttgcacgcgggtaggcggcccgcacgcacctaggtgtctgggaaaatgatgatttttggcgcaccaccacgggaaaacaaaaatccgaaataacataatttttttaaaacaacaaaaccctagaatccggcggtgggcttccgcccgacggccatagtgctgccggcctccgcgtcacccgctgtcggatccgcgctcccctccggccgcaacgccgccgacgcccctcccctccgccggatctagggagggaaggaaggggagaggaggggagctagatctggcgctgggagaaggcggccggctgcgggatacatgcggggacggccgccaccgctggattcttgcgttgacgtccaccaccgttggatccgtgtaggcactgccgccgcccaccggatcccacgccctccaccgcctccacatggaggaggccggcacgctcctactcccaccgccgccgcgcctctgctgtcgccaccacgccgctactgtcaccgcgcgccgccaccgctaccgctgtcgagaggagaggagaggagagtggagagaggagaggagaggcgtgagagagagaagactgagaggagatggtctgcgtggaaattttaaagtggaaaaagggatagaggggaggggagaggagagaaagaggggaaattttaaagtgagtgagagaggaaagagggagttagtatttttgcatgcggctctcttaataggtccgcatgggaaaatcggctcattttcacgtgctgtccatttaaggggaccgcatgaaaaaatcgatttttcccataagcaacgagttgccgcacggaaaaattgatttttccgtgtcgtcctcttnaatggacggcntgngaaaatgagccgattttcccagaagcaacgagataccgccctcacggaatctaaaaggtccctatccaggaaaatcgtttctatagtagtgattcatgaagttccttctctacttgatcgatccattttctttgtttcttttttggcatagatcgaacacttggtggtgcgctcgtcggcgttcccggtgtccagagcgccaccatcgtcccactttgtcattcccgtcaactcgaatcatctccggctgtaccattgcgccactgacatcgcctaggtcccagcagaacgacgcccacatatgatgaagccaatacgccgccacgaacgctgttggtcgccgttgctctcctgctgcctctgcttctcttgccgccgagtcactgacatgtgggcccggctgtttagccacttcattaggtgctaaggactttaattagtagaaatttaaatcttgtaaggttctttttgtaaaattgctttgtttgccatgtgggtttatggacctaaatgcaattcacctaatgcccagggacctttttgtatagggtttagggcttaccctaaaacatgaaattactatttcatgcactcattacttgagattttgccgaagccaggagtttaatcatataaattagtttcattccaacttagttcccaactatagattagatagatggtttaattctatagcaaaacattagagttggcttatcctatagcttctacagtaatagttagccacaatcttgtgaataccctattattttatgtaaagaaatttccattggagccttaatcaaatgtatgcgatgaagattcagattgttgaacctgtatcaatctactgatccaggggttgatacagtttaaaaatgtcggttacccaatctttaattttaggacccgacaaggtgtgtgggtggggccccctgtgatttgccagcctagagcggccgtaccgctcgcgccccctccccccagagccggccctgactacatgggccttaaaaggccaaatggcatcttatgacgatttctgggcttgatggcgacgaaaatggacgccatagactctatgacgacagaaagatcgtcactagattaatgacaaaaagataagctttctttatagaacgccattagagtcgcatgataggtgacgaatcatattcgtcacacgaatgtcacagatttcattgcatgacttaaaattcaatttttatgacgtaaatgagcatcacctatcataagattcttggctatttgagaggcagtttgcagacatacagcacacagtttcataccgtgtgcgtgcctagttggcaactggatcctagtagatgcaaattttgaaacattcaacccaacccaatccttcttctcttaatcttctcttcctacacttgtgtttgtgtgtgtgtgtctaagaggctagtagtagagtagctagcctaaaattttttgcacgttgcagctactaactgtgctgctggcttgtcgtcctctgcttcaacattaaagagaaagctaatagatcggtgattcactttggtttctttgatgctatccagccacgtcaccatgtatgcgaattttgtggatggagtcagaggctctgcatgcacggagctgatttaattaattaacttgttgccagctagtacctaattaagcatgtgtgttaatttattattaattactttgctagtgttaatttatccttagtttttttattccaaactactagcatgcatgcctttgtcagagagagaaaccgatggaatatcctcgtttcaaaagtccatgcataatgtgcatgctgtgtggattcgtgctgtattttcctgggtagataagaccaaaaaatcccacttaccaactaggttttttaaaagtctggtacatcgtgaaccatactgcttcacgtggtcggaactatatacgttaagatcaaatgtgctcaacgtggtctggcacatcatggaccatgctgtttcatgtggtcggatctagatgcattaggaataatccttttcgtagtagtgaaactaaagaacttcacttgcgaactacttcctccgttttacaatgtaagtctttctagcatttctcacattcatattgtttctaatgaatctagatagatatatatgtttaaattcattagcatcaatatgaatatgggaaatgctagaatgacttacattgtcaaacggagggagtagtttttgtagagactgaacaaagatgaaactttttggaaaggtgctcctgatgaccaagttcaattcaccaactgaaatcgcacactggatttacatgaaaaatgcgagatagacaaaaatgatttctttcggttttaaattaatactcccggccatttgggaggagcaatatgtacatatgcattcatcacacttcaggttttttgtcttttttttccttggagttgtaagaatgctcataattagggcatgcaagttgatccattgatatattcgcaatatttgacgatttttttttcattttaaaaattgttgacgatattagcttaattttggtatggaaaatatcggttaatttatctccaatttttatcaagagagaaaatgaaccatgagagttgaggtgcgaattaaccacaagcaaatattcattttaatttgtggtatatatatatacacgagcatgcatgtaaagatggaaatatgtgaaaaatacaatggtgctagtagatttgtctaaaacacttccataatactatgatcaggacactcgataaggacaaagttaaattttagggattgtgtcattatcaaaattatcaatgaataattggccagagggccgggattagcatgggtctactactgtcctgccatttcattaattaattagattaagtccccgattgcttgcatccctaattggcctacgagaaccgacaaaaatcgcaagatgggaggattgtggtaggttatcttctccaactgtgcctctcaagtggccataacatattagccagaaggataaataatcatcaatctgccttcacagttttgatcatctcatgagacatatatataaaccacccattagcaagagtctcctaggtgaattaattaactatactgatacacatatacttaattggtataagaaaattagtggtagttaattagtataaaagcatcaatcaaatggagactattagctagctaggagaccgggcaagcaaagcaaagcattgatcttgactaggaatcgtgcacgtacaaggcacgtataaaaaaaataagtataaaatgtaaactacatataaaaattaggaagtgtgataaaatgtcataactgcataatttaccaacgtaacagccaaaaaaattaaaattatctcagtgcaccaataacataaacaaaccaaactttggtagatatatattaaaaaattgaggcacatcacagattgaaattagtcaacaagttcagggaatgaactcagaaatgaaccggtaccacctagaatattaagttcaggtacatccccggataagatcagaaaatactatagcaaatgttccaaattttgtttctgaattctccttaatccacatgaattgtccttaatacaatccaggataagatcagaaaacaagacctctcttacaagcaataacgcatatattatttgtcaagacaaagccaagtgcataatccacatcaggttatcctctagatgatactccagccatgctccctggtcctccaaaaacaaccaggttcaatagtccaatgcataatgtaaataacagggccggcagaagaatctgaacatggtaatcttaaagcgaccttatataatctccacaaataatattggaaattatttgaaatactatcaagtgacaggagcaaggttacaacattattagcaagtgacaggtgcaagactaaaacattagatcagtgaacctgaagtaagacaaacaattgttgattaaaaataaataacacttgttgacaaacacaaaatggcattttattcttgcacgaagaccatgtctaagccttgatatatgcattatgccttcatgatctttaaagtcaatagatacctgcataaagcatcaactaagaaaatacattgtttttgttccaaaaaaactgataaataacaaaaatggcatgataaaaggaacaccttaatggatacttttgttaaaaaagatagtgaaattcttgattattcaacgccggatcgaatcatgtccaatggtcattggaattttgtctatccttctattcttcaaaataattcagatttgttagccaaaatgcgaagaaataggtttgccattccattacagtatcatcaagaacaagcgaaagaaccaatatcctgttttgggatttcgattgaaataccctttatgggtgttttacgtagaaatactatagttgcttattttgacaacccacgatacaaaaagagataaaaaggttttgagaattgttaaatttagatataggaccacataagcaacacaattaatttaaatacagaacatatggacatacttctctctttgctgccctgtgtttgtagatggttcaactatcaacataggatgctcctcagcataaaagctaataaagcaaaaaaattcagtagttgcatctccatgccatacaaaggaaatcctactatttaatcaactttatccggttgtacacataagaagggatttcactatcagtatatttgaagagcataaataaatatgtaaggtgaaaagatggtgggcataaagcagtaaccatgctgacatccaaaagattccatagaggcatagaagattaactttgttgctgattctaaagaaactatgttaaagatagagtttggttcatcccaaacttccccagaaacaagttaggcacgttcggccttttgcggcaacgggcaagtgtttggccaaccacataagcagtgtgccaaacctggttactccagtgcctctcatgtcatagatttatttttcagacaagttttgccacaagtgtggccagctttttgggcgtgcacttttggcacaaaattactcagatctgcatcaaatagataaagcaactcacctgaaagcatgattccatatattgtcaacaatatcccaatcaataaatgttccatctttcattggtgaaatcacctattgggcatggaagaaaatcagtgataaacaatagttaacaaaatcatgagcatcaatattgatattttagaatgttgataaactaacctccatatgatccctcctaaatagaataaaaacaccttttagtacatacactacaatagagtattatcacaggccaaatataaattgtctccaggtaaaataaaggtagcaagcaaagcaaaattcagacaaaaaataatagtacatgttattgcagaaatttgtagtgtagagcttcgttgattatccattgaaagtattcagaaagcacggctatgttgtggaccactattatggtagagaactgcaaatgcaagacactcttatgcatcagttcagaatcctcttatgccatggacgcccatcgtagacagccagagccagccaacaacccactcagccatggacgccatggacaaagcaatcaaagcaaccataaaaccaagaaaagaaaaatcaccggttgccgaggagagcctggaggtggacgatgagcttctcctcctgctcagtgaagttcccccgcttgatccccggctggaggtagttcgtccaccggagcgggcagctcttgctgcaacgcatcacccctgcacacacgcacagatcaaacatgcaaaaatctcagatctcgcaacccaacgcagatcgatcgatcaagaacacacaagaacacgtaccggtgttggtcggcacggcacgccagttgccggcgccgtgctcctggatgtaggaggccagcatcaggtcctcctccggcgtccatggccccttctttacccaaccttgtcgcagcacggcggcctccccatcctgctcgccggtgcgcggcggccggccggtggttggtggtgtatgtgtgtcgactcgatctcgatcagggaggaggagactcgcgtgttggcggtggcaacggaggtagccgggcgggtagcggcggcgtccctgcgagcagcggaggcgctgtggtgccggtcagaggcgactggacccgtgcctggccatgggcagcagtgcggtagtgcctcggcgctggtccgacattgaggcggagcgaggaggcgaggtcgctggtccggcggtggaccgtcgtgaggagaggaggcgcagagcgaggatgcgggcggggagagaggcgcggagcgaccaggcggaggagtcatcgcaccggggatttgcgcgtcgcagttaccgcgtcgggccgtgggggcgaaatcgctggtgggatgagatcgggccaaatcgctggtggatatagatctacggtgtacagcggacggctcagattggatgagagggtggatggacggatgggataagagtggttgatttcacttgtaggattgctaggggtgaactcctcctttttatattagtacagatgaatcctccaaagagattaattgcatattgccagttcctcctgacctattatatgcatgtaagtgctctctggtgcggtgcaacgacgagcaagagtgcgtacgtttatagtagaactgagggggtgcgccttatatacgccggacgagcaaagagtgcgtacgtttgtagtgacgtctccaattttagtgtctatggtagtgaaatattcgacgtttgacacctcaaaccggagaaaaactggagctgtgaaatgttttcttttttttatatgcgtggagctctgaaatattgatagttttgtttttttctattaaaaaagccaagaagagttgacgacttatcggtaggcgctcctcgatggagggagatgagcttaaaaagtttcagtaaatggacccatgcagtggaaatgcggagtggagtggagcagtaataaaatataaaatgccacgcgcagggcatctcgaccacgacaggactctccttgagatcttcgaacagtgtgtgcttgctagctgaactgcagcagtggaacagtaataaaatttaaaacggatgtgcagtgttcacagaggacgagtgtgctctgtgttctctgcttgtgaatagatatggcgatctctgcttgtgaatagatattgcgagtactatagtacgctacaaacacaactaagttaccttatgaaggactactcaatagtacacttaaaacattgttactcgttgccttttacatcgatttttccgtgccatcctcttaaaaggaccgcacgtgaaaatgagccgattttcccagaagcgacgagttgccgcctgcacggaatctaaaagggtccctgtagtagtgattaatctagccaactcgccactgtgaacctcatctatttctcacagtgttccactatgcaaaccaccaaaaactacctcggaatctccaagaacttccacttactcttttcacccgaaggagtttcatccatcgcacatattctctggtgagcttcaccgcactccaaccatgggaacgtgaagttccttctctacctaatcaatccattttctttgtttctattttggcatagatcgaacagttggtgatatgctcgtcggcgttcccggtgtccatagcgccgccatcgccccacttcgtcattcccgtcgactcgaaccatctccggccgagccattgcgccaacgacgtcgcctacgtcccaggaaaaagacgcccaaatatgatcaagccaatacgcagccacgaacgccatcagtcgccgttgccctcctattgcctctgcttccccagccgccaagtcaccgacatgtgggccctggctatttagccacttcattaggtgtaaggactttcattagtagaaatttaaatcttgtaaggttctttttgtaaaattgatttgtatgccatgtgggcctatggacctaaacgcaattcacctaatgcccatggaccattttgtatagggtttagggcaagtcctaaaccctacttagagattactatttcatgcattcattacttgatataatagcttgatgagtatgttgtactcaccattgctttaaccctctctttgagaatcattttggagtttttgctgaagccgtgagtttaaacatataaattagtttcattccaacttagttcccatgtatagattagatagatggtttaattctatagcaaaacattagagttggctcatcctatagcttctacagtaatagatagccacaatcttgtaaataccctattattttatgtaaagaaatcacctttggagccttgatcaaatgtatgcgatgaagattcagattgttgaacctgtatcaatctactgatccagggcttgatacagtttaaacatgtcggttactgaatctttaattttgggacctgacaaggtgtgtgggtgggggcctagagcggccatcccgctcccccctccccccctcgtcggccctgactacatgggccttaacaggccacatggcatcttatcatgatttctgggcttgatagtgacgaagatggacgtcatagactgtatgacgacagaaggatcatcacaatattaatgacgaaaagataagcattctttatagaacgccattagagacgcatgataggttgtcacgcccggaatttctatccaaaattccaaatgcttacatgtgtgtaaaccctcgtcctggaatcagccgaggcacacaataacaaattgataatagagcacaattattactctaattaataagcgaataaaatgtcattacagaggtagatagttcctctcaatcaataaagatctaagcagcggaaaataaaagaaacagcgcaggcgactcctctccacaggcaacttgaccaaggctacgcctaatcatccacactatcagcatcactgtagaactcctcctctgatgaatgattgcaaggtgagtatatgatatactcagcaagccacgcaacaattaagcaagtgcacaggataacaaaggatggcatagtatagtctcaattgcttaaatagcatgtaacaattatttcagaatttaataaaatagttaaataataattaaacaatattgatccaacgctatacaacataccctgttgcataggcccaaccattctgaacaaccagtcccgactgcacagttctatctccaaaccaggaattaaccattccaaaccaggagctatcaagttattaacagcatcatttagtatggtgagaggtgtgagactaatcacgaaagacattgttagacccgcccataaccgtgggcacggctattctaatagtttaaactctggccagaggtgtaccactgtacccacaaagacacaacctcaacatcatgtcaaccatgcgtcgcgatacttgacaagtacccgaatagagattgtgacaataccctctatataatacaattcaaagcagtgcaccgttcccggatcataatcacccccttataaacaaggtatggactccccagcgacccccgtgggcttatctccgccacttcatactctggtgctctactatgaaccatactatatagaaagtaaagccgttgcccacgctggcttgtggttgacacggtaaatgtttcacaaccgaaaatcgtgtgctcacaacccatcaaaaccatatgctcacaacccaccattatcaggttttagttggcaaattaattacttaaccaatcatgattaaccatcatgagctatcattaagccatcattaaataatagtgaagcataagttatcccaatagtgtgctaatgtttctaagcatggctaagcaattatgtctaatatctagctgaaccaatatataaagctcaactagttaagttataataacccaaggtatcaaggaatagagtaatcaagaacaaaagggctataacaaggcaataggttaattccacccaatgacattcgaaaataaatgcaatagttgaatagaaacaatagctttaaacgggatcaacatactcaaagggttgtttgggatctgtgtgacttgccttgctggccttggaactcttcaaagtcttctcctgcaaattcggactctccgggaacgtcggactctaaagagaaaagagcaaaatcaccaaaacagcacataaacaagcctgaacagtacatgtggatatttttaacatgtagatctcaattttagaaaaatttagagacttgaaccaactaaatgcgagctaagatgaattagttatgaattttcatagattaaatcggattaaatcatttatatagattttaattgaattatgacgtaataatgaattatttttaaaaaggaaaaagggattattgcgtcagaggactcggctcacggtggaccgggtgcacggcggtggttcacggaaacgaacggccgagatcgatctatccaaaacggaccaagatctaacggtctacgaccggtctacggtggacggcgtcgatgatatcagcagtgacgtcatcaccgacggcggctcggcctcgcgtgctcgccggcgaacgacggcgcgacggcgcgaatgaaggacacctacgggttgcgggcgacacggcgaactcaccggtgaccaaagcagcggcggaaggtcaacggacggcgacggcgacgaggaagaagcggtggtcaccttcagctcgacgacgacggcggggctccggcgatctacagcgacggcggagaggcggacgaggtcggcgacgatttgacgatcacaacggcggctttcccgagcgacgacgacgaccggaaggacggcggcgcacggctggacgaacggcggcgacggcggcgctagactacacgacgctagggctctaccggcgacaagagacttaggcgagggtggcggcgggtagaggagacaccgggggtccttttatagcggctagggggtggcggcgaaggtccacagcgaccggcggcagcgatggaaagtctagggttcggggagagagacgaatccgatttgagttcgaatccatggatttccgaacgattttagccgatgattccaaaagagaaaaggtagaggggatctcggggatcatttcccctctatcaatttcaccggatcgggaaagacacgatcgaatttggaagggcagcggcgcggctcggctagggttcggccgggcgacggcgcgaggaagacgacgagtctgacaggtgggtcccacctatcagcgggcgagggcgcgcgcgcagacggtgctcggctgcgggccgacctaggccgggagagagagaggggtttgggccgactttcggcccaaagccaaaagaggatttaaaaaacctttttcaatttaaattattcatgaaatgcaattccattgattaaaaatacttccttgcctcaaataaatcccagaaaaatctaggaactatagaattaagcgaagtatttaataaaattttatctggcccaattttatattgaaatttattatttaaaaatagatcttctcttctaggcttttaatatcaattctaataattccaattaaacaacaatttatatatttcggatttttagggtgtgacataggtgacgaatgatatttgtcacacgaacgttagatttcacaacatgacttaaaattcaattttcatgacgtaaattagcatcagctacactggtggagaaaccctttttcctcccggttcgtaacccccctttagtcccggttatccaaccgggactacgaatccgggactaaagatcgctatccttagtcctgggtgaaataacctggactaaagatcgatctaccaatttttttcttatttgcatggccctattgctgcatggtttagggtttatgttacaatacatatatatgcattatatatatctatatatatatatatatatatatatatctatatatatatatatatatatatgatggctctttcatacgcccaggtgtatgtacacccttttattaatggatgatccattagcattcaaattagctatgaaaaaaattaataatattaatttccaaatgactgcatgcatgtggcatagctgcacaccggattgggtgcagatttgaacaagattgttggcatgcatttgctttcaaatttgataacgtaccttagatatccccaccttttctagtatgcaacagtatatactgttttttaagccgcagtatatatactctttgaagtgatgagcagtactatatagtagttttttgtgtattagcagtacctaataaggagtaccttatatttttgttgtagcagtgaatacttctttttttaattagcagccgaatatacttactccagaactaatgagtatatatatactgattatgtctttttattggtacgtgcagtatatactactgcaacgagcgaatgagtacatactgttctttctcggaatgagtatatactgattttttttttggaacgagtatatatactgacttttctcggagtggtatatacttatttcttctccaatcggtatgaacagctactcggagtggtatatacttatttcttctacaatcggtatgaactgctctttggtcagtgtatatatactacattcctcattgaaggagtatatactgcttctttttttatcagtatatacatttgttattaattgagtatatactgtatgcactacttgttctgtcagtatactgcatatactaattgtcatgtttggtcggtatactgcatcgtcctcgctaaaggaggttatactgcctttttgtttgatcggtaaatactacgtatactactttttttcactcagtatataaataagtatgtaccagtatttcttagataagtcgtatatttgctatccatggaagctggatgcatatgcttttcagttgaatagaataattaatatgcttttcacgtgcaaattcagaagtatgcctgaatcactggcaaagtatcggctgttgcattatgaataaacctaaattaatgaaataccctagaagggcactgaattctgaatggacattaccagaccaaagaaaaagatcaacgcagactatcggaaactaagaacaaaacataacgggatcacccctcgatgtggctcatcgaagaatctctgcatccccgcagacatatctcggttaacatcgatgggatcacgccgaccgcacgccggagagaggtggacaagaatgtgtcttcctggattaacaccgttagctaggaatcacgggttcgatgccgacgacgatgctgttgccgcacggccacacatgctggactgttctgtcatcagcaccatctacgtccacgatacatgcatctcgcatttgcatgcaccaaacaaattcgatctgcatgcatgcattatcgatttgcaacctagaaaaagcaaatcaagaaaatcggaagaaggaaggacttgcctgcagcatagtcgatgttccagttccggacgacgctcagcgtcgtcttgatcgtagcatgggcctgcatcgatgccgtcgccgtacggccacactgacttgcccgaagatcaatggcgtcgttgtctggtcacagctcttcggccagccagtcgcctgcggatagtcatactgaaggcattggtaatggaagacgccggcgtagacatcagcagacgccgtgaccttcgaatagccgatgggtcgcgccgtcgtcgccttcgaatcgccgatcgcgataacctgcagatcgatctatcgattctgtttacaaccacccacgagattttaatacgagctattcaaaagggttctggttagtacggaataattcagattatgaggatttttttcgtaactagaaatcaaaacgggctcggtatatggatccgcttgctgatttgatcggtggtgttcgctgatggacggtggatggaaccgggagtacctactcctgggagtatagaatcattatatatatatatatatatattatatcctactaccgggagtagctactcctgcatcatctgctatacgtgctttcaagatttgtgcagctttctgctaattcgaatttgtcattagcgggttaattaacccgttaaaatatgccgatcgctattttcgtgggatacaaacttttgaatgcattatgcacgtcagatgtttgcattatctgcctgacggccgcatatatatatgatctgctcgtccacgcatgtatttcgcatctatagcatatcatcaaccacaactaaaatgaacagatgatgttctgctggcacactgcgtgtggtaattacgtactgtccaactatagccttgtgaacaagataattaaattgagcagaagatgttctgttctttctctctatatatacctattcaaagaataataaaaaaaggcagcacatattctgctacctttcatggatgggaagaagatattctttttgaatgaagcagaacatgcagttttctagtttctgctcccggttcacattctgcccattttctaggttctgcattttgaagttctggaggagcagaacgtatccatgctggtattcaattacacaatcagaacttgatatggggaccagaacaaaaatgttctgctcttgtttctgctggggccttgtcgaaactagatttcggcaatagtaaaagggggtggctatcaagctagaaaagtgtatgggtttggagacaaaggatttatacaggttcaggccttcttattcaagaagtaataccctactcctgtccggggatggatccgccgagtgtattattgattgtatgattgggagaaaatcaacctatgccccaagaggcacccggaccctccttatatatgggaaggagtccgtgttacaaaagataatctatatccctaacggaatatgcagatacaggtaaaatacagtcgtaaccgactaagtctcaaggtgtttccttgatgtacaagttaagaaacgaacccgagatacaaataagatattctatatatattcggtatcctatatccagtccaaatatcctcgccgtgtagatatgggatatccataatctccacagtagcccccgagacctttgcagtcaaccatcatagccttctcaaagataataatccgagtgcttcaaacttttcatgccaaggcctgccgagtagcgaagacgaagactgtaaagggcgaaaaaataaggaatatggtgcatcgaatagatgcacctaattaggtgtagcccccaactatgtgattagttaacaaactaaacatatagttgagaacaaaataatagcacaatcatgcatcatatgacagaagcatatgcggcgcctaaagaggcattctagccgactgctttttagtcataataaaaagaatccgagtggttaacactctaaaaggttcacgaatgaacacacttgacaggcatccgaataaaaaactctaaagattacccaccaaacattataaaaattatggtaatgaataagtctaatagcctaagctatgactatccatcataatgaaaacaggcatatgtggtgtaaaatccgagtaaataaactcataaaggatttaccaaccgcctaaggaaaaatgactataatatataatcagcctaagccataatattggtcaataaaaaatgcacacttacgtggcaaaaagcaacgatattgtatccaatcaattgcttaaaaacccaaacagcaccatgactatattaaaaagtcagcggggcagctatataaagctttactgtttgacaccttttaagatgcattgtaccaactcttaaaaagttgagtaactgcggtataaaaggattttaaggtattgagcacttgatcacgcgcactttggcctaagcgaaaagtgcctgagtccctaaaagaacgtgacaggccacacctgaaaattcgcattgtaataattccgaagaattatatgaccgcgtaaaaaaagattttatcagcattgggcaacactattgtgcgcataagttgccaaagcaaaaaatgcctaagtccctaaggagcacaatgggccacgctgttaaaagtattgggctgaggtactgttcaagcctaagcccattcgcacctccgatacccttaacaaaaaatcacgtgatccaagcgccacttcgtcttccccgccagaactctcgccattttccccacttcctgctacagtacagagctgcgccggcaaactagggttcaccattccactcgaatccaccttcgaaaagttcattaaaatccttcctgtgatccaccgcctcaattcctcacctctcccaagccatccctcgaatcaaatcagcgcattcaggtaaaatcgatggcgaaagagaaagaaagcttcgaaggccaatgggcaccatccgacgtgacggaggagaatctgaaggagatggtggcgcacggtgttctccctgccaaggagatcattgggtggcgaccagcgtgcggtgaggtttttccgtcccccgacacacatgaggttgtagttttttcccatttcttctatggcggcttcgctcttccgacctcaaaatttttccgcgggatattaaacttctatggaatcagcttgcatcacctaaacccaaattccatagtccatatcgccaatttcatccatgtttgtgaagccttcttaggaattaaaccccacttcgctctgttccgccgaatcttttttctcaagccccaaccgaacaagaataagccatgtgtagtcggaggggcaggatttcagttgaggggaaccctgagtcagaagtatttctctatgcccttcaagacctcaaacaaaggatggcatgcaaactggttttatattcagaaccctgagcctgctcttcccgagtactcttgtcttcctccggtgtaccaagatacttggaactctcttccgatcggagatgaagctgctcaagccttggagttgatggaccgcatgctaaaactcaaagaacaaggtttacaaggagagcagattactcggcatttcatcaaatgccgattggcaccaattaaagaaagatcccgcacagcattcgagtttgacggcaagcatgatcccaatcgtgaagaaccagactctctggactttaaaatcatgaaggagagaatgtataaaatcttctcaaatgctattgtcgtcagctactcacatcaactgccagttgtgccatataacgcattcaatccgcctccgcaggtatgtatctgaaatcttcaacctatgaccaaaatagtatcttgtcttcatgttgagttaactaaccatggaggcatcttattcaggaatatgtactgataaaatctgatcccccaatcactcagcgccggtctcctcgccagcacaccgttcagggaggtggaggaccaacaatcagaccagattcgcaacctcaaacctccaatccaactggacagacaggttctcgcaagagaaaactggtgccaaatgacgacgaaggcgacgagaaatctggggacaaaggctcgcctaataaactcccgaagcgtaccatgcccaggaaaaaactggctggccgtccaatgccaaagattagaacatcttctaggtataaacctcttggtaccattttatttcggcatgctcctctcatgaaaataatactgaatattgaaagaacattttgcaggaaaccatctgacatagacccaactggaaaagatcctgatccggctgccacagagccaaatttatccaaagatgctgagccgactgccgaaagccggccgattgccgaaagccagccgactgccgaaagccagccgactggtgcccatgcttcggatgacaaggcccatccgagtgaccagccgccgactggaaaccagtcggcagcaactgaaactgtaacaacccaagagcccccgactggaaaccagtcggatgtaagtctaaatcaagagattcctgaagctgaagcgcaggcgacaacttctcaaggaccaaaggctggtaatgactcgatgattgggtctccaaataaagaacaaggatcacctcacgctcagctaggaacatcctcaggtaactcatcttctcaagtgataccgatttaaataactccagtttatttgcctaatgtcttggaaatacatcaggaccaccgggcgatggcgaagaagaaattccccgcataaaggcggctgatgattctcgtcctcctatcttgctcaaatggtgggatgagaactcacaggttgccggcatcgtcataaaccgtcaaaaagaagatgaggaagtgtgccagctgaagaaggcgcttggagaaactactcgcattgtgaatgtaaatatttcaggcgactgcctttgatgactttgttttctttttagctgaactaaaccatgaaccatcatgcagagaatccatcttcgtaatgaagccaagaccgcaactttggagaagctggttcctcatttgggaactcttgaagcagttagggaccagctacacgaggccaaggagctcgccaaaaagacggaaaaagaattaagggagcaaattgctcagctccaggattcaaacttcgagctgagtggttcgtcaaaaggtaatcttctagacctgtcccattaatctatgctgtcataactatatcctcaaccatttggatttcgaacagcgcaagccaccaggatggttcaaatggagaaacaaattgaagccttgaaaaaagacaaagtagaactggctgcgcaaagggattcggccttgaaggaggttgaaggtactgccagctagcaatctggacgtctctcttttaaatgcagcagattcttatcataaatgtgttttgtagatcgtaaaatcaaatctcaagctcagtttgacgtcctggttagtaagatcaagaggcttgaaggagcaagagatgaagtcgccaatgtcgctataccactcgtccaagctatgttcctcaataacagtggtccgagtgcactcgacgcaaccgaaattttcgacaagctgagagttgctccggatgtatatttcaagaacatcaagaaagctggaagtatgggagctggcatggcattagcgatgaccaaatccttgt

SEQ ID NO: 28645 - DNA, 9353 bp, Oryza sativa
tgagcataaatgtaacaaatggaggctcaatttgtacaatactggtgtatttatgctgtgcttgataactctagccaagtctttgatttcttaaaagcttttatcaagctctgttgagcctaaaacccaaagaagctattaaaaactttcagtcctcgcaaactaagtagaaaaatcgaacaaggcaatgaaaaaccaagtaggcaaattgaattgataaaaaatcacactctattattatgatgatagcccccgactgacaacttcgaggagaaaacttgatgttgacagtcaagacagggaagtacaatgataagcctaagcgtagaaacgacgaagatgttcaatgttccaagagttgtcgacgagagtaccgtcttcgcgcttgagtcgataggaacctggccgggtgacttcagagatgataaatggcccctcccatagaggagataacttgtgccgatcccgtgtagtttgaattttccgcaaaaccagatcgccgactaaaaaggcgcgggatcgaacattgcgattatgataacgtcgcagcccttgtaagtatcgagccgactgaatcaaagccgcttcgcggacttcttccaatcggtgcaagtcatccactcggtcctcttcgtagcgttcttcacggaaatttcgaaagcgcaaagactcgaattcaacttcactcggcaacattgcttctgccccataaacaaggaaaaaaggtgactggcctgtggcccgactgggtgtagttcgcaaagaccaaagtactgatgacagctgtttcacccatttgccggcataaggttttagccggtcaaaaacacgcactttaatcccttgaagtatcatgccattggctcgctccacctgtccattgctcatgggatgcgccactgaagcatagcaaatcttaattccaaagtcttcacaaaagtctttaaaaactccgcccgtgaattgtctgccattatcagtgatgatccgattgggcactccaaatctatgcacaatgttgatgaagaagtctcgagcgttatctgctgtgattgtgacaactggtttagcttcaatccacttggagaatttgtcgatggctacaaagaggtgcgtgtaaccaccgactgcctttttaaacgggccaaccatgtcgagcccccaaaccgcaaacggccaagacagtgggatggtctgcaacccttgagctggtagatgaatttgtctggcaaaaaattggcaaccttcgcacgtgcgcacaattttgtcggcgtcggacacggcagtaggccaaaagaaaccctgcaggtaagccttgccgacaatggtgcgtgcggcagcatggtttccgcatatcccagaatgtatgtcttttagcaattgtctcccttcctctaaagatacgcagcgttgcagaatccctgaagggcttttcttgtacaactcagcttcatgcataacataaagtttgctccgcctcgaaatccgctcggcctcatctttgtcttgggggagttcttgagaagtcaaaaatcgtatgaggggctctcgccagtcggcttcaaccataactacgtcatgaatgcccgcaacttgagtagtatctttgtgaggtaccgtcggcgtataaaggtgttcgacgaaaacatcagagggtgccgcctcgcgtttggatccaaagttggcaagtctgtcggcggcttcattattgtgtcgaagaacatgactgagctagagtccatcgaacttgtcttccaatttgcgtacctctggtcgatatgccatcatgttgtcgtcaaggcaggaccactctttcataacttggttgacgaccagctgtgaatcgcctcgaagtattagacgctttatccctagggaaattgcaattcgcagcacatgaaggagggcctcatactcggcgacgttgtgggacgccgaaaaatgtatccaaagcacatagcttaatctttctccagttggggaaatcaaaaccactcctgctccaatgcccgaaagtcgttttgacccgtcaaaatgcatggtccagtgctccatcttctccgcgggggtatcctcctggcactcggtccattcggcgacaaaatcagctaacacttgggacttgattgaaattcggggcttgaatgatatgtccaaagacatcaactccaaggcccacttagcaatacgtccgtttgcttcgcggttgtgcagtatatcaccgagtggaaatgatgtgaccaccgttaccgagtgaccttgaaagtagtgagacagcttcctggtagtaattagaataccatataacagcttctgaacctgagggtacctcgttttggagttggctaggacctcgctgacaaagtaagtcggtcgctggactttctggacatggccttcttcctcgcgctcaacgaccaagactgtgctcacaacctgggaggtggctgatacatacagcaacaacggctcctgcggatgtggtgaagctaagactggtggctcggtgaggagtttcttgaaatcttcgaaggccttctgtgcttcgggtccccactggaaatcatctgttttcttcagtagcttaaagaagggcatcccccgctcaccaagtcttgaaacaaatcggctgagcgccgccatgcatccagtcaacttctgaacatctttctgggtgcttggcggtttcatgttgaggatagcagtaactttctccgggttggcttggatgcccctatgagacaccataaaaccaagcagcttccctgacggtactccgaaggtgcacttttcagggtttaatttcatcctgaaagcgcgaatgctcgcgaaggtttcttctagatccgagatcaaatcatcctttttcttggtcttgacaactacatcatccacataggcttcaacgttgcggccgatctgcgttgagaagcatctctggatcatacgttgataagttgctcctgcgttttttagtccgaacggcatggtgacgtagcagtatgctccaaagggcgtgatgaatgaagtcttcaagcagtcggattccttcagtcggatctgatgataccccgagtagcagtccaaaaaactgagaagctcacagccggcggtcgagtcgactacctggtcaatgcgaggcaacccaaaaggatctttagggcaagatttgttgaggtcagtataatcaacacacatgcgccattgccccgttttcttccgtactagaaccgggtttgccagccagtcgggatgaaggacttctttaatgaagcctgccgctaacagcttggttaattcctccttgatcgcgtccttcctgtcttgcgcaaatcggcggagtcgttgtttgataggctgggcatcttctttgacatgtaaggagtgctcaatcacctctctaggaataccgggcatatcagatggtttccatgcaaagatatctttattgttctgaagaaaggtgatgagcgcgctttcctatttacaatctaactcggcgcctattacagcagttttagtagaatcagagggatctaggggaatctttttagtcttagcttcgctttctccgctttttgaagtcttggtagcgggcatttctccttcgctcgtcgtggctgcagccagtcggatatcctctcgggcagacgctatctcgcgggtttgggccatgtcgcaactctccttgtcgcatgtgacggcttgcttgatgtcgctccgtagggataggactcctcggggaccaggcatcttcatcatcatgtaagtgtagtgcgggacggccataaacttggctaacgccgggcgtccgagtatggcgtggtatgctgtctcgaaatcggcaacttcaaagctgatattctctgtgcggaagttttcccgagttccaaaagtgaccgggagggtgatctggccgagtggagttgcggataatcctggaattactccgtgaaaaggtgcattgctgggttttagctcggagcgaggaatctgcatatcatccaaggtcttggcgaagaggatattgagtgcactgccaccgtcgatgagggttctgcgaagcttgacattacggaccactgggtctagtaccagggggtaccgccccgggtggaccactcggtcaggatgatccgagcggtcaaacttgattgcaatctctgaccatcgaaggtactggggcgtgtcgggctgaacagcattgatctcccgttcggtcaacttttgcttccgtttagactcataagccaaggggccaccgaagatatggttgagctccttgcggtggtcttgaaatcctgccggggcgtcgccgtcgtccttcttcctcgacgtgctttgttcttcgtcggagttcttccgtgtagtcttggtgtattgatccgcgaattgcttgtagacgaaacaatctttggccacgtggttggagttaggatggtgcgggcattgggagttcatgatcttgtcgaacgtgttgacgcgcgagcgctgtcgagaagagtgactggcggttgcaacaagttccgcaggcttacgcttgcggtccttatgattgttacttccacctcctcccgtagccggcgtacccttatttggcttccaactaggacccgactgctttgatgcggtgacggcgtcttcagctttggcgtactcgttggctttttcaaacataagcttgactgtcctaggaggtttacgcccgaacttgccaaccaattcttcgtggcgaatccctttggtgaaagcggcgatgataacgtcgtcggtgatgtcggagatcttattacgttgttcagaaaatcgccggatgtaatctctgagggattctccggacttctgaataacgttgtagaggtcgtattgtgtgccgggacgctcgaaggtgccttggaagttggcgatgaagtggtcgcgtaattcggcccaagatccgattgtaccacggggtaatccatggagccaagatcgggcggaatccgctaaagccactggtagatagttcgccatggccttgctgtctcctcctgctgcgcggattgcaagaccgtagacggtaagccacgattctgggttagtggtaccgtcgtacttctctattccagtcggcttgaagccggctggccaatccactcgacgcagatcgtcggtgaaggctgctactccgtcaaggtcgtcgtcgtggcggtccggcgaatgatgatggcctcgagctgctcggcgctgtatgatcgtgtcgcgaagatcgacggggcggcgacgaggtggtgagcgaggccgttccactcggcgctccccatgatggtcgggaggtgagtgaacggaccgcccgtcgtgacccttgctcctgcgattggatcctgcgccggtgatgctgaggcttggatgacggtagtcatgagatcggaagtggggaactcggctgccagtcggcgtgtggacgctttcggagttaactgggaccgaagccgcaatcatggtcttcgtctggttcaagatgttgacgacgtgatcagattgattgagctcgttttccttgaggagggtgtcgaggagggtgatcgcggcaaccgcattctgctgaggggtgcggaaaaccggtgtcccttcaacatcttgttggccgatgagatcacgcgctcggcgccctgcttccaaagctcgctgtcgtcgatcttcagcctccttcgcggtccgctcacgctcctgctgctcacgccgtaaccgttcttgttcttgtgcttgacgctcctcctccagtcggagacgctcagcctcgcgacgtgcttcggtctcccgggcttggcgttgctcctccgtctcgttatcggccatgaagacgccgaagtagagaggggtgtagttgtcatctaggctttcgtcgaagtcgtcgagatccggttcgttgtagcgagagctaaactcgtcgtactccacgatgtctgtggggcgcgagtcgacggtgggagagctgtagtggccgtccaactgatccgtcgaaaccgtgccgagtggttggaggatgacgccgacttccctgaagctaggcgaaatcggcgttgaagccgacttccgcctaggcctacgggatgaagacgctgtcgtgatgggggcggccgccgaatcgtcggggagcttcattaggatcggtgggtaagccccatcatcttgatctggtgtcgttggggaagatgcgatttcgcccgagtggtttgaagccaactcgattgagatggtcttgaagtaactttcggccgcgtttgggagtccaaacgggaccgaaagccggttctctcccgactgggccgacaccgagtcaaggagagagatcttgccgaagttgttggtgacgaagtcgaggctgccgaaccgaaacgtctgcccgggtgggaagacgaggtcgtcgatgccggagacggaacccattgcactgatcggcgaaaagcttgacgctacccctacctggcgcgccaactgtcgaaactagatttcggcaatagtaaaagggggtggctatcaagctagaaaagtgtatgggtttggagacaaaggatttatacaggttcaggccttcttattcaagaagtaataccctactcctgtccggggatggatccgccgagtgtattattgattgtatgattgggagaaaatcaacctatgccccaagaggcacccggaccctccttatatatgggaaggagtccgtgttaaaaaagataatctatatccctaacggaatatgcagatacaggtaaaatacagtcgtaaccgactaagtctcaaggtgtttccttgatgtacaagttaagaaacgaacccgagatacaaataagatattctatatatattcggtatcctatatccagtccaaatatcctcgccgtgtagatatgggatatccataatctccacaggccttttgctctaatagtagattgaattgtttttgaaggaacagaaactattccgttacatattcataattataggaacagggagattagcttctgttgcatgcgtatacatatttatgttatgcagattagcttctaccatatttttagcctgttttttcatttgccggctagtatatatcttctgtcggccaggagcagaaaatcaattccaaaaagaacagaacatcagttagttaggagcagaaaatcaatttgaaaagagcataacatcaacaattgcatgtgctgcccgtttatatacaacatatcaccaaacagtgctcactttcaaacgaaattaataataaaaatattggtttgagagcagaacatattctgcctccttataagtagatcgagtttgttttgaaagaacagaaggtattcttctttcttcttgccaaagcttcctataagtaaacggactttgttttttgagcagaagatatatattctgctttcttgtttctagaaacagagataatttcaggtacaaaattcaaatctctttctgctccctttctaaccgatgttctgctcctttggtagtttctgctgattttcaagttttggatcaaggagcagaacttaccgatgatgagatttaattagacgaggagaagttgaatatgtactacttatctaagtacgtacacagcagaaactatacccagcagaaactcggttatgcagaatatgtactacttatctaagtacgtatagatgacatacagtatgttagtaatcaaccgacagaacatgtactgccatcaaaaacagatacggagaaaaaaattaggtggctgttctgctaatttttttaagttgatgttctgtcattctttttaattcatgctctgccattttttctgttggccggctaatatatatgttccaccggcacgagcagaagataatatgccaggacgagcgggtgcgaggaagaaactgcatccgagaagttggtttgcatgcagccgatgatttagcaactatctgaactaacaaactatttaattaaacaacacaggtattcatcgttattggatcctcgtcactccattaactgaatccgatccataataggagggagtaactactctcggtagtaggaaataggctatatatatatatatatattagaaaaactattctacacccggggtatagaatagctattctatacctccctcccaccaacccacctcctctccccccaagggcccaaaacccacctcccacctcggtcaaaggccagtcaaaggtctctcacgtcggtcaattctaggtcaaacccgtcggtgactttccccacgaccctctctcttcttagctctcgtctcggaatgacgtagtaacgtgttgttcatcgtgtagtaacatagtgttttacttgcagtaacaaaattaaaatttactcataatatacttatgatggatctacttttggtaagcaattttttttgaacatcatggtgcaaacggtttttaaaaatagtacatggtgtgagagatattacccttcaaagatttgtttttgaagatttaactctccacaagtagtaatactatatcaaaagttttactactgcctgttttgcgttactgcaatcacatcatgtcattactacaagatgtagtaacgattataattttcacgtaacatagtgtcttactgtaattacttgataacgttactgcaagactataagttttgcagcaataaagcgtctaactacattttttgagtagtgttactgcataaacacgtggtaacgtgtaattgtcgtgcagtaatacttttacttttgtgcagacttttgtgcagtgacaagtgtatgattagcatctgagacttttaacccatatatttttgtttcaattcctgaattactgcaattcaccacaatattacggtcaaaagtgcaataacgtcatatacatgcagtaacgttatattggagggaggaaaccaattttcttgagaagagggaggaaaaacggttcttgaggaggggagtacgtagatgctttttgaagtttaatcctccacatgcagtaacacgataacatcatggtggaaacggttttaaaaaataatacatatcttatgacatattgcttttcaaagattgacattttgaactttagccctccacatgcagtaacagaatgtgtaatttacagtaataggggtttatacatgcagtaacatggttttaccaaatgtataaaattattcaaaatacttctacatcaatcagaccttgcttaaagccacctacaaactttatctatggcccacctattcgaacttcatctcgtaaaaatgacatagtaacactgcatttatcatgcagtaacatatctacttggaagtggtacatgcac

SEQ ID NO: 28646 - DNA, 9058 bp, Oryza sativa
tattatgaagtacggcttctactttttgtgtagtaccaagtatatggttagcatgtgaggctttaactcatatatttttatttcaattcctagtttatgtagtaatactatccaagaaaatgcaagacactttgttactgcaaagcttattgtctttactagactcttatggtaacgttgtgatagaaatgtagtaacgtacagtagtaacaagtaatgctattgtattattacttgtggagagtcaaattctaaaaagaaaagcttttaagaacaatatctctgatgtcatgtatggttttttaaaattgtttgcaccatgatgctagaaaaaaaatgcttatcaaaagtacatccatcatgactatatttcaattatatttgagcgttgttactgcacgtaaaacacagtgttacgagacggtgaccgccgcgttactgcacagtttcgcgaaacgagagctaagaagaggtgggtggtgaggggagttagtaggtgggtttgactgagctttgaccggcgggagggagctttaaccggcgtttgaccgaggttggaggtggtttttgggccttagaatggagggggaggtgggtgtggcccttgagagcgaggtgtacaatagtcttaccctatatatattacatatatattacgcacatatatatatggaatacatatatatatatatatgcatatgtataaatacatatacatgcatgtatagtacaattcatttgctcactagctagctatgacttcgacgccggcgttatgtcaaaagaagaaagaccgacgttatgaattgtcgatccgtcgtagtagaattcaccctcgggattaaggacttcttcgttgatgaatctcatcagttgttcctgaacaactgtgatagaatctttgtgtgggagattgtccctgatgtgaatacactatcattcgaaaaataatgacatatgaatatatgaaattaataaacaacaaatcgatacgcaatgaaattttgaatggtttatatatacgtacatcgagctctcgtgtggtgtagatttgggttgataggaagtgggcatactcgcatacgtagtagccgcacaggttagttccctggtcatgctttgcacattacatgagaaaggacaagagatttaatatacacttacattaactgtaactagtaatcatatataattagcatatgcatgatttaaaattgttaaaaattctaattatcatatgtaaataccacatgcatgatttaaaaatgttaaaagttctaataatcatatataactagcatatgcaaaatttaaaattgttaaaaattctaataatcatatgtaaataccacatacatgatttaaaattgttaaaaattctaataatcatatgtaaataccacatgaatgatttaaaattcttaaaaattctaataatcatatataataagcatatgcaggagttaaaacttttaaaattctaattatcatatataactagcatatgcatgatttaaaattttaaaaattctaataatcatacataattaacatatgccgtacaacaattgatttatatggatattcaatacatccaaaatattttacatcgtgtacacaacaattacggcaatacatcggcggtgacggttgaccgcacgtacttcctcctcactattgttccttccttatgatcgctacgtgagtaaggggtgtcttcgtttgataggaggatgctagggtcaaccgtcaccgtgaaagggggttgcccatcaaactgatcataatcttcatcagtcttgtcctcaactccgatgatttttcttttgcctgggagaaccacgtggcacttcggctcatcaggccctttgcccttctttcctttgctagacatgtccttcacataaaaaacttgcgttacatcattggcaaggacaaaagattcgtccgagtatcgaaccttgttaaggtcaaccgttgtcatcccactgtcatcaatcgttacgcctccaccaatcagccaaactcattggcaccggaacagaggaaccttgagaggtccatagacaagttcccatatgtcctcgatggcaccgtaatacgtgtcagttgtaccatcgtgtcccatggcatcgatacgaacagcactgttctggttcgtgctctttatgtcttggtttctcgtgtagaatgtgtacccatttatctcatatccttggaatgttgcgatcgagccagatggtcccctcgccaggaaggccagttgttggttaatcgtctcgttacccatgagatgttgtcgcagccacacggggaaagtatcaatgtgatgccgtgtaatccatgcatcggatttaccgatgtttctggcgcgaactagagccaagtgctccttgatgtagggagccaccaatgaagattgttgcagaaccgtgaaatgggctttacggaataaattgttgtctaccatcattattgctttccttctgagagtcccctttccccgtagtctcccttcatggcgtgattcaggtatcccgattgggcgaaggtcttcgataaattctacgcagaattcaatgacctcctatgttccataccccttggcgatgcttgtctctggacgagcacggttacgaacatacttcttcagaacgcccatgtacctctcgaaaggaaacatgttgtgtaggtacacaggcccgagaataccaatctctttgacaaggtgacaaagcagatgcgtcattatattgaaaaatgaaggtggaaatatcaactcaaagctgacaagacattgcaccatattattctgaagggcttctaatctatccggatcgatgaccttctgcaaaattgcgttcatgaaagcacatagctttgttattgttgaccggacattgtctggaaggaaaccccttattataactggtagcagctgtgtcatcaacacgtgacagtcatgagactttaggtttgtgaacttcttctccttcgtgcttattattcgctttatattcgtggagtatcctgatggtaccttgatgctttccaagcattcaaacatactgtttacacccaaatttggcatctgtggacgaaatagggaaaaattgccaaagtttggaaagtaacgggtttccttactcgggaaggcaggtttagtgtttcctttggtttctatcccgagttggatgtggagaagggcctatagagggtaagaccaacccctatataagggacaaggccggttcattgtaaaacccccgaatacaatctacttgaatcgttcttttactatgtcttctattttaccctagtttagtccatctttgtcggtttgcgccgtaaaccgtccgccgccgctacgagagtgcgacacctctttgtatgtttgtcctgaaaaccttccgttttgcccacgagacgggtagttatcctcatatcgatctaaatcggcctagaggctgattttgatctctaaatcggctccgctagccggtttaggttttgtttctacaaaacccatcttgatttggccctttggctagatcgaggtggttggcgactccatatcaccgcaaggcatttaggtgttgtgatcgtgcttgtcgacttgtcaaaaaaattaccaacacgatttttggcgactccactaaggaacgatctaatcggccatatcacggctgaatttcgtttaatacagtagttttcgtcaaattgagagtttgggctaaacagccgagatcaatctgtacaacttatcgctgctgctacgaagttttcctcggatcagtatattcgacggcggtactgtttggtcaccaagtggaattaatctacatagctcagccgacgctatttggtttcatctgccgcagtcagccggcgtcgccgttgtctgtgttgaggccgatcgattcaatcggtttgggagcagtacgctgtccttctattttgctgtgcacggctgaaattttgagtcttcgtcctattcggtttgctatatacaaattcctaaaaacagaagaaatcaggctatcaaagccgatctgccactgcccacataccgaaaatcaggctattagagccgatttacctagaataagacaaaaccaaatcggtttctgttattgtgcattaggcaactgttaccgagaaaaaaaaaagggatcgaagccgattcatattgtttcggctgttattgtgagacatcgattttctgaatttttgcctacacacgagacagaaacagttctgttcttgctgcacgctgttaccgaaaaaaaaaatcaaatcaaagccgttgcagtgcatcggctgttattgtggaacatcaatttccaaatatttgctagctatacacacagtagcataccgaggaagttaagaccgtatattaatttattcggtcaaatatttcggctattagctatatggccggatttaatcaagaaatgtcttcatcaactattacgagcgggaacgggttaaacaatgttactacacaatacttcaggaccgatcaaggcgtcgtgagaggaaacgtcccgctacctcaagttgtaatttcaccaaaggtaaccttcgtttcgcctaacccgtcctttgctattcaaaacgttaataatcattgtgtagatgcatatgctacttctagttttgctcctatacaatatgcttataatgctacgggggagtcaatggatgattatacggccaattacacagaaatcggctataggcaaaacctagataacggtatgactggtcatggtaccggtttaaccacatcttatgccggtcagaccgtgcccaccatggccgatcagaccgtgtactacgccggtcagaccgtgcccaccatagccggtcagaccgtgatctatcctggccagatcgcgcctcatgtggccggtgtgaccggttccctggaaatttctccaggttttcataccatgactagcagtattgattttaattattattcatcacctgttaatactgttagtcatactactccacatatccctaatgcttacaatgattctaatagaagatattctcctgatactaggtatggccaatataacaatattgcgccacaaacacaacctattaggccaccaagtccaccaccagatccaccaaggcctgaaactgtggagaattggtttagaaatattatcagggagaatttagcaaagctaaggaatcgctctagggactaccgaaagccgtatcctgattattatgacattttcccatatcctcgtgattataaaattcctgaatttaccaagtttagtggtgaggatagtaggactacatgcgagcatgtagatcaattcttagcacaatgtggtaggttaaaagtgatatttttaaattgcgcttgttttctttatctttgtccggtactgcttttacatggtttacttctttaccggcaaattctattgatacttgggctcaattagaacaaaaatttcatgattattttcacactaataaaactgagcttaagttatctgatttaacatcggttaggcatgaatacaatgaatctgttgctgattatattgaaaggtttagagatgttaaaagccgatgttttagtttgaaaataactgataaagatttggccaacattgcatatgatggattgcttgattctattaaagagaaattgaatggccagatatttcttgatattgatcatgtgttgcatgaagctctggctcaggaaagccgagtggatggcaatagcttacaagctagtttagatgaaaatgcaatatcatgtatagccgaaccaagcgatggttcggattgtgttaatgatttgtgcaatgatgcaacaaccattatagccgaaccaagcgacggttcggattgtgttacttgtttagacaccgatggaatagccgaaccaagtaatggtttagattgtgttgctagcttagagagtaacatcattgaaaatatagccgaactaagtgacggttcggattgtattacaagcggaagtgaaatagcattgtcacctaagaccgaatcacaaatcggtcatgtggatattggaaaagataatgacaatgtcttgtgggatagtggtgaaatagaatccaaagtagctatgcatacatatcaaaggccgtatcctgaacatgtagattcggtcccatacccgcaaggatttgaggtgcccaacttcacgaaattcacaggtgagaatgctatgactacaatggagcatatcggccgctttattgattaatgtggtaaagccggtagcgatgatttgcttaagttgaagttgtttcccctttctttgtcaaactttgcatctacatggtatagtttacttgctcctaattcaatttctacatggtcacaaatggagcatgagtttcatgattatttcaaagatgcaagcttgatggagcaaagaccgattgatacttcatcggtcacttgtgaaacgatttcggttacatctatgtctaagatcggaattgttagtaatcctctccctattagtcctattgatgttaacaaaaagaaagggaaaagtgttattattggggatcctcggcccaagactaggatcaataatgcgaaggccgaagatcataaagttgcaaaggatgagtcatctagtttgcaaaggaccaaaaagccgaagctcacttttgagatgcttatggctaagtacgagaaaggattagcgggtcaacgatttgataatcaaactagtgattcaaaaataccaagatcatctcgtaggaagagatttggtcaaacaccaaagcaattggagccatcaactataccaactccatgcaaacctccgattgtgatgccatggtatccatatccaatgtcactatatggttatccttttatgtattatatgccatggatgcctcaaccacctatgctgtgtcatcaaggatggaagcaatcacctaggacggtaccaagtcattctaactcaagacaagaccgtttcccacgaaagaatcggtccggtggatcaaaggtgaaaaaggtgaagaaggtgtgggtgagaaaagaagacaaagctccggaggtcgttgctatcaaggagaaatctcaggatattcaagtacctactgaagatgcggcgaaaactatacaagcggagaagactgaagccgacgccgttgctgtcgacattggcagtctgaccgagccagccggccggtctaaccgccagactacggccggtctgaccgacccttctagccggtctgaccgacggcttgtggccggtctgatcgggcccaaaggccggtttgaccgggcggcattggataagagtgggaaaattgagagcaacataggagcttccacttcgaccaaaaatatgaagaataattgcttagctcctggaaaacaactacagccgaagtggataccttctggcttatctcgctctcaaaagaggaggctacaacgtcttcgggccataggtaagaaagaaaaggaggccgaagatgtggagaacaagacatgcaataatttagagtctcgaacagcacctagacaagtgtggagacccaaagaggtaaaagttaagagaccggtgatttcccatagaagtaacaaatccaatttgatgagagaagaatcatcggtcattagagataagtctccttcacatgatgctatgggtgttagtgcggtattcgtcttgccttcgaaatcgcacaatctagaaagccgattttgcttggggggcaagacatcaatatgctcatgagggaaccaagggaagatgaacggcgatggatacaacatcacatctttgagccgccgtttgttggatgctaaggcaaggtatgagtttattgtgtttaacattatattatatgcatatgccatgttattagaacattgcttgctatctagcacatgtgtgtttttgcttatcaaattgatattatacatacatgttgcaaatgccaattctaggtagtagaattggtaggttggcatataatttgtttgaagtatgatttggctcatgactctttgatatttatttaaagccaaatcatatgtgtttttatgaatcaccatataagatatagatttcatatttattgcaccatgaaagttttgcttactagtaattcggctaatgtcaatggtcaatgtgatgatttgctctagagtggttttctttaggaacattggcattgttaatattttgcatacatgctcaagccgattacttacatttttagtttattggaatctatgcatgtgacacatatgactttgatgatttattattgatcatacttcaattggctaagtgttgtgatgccatgatgattattttttcaaaagccaattgaattagtattcatctagacatattagttggatattatgatttttcatatgtctagaaaggagttttggttcaataatttgatataccaagcatctggctattatgtgaagaaaaatttatatactaaaagccgatgcttgatttcaaaagtttggacgaaattggcaaagtcatagaccaggggcggtctgactagcattgcacggccggtctgaccggtggtagccagcggtctgaccggctctgcatggccggtctgacagggcagacagggtggtctgaccggcattgcgtggccggtctgaccgatctcgggcagagagctgggggcacgttacaattgattaaaaggccaaattaattatgaattcggacatttgtgctcatgagttagaaatagcttggagaattcctttgattaaatatttgaaagatcctacacttaaggttgatcggaagattcggcggcaagtgctcaaatattatatcgccgaaaaatagatatagtattacttagataatgatcaatctaaagttgctaggagagtagtacatgaagggatttgtgaaattcatcaatatgcccgtaagataaattggttgcttaggagagtggggttttattggctgaaaataattgatgattgtttcaaatgctatagagagatt

SEQ ID NO: 28647 - DNA, 641 bp, Oryza sativa
agttgtaagttccatagtcttgaccataaggcttgtgtgggtgatactggaaagctgatgactctaactcctcatcaaagcgatgacgtagctctccaatggccaccaaggctgcttcctgacaagcatggctgtactttcttcccccagcttcaaactttatcgacggaaggtcttcacgatcactagtcaacgtcacgcgaacacgacacttctcctcattggggtcatagggaatctggcaatactcgggggcaacctcgtaacctacttcaaatgccatcattctcagctccctgacgaatcctagcacctcgatcaagtttttcggcggatggggcggcatataaaggaacattgaaaggaaggaattaatgcatatttttaagttagctgcacaaactagacttaattaaattggacccaaagaaaaagaaaataaaagaaaaggagcaaacatgactcaatttttttttctttttggaacataaatcaaccttgaacagagacaaataacttttgacaaatgaataaattaaaactaaaatatttaggatctaccaggagcacggtacagagtcaccattaacagggatgagtagtactgatgccatcttgattgaatcgataccataatagat

SEQ ID NO: 28648 - DNA, 3841 bp, Oryza sativa
cctcccaccaacccacctcctctccccccaagggcccaaaacccacctcccacctcagtcaaaggccagtcaaaggtcccccacgtcggtcaattctaggtcaaacccgtcggtgactttccccacgaccctctctcttcttagctctcgtctcggaatgacgtagtaacgtgttggtcatcgtatagtaacacaatgttttacttgcagtaacaaaattaaaatttactcataatatacttatgatggatctacttttggtaagcaccttttttttaacatcatggtgcaaacggtttttaaaaatagtacatgatgtgagagatattacccttcaaagatttgtttttgaggatttaactctccacaagtaataatattgtagtaattacaagtggtaacgtgtaattgtcgtgcggtaacacttttacttttgtgcagtaacaagtgtatgattagcatctgagacttttatcgcatatatttttgtttcaattcctgaattactgcaattcaccacaatattacggtcaaaagtgcaataacgtcatatacatgcagtaacgctatattggagggaggaaaccaattttcttgagaagagggaggaaaaacggttcttgaggaggggagtacgtagatgcattttgaagtttaatcctccacatgcagtaacacgataacatcatggtggaaacggttttaaaaaataatacatatcttgtgagatattgcttttcaaagattgacattttgaactttagccctccacatgcagtaacagaatgtgtaatttacagtaacaggggtatatacatgcagtaacatggttttactaaatgtataaaattattcaaaacactcctacatcaatcagaccttgctcaaagctacctacaaactttacctatggcccacctattcgaacttcatctcgtaaaaatgacatagtaacactgcatttatcatgcagtaacatatctacttggaagtggtaacatgcacctattatgtagtaacgcttctacttttgtgtagtaacaagtatacggttagcatgtgaggctttaacccatatatttttgtttcaattcctagtttatgtagtaataatattcaagaaatgcaagacactttgttactgcaaagcttattgtctttactagactcttatagtaacgttgtgatagaactgtagtaacgtacagtagtaacaagtaatgctattgtattactacttgtggagagtcaaattccaaaaagaaaagcttttaagaacaatatctctgatgtcatgtatggttttttaaaaattgtttgcaccatgatgctagaaaaaaaatgcttatcaaaagtagatccatcgtgactatatttcaactatatttgagcgttgttactgcacgtaaaacatagtttactacacggtgaccgtcgcgttactgcacagtttcgcgagacgagagctgagaagaggtgggtggtgaggggagttagtaggtggttttgactgagctttgaccggcgggagggggctttgaccagcgtttgaccgaggtgagaggtggtttttaggccttggaaaggagggggaggtgggtgtggcccttgagagggaggggggtatagaatagttattctataccccgggtgtagaattgtcttaccctatatatattacatatatattacgcacatatatatatggaatacatatatatatatatatatatatatatatatatatatatatatatatatatatatatatatatatatatgcatatgtataaatacatatattacacatgtataatttaaagcacttaacattttatgtgcatatatattaccaaaatatatatttacactaaagtaaatgtgtacatctataaacatatacatgcatgtatagtacaattcatttgctcactatttagctacgacttcgacgcgggcgttatgtcaaaagaagaaggaccgacgttatgaattgtcgatccgtcgtagtagaattcacccttgggattaaggacttgaacagccgtgataaaatccttgtgtgagagattgtccctcatgtgaatacgctatcattcgaaaaataatgacatatgaatatatgaaattaataaacaacaaatcgatacgcaatgaaattttgaatggtttatatatacgtacatcgagctctcgtgtggtgtagatttgggttgataggcagtgggcatactcgtatacgtagtagccgcacaagttagttccctggtcccgctttgcacactacataagaaaggacaagagatttaatatacacttatattaactgtaattagagattcaattcaatataatttcggagcatgcatgtactgattggaaaattaaagctccgtccaagtttttctttccaagtcccgcggaacaattgacggaaccgatcccaagccctacatgcagttgcaagctatgattatttattatccgagatccgcataatagcaataggaaaaatccatgcggctttggaatagatggcattatattacctatctataagttggaaaaccttgtcaaaagtcttctctttattcattgagtcatacacattgactctgcatgcatccaagtcgaaaagtaacaggacccagtggaatctgcaacatgcgtgagatgatatatgaaaatgtacatgttatatgtatgggaacgaagtttgttcgaacgatagtaaaaactcactctgtgttgtacggcagtactatgaacgtcttgaaatgctgctgcgtcaggagatggacgagattgtcctctgtgtctttctcgtacttgtcgatcatttcgacgttgattttctgagggtcgatgaacccagtatcgcaaaccccccgccgtcgggtcttttgaatcttcattctacaacgataaaaggaaattattattgtttacatatatgcaaggagctaattattgaacgaaacaaatcgaactcaacgatacttacaaaatccatgcgctcagaagagagacgttcagggcgttcagatggtatagttcgaagacatccttgaaatggatccagagaacattttctccttgcaagaagtcggagtttcttatcctcgctccgaacatctctctacccttggcgttcatttccatgtaccattcatggaatttgtacatctgtgtcggtagggactgcagctgctcaggcgtgacaagcggtttaccgagttcaaacttgtatgccacttccgtcttcgggattggtgcgcctctaatcaactgttccacagttagaccggtgtcagaaatgaattatgttatgccaatttctttgccgacaccaacggctcgacctcttggttaggttgttctccaagctgaggaactggtttggacttcttgtaataggctttcttaagtgttcggtcatagtccgatagctttaaggcctccttgtttgttgtggacattttcttgaagaagttcttcacgctcgggtcaataggtatcttcttttcaagactccgaggcttgaattgcctcttcacttttgctgccacataagcgtcaagctcctcttgactgcaattgtacagcggctccttgtttttggtggcgtcaacttttgccttcttcgttgcccttgtgcgggcaggcggtggagcttgacgagaccttgtcttgggaggtgcaggcggacatggtggaggtggaggaggcggaggagccggaggagccggaggagatggtacaggaggaggtgacggaggagccagaggagatggtgcaggaggaggtagcggaggagatggcggagccggaggagatggtg

SEQ ID NO: 28649 - DNA, 1216 bp, Oryza sativa
aacttcgaccctcgagtatcctgctggaatcggcctgcagtggtaagtccctgaagggtcagttgggatggccattcctgatgccaccttcacgtgatgagaggttatctattagtaatcaaccgaagcagcaacttgcggaatgtacaagtcaaaaatcataaaactatgagcataccttgactgataagttcttgaaggaaatatgtagctcacatggtgtccgctacgtgatctcatcaacggggcaagtggtttcatcctgagtttgcatggagtccatgctctgtgatcctacctgccccgttgaggctgtcacgccctaaagttcccctccttgcttaaaaattcataaaataaatcgtccgaagaaattgtttaatttaacctagagttgaatccctaaactaataaatgcaaataataatcagaatcggcatgtggaatttttcttggattctacatgtcaaaatatgctaacaggaattttagtagaattttcagagccttagaaataattttaaccaattaaaataagcaaagtgcaatattaaatccctgggaaaatcctttttcctttttatcttttcttttccctcctttttccttttcttgggccgtcggtccattccttcccacaccagcccgcttctcctcccttccccgaagtcctccctccctcctctctccttcgggcgctgacaggtggggcccacctgtcggtcgtctcctacctccggtcgttggagccgcagctccaaccgcccgcaccgccggtgccccacctcctccactcgccccacgtcgtcaagcccacgtcgccgcccccttccccacgccttcccgccccgcgcgcgcggcccgagagggcgggattcggttttgaatccgtctctctctctctctcccccccacgtcgccggccgaatcgggggggtttcccggccgtgtccgcccctcccgagcccctataaagcttccccgcatccccctctcccttttccccttttcaccgcgctctcgcacgccctctaccgcacccgcgccgatctcctctagcgccgccgctcgccgccgtgctccggccgcacgccgccaccgctagagccaccgccgccgttagcttctccgccgccaaagctacctcggccgccgcatccccatccaatcccgctgccggaacgcctctctctccgtgcaccggtgagtttcgccg

SEQ ID NO: 28650 - DNA, 12798 bp, Oryza sativa
  unsure (1)..(12798): unsure at all n locations
atagggcgaattcgagctcggtaccccgggtcatcgccgccgccttcatccttcgggccggccgccgtgctcgccgctgatgatcccctctcctcccttttcccctctctcccatgtgcaccgccgcctttgcgccggtcaccgccgttgtttcccgcctcccgtccgcgtcatcgccgctcgccatgggggccggccggcttgaagccgagccgagaccggccggtgccaccccttcccctgagccactgcctggtgggacccacccgccaggtcacctcctcctcctcttgtgtcactgacccgttgggcccgcttgtcggcgccgcccctcccggataacttcagccctgggatcctttattgcgcaataaaactcattaaggcttttcttttatagtaataaacacagagaatcttctaaaaatcataactaattcatctgagctccgattaagtccattcaagtctcagtaaattcatacaaatgcatagaatccattaaaaatggttttgtttcctgtttcagtagacttatagcttgttttgcttgtgtgctttgtttgtcgcgtagatttcggccgtttcgtcgatccgtggttcctcgaagacattgctgtggttccatcagtacgagagcaaggcaagtcatgcattacgattgatcatattgtacccaatttataaatgtcccgcatttctattaaatgttgcattgttttacaatgtcatgtgggatgggtcctgctactcagccatatattgtttaccttatgtcattgataactggggtatcaaaatgattagatgttggcttaggaaatgcttagccatgcttagttcaactagtacacaaaaggggaattacattcaagcatagactttgattattggcatagctttggattagtgccaccgcaatggtgttggttaattaaaatacactacatggtgggctgtgggtgcatggttttgctagttgtgcccatggcaattaaggactggttcgcgggatgccctggaagaacttaccgtacttaccacaagccagcgtgggcaacggctgggcttgtagtgtagctttcctctagccgacgtacccaggcgagggtgggagtgatggagttgggtcggccggggtgtccggtttatcggcttccggattcaccgcggcacgaaaggggggctgcccgttgcctgctggggacgggggcgaaccctaaggtgtggtgcgatcggttagagggggttatgcgaagggttctgtcacggcctctttccagtatgtcgtggtggcatgtcggcgcatgggaacgtgtcgtgtggctgtgtcttgtgggtacagttgtacacctctgatcagagtaaaactattcgaatagccgtgcccgcggttatgggcggtcgaccagattcaccgtgattagtctcacccctagttagctaatgaactggtgtagttcaggtggttggttgggcctgttgcaacgtggtatagcgttggacagtgattggttaatattgattaattgctacaactgttttactgctttcaactaccgcttttaaatgctagctttatgcaaaagaacctttagcctccttggatatatcctgcatcataccttctcttctggtatgacttgttgagtacagtgggtagtactcagtcttgctctcttttcccccaccctagagttgaagttcttttcagttgaagatgtctcgaagaagttggtttcgtcgctgccgtcaaggatgcctgtggaatggagtcgcccgctgcagaagtcaagtcttcaggcttagctcgttttttttctttcttttccgctgcatttgtaaacttttatatttttgtaagacgtggatctgtatgtcaacaattgtcgtttaatgcacattcagcttagaaattttggttcgtgaatttctgggtgtgacagaggcacagctgctacgattgcctcaggggctgattattacatgaggaatgtacggctggggatcgtggcaccgatgtgcggccatgcgttcatccactttccttgccacctcctcttgcatgctgagctcgtagctcgataccctataatcaagatctgcaatctttgcctcggtatctatcttgctcctcatacgacttctgtacatgtggatgtgcttcttgaatccaatatttgaaggaaccacgccttttcctcgngttcgacctggatgctcgggaatctgcagggcgagtgacagctcgtgcttctctctgtcaggtcggaacgttccctgagaagacgcttccactgcgtccgttagtcgactggcagcctcacgtatttgatcggtgaacaccagggagacaacaacggggttaagcgttccaccgtgagcatagtaccagaacttcgatcgatccggccatttagcggtgaccggttcgatacccctctcaatcaagcttgcttccatctcctcccactttggcactgcgacgctatagccgcctgacccaggtggtgatggtacttcttcttgggggcattttcatatattaatactttaataggcatatattaatactttaatagccatatattaatactttaataatcatatattagaaatcaaataatcatatatgctaagtctatgtttcgtatattaaaactctaataatcttatattaaaactctaataatcatatatgataagtctaataatcatatatgctaagtctaataatcatatattgatactctaataatcatatattagaactctaataatcatatatgttcagtctaagtttcgtatattaaaactctaataatcttatattaaaactctaataattaatatatgctatgtctaataatcatatgtggtaactctagataatcatatctttacatcacttgcctgcgcaaattcctccgagggctagctaccacttcggcttgagggacgacgacgacatattttctgcaacatgcaaaaaaaatgtattagccgaaatgcaaaggaacatatatttttcgttcacgttttcaagtatataatcatatatgctaagtctaataatcgtttaattttctcgttcgtacacgtctcgttcgcgttcgttcacacgtttcgttcacgttcgttcgcgttcgttcgcattcgttcacgtccgttcacttccgttcgcgttcgttcccattcggcattgatggggcggcaccgaaaaggagcggcggtggcgtgccgcagcgggggcggcggcatggcaaggcgcggcagtggcggcggcgttgttggcagtgacggcgcatcgcggggtcggcgtcgacggggttggcgtacgtcgtcgacagtgccggccgggtcgacgtcggggttggcatcggcgggaggcggagtcggggtcggcatcggcgtggcacggcggtgtcgcaacgacgacgacgacgaggcggcggcggtttggagagagagagatcgagaaggcggcggcggcgacgacgacgacagcgagacgacggtgagagacgacagtggcgtcggcgcgtgggatgccctaggcagtggcggtgaaggagaagccgagatcggagaaaaacttctaagtgctggtggagaagacaagtgcgcctcgagcatatcggatctttagtcctagttgattttttcccgcgattgccaaattcttttttaacccggttagggttaagaacctggactaaagataatagcactacatatttaatttcattatgtatgggtttctaaaatagtaaataatgatttcacgtcacaaaattaatgacaaaaccttaaaaatatattaagtggataagcatatgcatgatttaaaattgttaaaaattctaataatcatatctaattagcatatgcatgatttaaaattgttaaaaattctaattatcatatgtaaataccacatgcatgatttaaaattgttaaaaattctaataatcatatataactagcatatgcataatttaaaattgttaaaaattctaataatcatatgtaaataccacatgcatgatttaaaattgttaaaaattctaataatcatatgtaaataccacatgaatgatttaaaattgttaaaaattctaataatcatatataataagcatatgcatgatttaaaacttttaaaaattctaattatcatatataagtagcatatgcatgatttaaaattttaaaaattctaataatcatacataattaacatatgccatacaacaattgatttatatggatattcaatacatctaaaatattttacatcgtgtacacaacaattatggcagtatatcggcgatgacggttgaccgcacgtacttccgcctcacaattgttccttccttgtgatcgctacgtgagtaaggggtgtcttcgtttgataggaggatgatagggtcaaccgtcaccgtgaaagggggttgcccataacactgatcataatcctcgtcagtcttgtcctcaactccgatgatttttcttttgcctgggagaaccatgtggcacttcggctcatcaggccctttgcccttctttcctttgctagatatgtccttcacataaaaaacttgcgttacatcattggcaaggacaaaaggttcgtccgagtatcgaaccttgttaaggtcaaccgttgtcatcccactgtcatctatcgttacgtgtcacgcccagaaattcacgaaccagaatttttaagctgaatgtgcattaaatccctgtctaggaccagccagggtacacaaacgacagttgttgacatacagatccacgtcttacaaaaatataaaagattacaaatgcagcggaaaagaaaaaacgagctagactcggaagcttgacttctgcagcggggcgactccactccacaggcaatccttgacggcagcgacgaaaccaacttcaacaagacagctcccattaggaagatcttcagctcttgtgtgggggaaaagagagcaagactgagtactacccactatactcagaaagtcatactggaagaggaggtatgatgcaggatatatccaaaggaggctaaatgtacttttgcataaagcagacatttcaaagcagtagttgaaagcagtaaaacagttgtagtaattaatcaatattaaccaatcactatccaacactacaccacgttgcaacaggcccaaccaaccacctgaactacaccagttcattaagctaaactagggtgagactaatcacggtaaatctggttgatcgcccattaccgtgggcatggctattcgaatagttttactctggatagaggtgtacaactgtacccacaagacacgattccacacatgtcgccatgccccgaagtatcaccatgatactgcaaaggggaaaatcgtgacaagaccctccgcataaccctcccctaaccatccacaccatgctaaggtttcacccccacccctcaaaaggcagtgggcggtcccctcttgcgccgcggtgaatccggcagctggacaaccagacaccccggccgacccaactccatcacgcccaccctcgccaccggtgactaggaaagggtcgagctatacttcagatcaagcagttacccactcccgcttgtggtaagcacggtaagtctcctagggtttcccgtgaaccggtccttaattgccatgggtgcgaccagcaaaaccatacacccacagcccaccattcagtgtatttcaattaactaacaccatttcagtggcaccaatccaaaactatgctcatagtcaaagtctatgtaataatgtgatccccatctgtgtgctagttgagctaagcatggctaagcatttcctagaccaacatctaatcattttgatacccaagttatcaatggcataatgtcacgccctaaaaattgcctaatttaaaaatacattgtttaagtcatttttagaaattaaattaaaagcctacaagctaaacccaaattatctaggaaaattttcaacataaaaatgagctagataaaattttattaaatactttgcttattcctctatttttaagaattttctgggaattatttgagcaagggaagtatttttaataactgaaacaacatttcacgatttattttaattgaaaaagttctaaaacccctcctttaagttgttgggccatttttgccccaacatttcttcttcccgcgctgccaagccggcccaaagccggccgagctggcccaccagcccaccgagccgccagcccctctcccctcacatggaggctgacaggtgggacccacctgtcggtggtgtctcccacctccagccggccggctgtgcaagccgagcccgagccgagcacgagcatcgccgtgccacctccaatcccaccccaaaccggccccgattcttccggatttttgaggggtttttatcctctcattctcctctatctatccccccaaaaatcggagcaaatcgttgagtattttatcagaatcgaactcgttttcgagtttatctccaaaaccgagtttttgatttcccaagtcgatttcttgcgggaggagtccgatctcttcaatccaaggctataaataggacgccctagtccttctctttcgtttgccccaactcccgtcctctcccgtgcctcctagccgccgcgccgccgccgctaagcttgccgccgccgccggccatctccggcgccgccgcccagccgttgccgccgtcgccgccgcttgccgccaccgcctttaggtgcgtgggagcgaggagaagctcggccgcctctttcccgcagccgccggacgccgtagcccgccggccccgtgcaagccgagccgcccgcgccgtcccttcgtcgacggcccccgtcgtgcgtcgttcggcgtgtaggtgagcaccgtcgggttcgtctcgtcgccctctacgtgtccatgtgctccaaattcgcagccgactgctctagctcgggagaggttgccatcctagcccgccaccattgatgatgtcatcatgacatcatcggtttttctttttcccgattttctaatagattaaattttcggaaaatcataactaaataaccgtagatccgtttcaggtggttcaagttgctaaatttttctaaaatcaagatctacatgttaaaaatatccacatgaactgtttatgcttgtttttgtactgttttgttgatttttgtttaattgctttagtttccgacgtttcggaggagagcgtttccgttaaggatggttccgaagcgtttgcggaagcccaaggcaagtcgcacagatcccaagcaaccctttgagcatgttgaacccgtttaaagctattattttatttcaactatgcattgttttcgaatgtcatcgggtggtgaaccttttccaattaattaatggcctacgatgactttattttcctatgggttataatttgattagcatgaaccttatatattggattggttcagctaaatgctatatgtaagtttgcttagccatgcttagaaacattagctaactaaaggggttaaatatagattataatatactatattattattattaattatggttatatttaatggtagctcacgatggttaatcgtgtgaggttaattaatggataattaaaacttggttaaggtgggttgtgagcatatggttttgatggttgtgctcatgacaattaaggaccggtttgcgagctactgttgtgaaacatttaccgtgccaaccacaagccagcgtgggcaacggctttatcttttgtatagcatgattcattatagtgtgacagactgtgaaacggcgagaagtccatgggggtcgctggggagtccattgcctctggttttgagggggagattatgatccaggaacggtgcactgtggtgagttgtgttgtgcgaggggtaatgtcacagttcctttccgaggtaccgtggtggtactaaggcgcatggtaacatgttgtgggattgtgtcttgtgggtacatgggtacacctctgatcagagtttaatctattcgaatagccgtacccgcggttatgggtgagttgagcaatgtttttcgtgattagtctcacattattcattactggtaattgtgttaattaatgtgattcctggtttggaggtttaatttgttcaaccggggttggttgttcaaatgaggttgggcctatgcaacacgggtgtgttctatggtgtttatttaatattgattaattatacaactgttttactattctcttaagtatttattaaatgatgtttatgcaaatgaggtatattatgccatcctttgttattctgtgcacttgcatatttgctgtgtgacttgttgagtatgtcatatgctcattcttacaatattcaatcatcagaagaggagtgcttcagtgaaggtgatgatctggaggattgagcttcttcctggttatgatgcctgtggagtggagtcgccatagctgttccgtagtttgctttagttttttttctgctgcgtagaatgttattctttgagaggaactatccacctctgtaatatttttttatttgcgaatattaaatagttgattatttgtactctattatcaatttgttattgtgtgcctcggctgattcctggacgagggtttaacacacatgtaagcgtttggaattttggatagaaattccgggcgtgacaagttggtatcagagccaccttgaccttaggacaagccaaatggtaaacctcaagtagccttcaaaatattttgggaaattagaactgctcttctctattctcttacaaattaattaagttggcagcacatgcaaggttatgcacaaaatttatttaacttaattccttttcttttgaaagcaaaacgttgttcttctcaaaatgtttcttatttcgctttattaaacttcattgattagtcggcactgtacatttattatggtatcgattcaatcatgttagcacaagtactactcatcccttttaatgatgatactgtaccatgcttatagtaggtcctaaatattctggttttattttatttatttgtcaaaaattatttgtccctgtttaaaaagttaaattctaaaaatatatatataatagcttagtatgtgtcttttcttttatttttcttcctctttggtcaaatcagttaagtctagatggtgcagctaacttaaaaatatgcattaattcctcccttctatgtttctttagatgccgccccattcaccgagaaatttgatcaaggtgttaggattcgtcagggagctgaggttgatggcttttgaggtaggctatgaagttgctcctgagtatcgccggatttcccatgaccccaacgaggagaagtgtcgtgttcgtgtgacgttggctagtgatcgtgaagactttccgtcccttaagttcgaagctggaggaagatcgtatagccatgcttgccaggaagcagctttggtggccattggagatttgcgtcaacgcttttaagaagagttggattcatcagctttccagtatcatcctcacaagcctcatggtcaagattatggaacttacacctatcctgatggtgaggagagtgccactctgatgcaggcggtgcatatgcttagttctatgtatgcagtaagtgtggagcgagacaaagccgctcatgacagggaaaactggaatcgaggcaagatttgcaagttggagagtaaggtgtaccgtctacagaaggaattagctgagcttaaaggagagacgccgccgccaacacccaagcttcacctcaccgcaaggaagagaacctgtccaccacctcgtctccagttagcttcgaagcttcgcgtgatgggagatgctgtgccagatcgtgctgaacctgtcatccacgtcttaagtgatgaggaagaagaggaatacccagaagaaagagtgccagctactccagaggaagaagatccatcgcttcgttccgacgcaaggcgggattagtcgcttagttagatcgttgccgtagttcgctgtgttagattgcttgtttaagtttgcttgtgagtgtgtgggttttagttgttgcttacatcattggtgggatgtaacagcatgagtctagttcttttgcttgtcagagtgtaagatagttggtgagatagtgttaatgcaatttaaatgtaatcatacacagttaagagcaatatagaatttaaattaattaaataactccgttctaagggtgtctctctgtcgttctttcctgtgtttgtgcttatcttcagatggtgaacacgcgcactggaagtggaagtggagctgctaacaatggaggagattccacgctagctcagattttggcccaacaaacacaactgatcaatctgttagtgcagcaggcacagaatcagcaggcaaacaaccagaaccagaatcaacccccacctccccaaaacaagttggcagatttcttacgtgtgagaccccctaccttctcaagcaccaccaatccagtagaagcaggagattggttgcatgcggtggagaagaagttggatttgatccagtgtactgagcaggagagtttcttttgcttcgcatcagctgcatggtcccgctgctgaatggtgggatcactttcgccaagccagggctgaaggagaacctatcacttggcaggaattcacggccgctttcaagaacacgcacataatgacaggtgttgtagctctgaagaagagagaatttagagcgctcaaccagggatctcgttcggtcactgagtacctccatgatttcaatcgtttagctcgctatgctccaaaatatgttcgcaccgatgaagaacgtcaggagaagtttttggagggactgaatgatgagttgtcttatgctttgatgtctacggatttccgggatttccagcagttagtggacaaggctattcgtcaggaagacaagtacaatcgaatagagcagaagaagcgcagggctgcccaatttaaggctcaacagggcagtaaccagaggtcgcgtctcgttacgggacctcaagctacatcataccctcaaggaggatcttcgtcagttgctcgccctcaacgccagttctacaacaacaatactggtaatcgtggcaatgacaaccgcaacgtggtcgctcgtcctgcagcaactccagctaagaaccagcctgtcaggaaggaacagggaagcaagccaggggtgtgcttcaattgtggtgatccagggcactatgctgataagtgtcctaagcctcggcgtgtgaagaacgctccagccccgaacaactctaatactccagcaccgaaggcacgtgttaatcatgttgtagcggcagaagctcagaatgcaccagatgtggttttgggtacgtttcctgttaattctatacccgcatctgtgctttttgattccggtgctacacattcctttttgtctaaaagttttgcgagcaatcatgggatggaagttattagtcttgggagacctttactagttaataccccaggcaatcaagtatcttcgacacagtattgcccttccgctactatagaaatagaagaagttcctttcccatcctctgctggaatccaaagatctagatgttatcttagggatggattggttatctcgtcacagaggagttatagattgtgccaaccgtaaggtgactttaaccagtagcaatggggaaaccgtttctttctttgtgtcctctcctaaatatcatggtgtgatcttaaaccaagttgctctacaagagatccccatagtacaagactacccagacgtgtttcccgaggatttgccaggtatgccacctaagagagacatagagtttcggatatacttggtacctggaaccaaccctatccataagagaccatacagaatggcagctaatgagttagctgaggtgaagagacaggtgggtgattttcttcagaaaggatacatcagacccagtacttcgccatggggagcaccagtcatctttgtggagaagaaagatcatactcagagaatgtgcgtggattattcagaagaattcagtggagcaatcattcagaagaagaagccacttgggagcgagaagatgaattgaagtcagctcatcctcatctgttcgccagttcttccgaatctcgaggacgagattccgtttaaggggggtaggtttgtcacgccctaaaaatcctaaatatataaattgttgtttaattggaattattagaatttattttaaaagcctacaagttaaactctaataatctaggaaaattttcaacataaaaatggtctagataaaattttattaaatactttgcttgttcctctattttctagatttttctaggaattgtttgagcaagggaagtttttttttaataattggaacaacatttcacaaattattttaattaaaaagttccaaaacccctccctaaagttgttgggccgtttccggcccaactcttctcttcccgcgcgcggccaagccggcccaagtcggcccagccgagccgccccgccccctcctcctctagccaccgacatgtggggcccacatgtcggggtcatccctaacctccagccggccggccgcctagccgagcccgagctgccgcctctctccaccaatttcgcctcttccggtcgccctcgagtccgataaattgaggggtttttatccccacatcttcctctatctttaccctcaaaaatcggagcaaatcgttgggtattttatccga

SEQ ID NO: 28651 - DNA, 810 bp, Oryza sativa
atagccactacgcaagtcaatctttgtgaaaattatagagccacacaactcatcaagcatgtcatctaacctaggaataggatgccgatatcagatagtaatattattaatggctctacaattaacacacattcgccaagaaccatctttcttaggaaccaaaattacaggaactgcacagggactaagtctttgacgtacatacccgtggtctaaaaggtcttgaacttgccgctgaatttccttagtctcctctaggttagttcgataagcagcacggtttggcaatcctgggggtatctcggctggaaagacatcctcatactcctgtaaaaggttagtaacaacaagatgtatcgaactagcaatatcatctaaagaaaccaaggcttgtttgcatatcaagaaatagcacatatcatcatctgaattttcagcaatgtcacatttcgttgcaagcataacaccacccttcgacttaattcccttagccttagaactaggtgaaagattatcctttttaggtggaaaaacagttttagccacttgctgattttcagattcatcaagtttcaaactagcagctcgctctttatcagcttctacaatttcagcaggggtcaaaggtagcaaagtaatttgcgtcccattatgcacaaaagcgtatttattactcctaccatggtgtgaagcatcattatcatgttcccaaggacggcccaacaaaagtgaacaagcttgcataggaaccacatcgcaatcaacagaatctgcatatgagccaatggaaaacgaaatcctacaaacttg

SEQ ID NO: 28652 - DNA, 698 bp, Oryza sativa
attgttactcggctgaaggtcgttgttgcggaattgctctacaacgtcacttgcaatcctgtcagccgcgttttgagcattgttgataagatcaagagcagcctcttcgcttgtcccgtctgcaaagccatcaatggcgtcaatttcaatcctcgggtacaaggatttggtcatcgctaatgccatgccagctcccatacttccagctttcttgatgttcttgaaatatacatccggagcaactctcagcttgtcgaaaatttcggttgcgtcgagtgcactcggaccactgttattgaggaacatagcttggacgagtggtatagcgacattggcgacttcatctcttgctccttcaagcctcttgatcttactaaccaggacgtcaaactgagcttgagatttgattttacgatctacaaaacacatttatgataagaatctgctgcatttaaaagagagacgtccagattgctagctggcagtaccttcaacctccttcaaggccgaatccctttgcgcagccagttctactttgtcttttttcaaggcttcaatttgtttctccatttgaaccatcctggtggcttgcgctgttcgaaatccaaatggttgaggatatagttatgacagcatagattaatgggacaggtctaaaagaataccttttgacaaaccactcagctcgaagtttgaat

SEQ ID NO: 28653 - DNA, 663 bp, Oryza sativa
tttcggagccctcagttcgcgccggcaggccgtcattcgccggcgagaatgcgtgcccaagccgccgccggtggtgacgtcgtcgctgacgtcatcgtcatcatccctcgtggtctagccgtggacgaatggatctcggccgtccattttggatggatcgatctcggccgtccgtttcgtgaaccgccgccgtgcacccggtcaaccgtaaacccgacccgctgatgcaataattcccttttccttttcaaaaataattaattattgcgtcataattcaattaaaatctacataaatgatttaaatcgatttaatctttgaaaattcataactaattcatcttagctcggatttagttggttcaagtctctaaatttttctaaaattgagatctacatgttaaaaatatccacatgtactgttcatgcgtgtttatgtgctgttttggtgattttgttcttttctctttagattcagacgttccgggagagtctgattttgcaggagaagactttgaggatttccaaggccagcaaggcaagtcacacagattcctaacaaccctttgagcatgttgatcctgtttaaagctattgtttctattcaactattgcatttattttcgaatgtcattgggtggaattaacctattatttgttatgg

SEQ ID NO: 28654 - DNA, 648 bp, Oryza sativa
tttaaatacagaacatatggacatacttctctctttgctgccctgtgtttgtagatggttcaactatcaacataggatgctcctcagcataaaagctaataaagcaaaaaaattcagtagttgcatctccatgccatacaaaggaaatcctactatttaatcaactttatccggttgtacacataagaagggatttcactatcagtatatttgaagagcataaataaatatgtaaggtgaaaagatggtgggcataaagcagtaaccatgctgacatccaaaagattccatagaggcatagaagattaactttgttgctgattctaaagaaactatgttaaagatagagtttggttcatcccaaacttccccagaaacaagttaggcacgttcggccttttgcggcaacgggcaagtgtttggccaaccacataagcagtgtgccaaacctggttactccagtgcctctcatgtcatagatttatttttcagacaagttttgccacaagtgtggccagctttttgggcgtgcacttttggcacaaaattactcagatctgcatcaaatagataaagcaactcacctgaaagcatgattccatatattgtcaacaatatcccaatcaataaatgttccatctttcattg

SEQ ID NO: 28655 - DNA, 686 bp, Oryza sativa
ttgctacctttattttacctggagacaatttatatttggcctgtgataatactctattgtagtgtatgtactaaaaggtgtttttattctatttaggagggatcatatggaggttagtttatcaacattctaaaatatcaatattgatgctcatgattttgttaactattgtttatcactgattttcttccatgcccaataggtgatttcaccaatgaaagatggaacatttattgattgggatattgttgacaatatatggaatcatgctttcaggtgagttgctttatctatttgatgcagatctgagtaattttgtgccaaaagtgcacgcccaaaaagctggccacacttgtggcaaaacttgtctgaaaaataaatctatgacatgagaggcactggagtaaccaggtttggcacactgcttatgtggttggccaaacacttgcccgttgccgcaaaaggccgaacgtgcctaacttgtttctggggaagtttgggatgaaccaaactctatctttaacatagtttctttagaatcagcaacaaagttaatcttctatgcctctatggaatcttttggatgtcagcatggttactgctttatgcccaccatcttttcaccttacatatttatttatgctcttcaaatatactgatagtgaaatcccttcttatgtgtacaa

SEQ ID NO: 28656 - DNA, 589 bp, Oryza sativa
  unsure (1)..(589): unsure at all n locations
atttgacgatcaccacggcggcttttcccgagcgacgacgacgaccgaaagaacgncggcgcacggctgaacgaacggcggcgacgcgggcgctagactacacgacgctagggctctaccggcgacaagagacttaggcgagggtggcgccgggtagaggagacaccgggggtccttttatagcggctagggggtggcggcgaaggtccccagcgaccggcggcagcgatgaaaagtctagggttcggggagagagacgaatccgatttgagttcgaatccatggatttccgaacgattttagccgatgattccaaaagagaaaaggtagaggggatctcggggatcatttcccctctatcaatttcaccggatcgggaaagacacgatcgaatttggaagggcagcggcgcggctcggctagggttcggccgggcgacggcgcgaggaagacgacgagtctgacaggtgggtcccacctatcagcgggcgagggcgcgcgcgcagacggtgctcggctgcgggccgacctaggccgggagagagagaggggtttgggccgactttcggcccaaagccaaaagaggatt

SEQ ID NO: 28657 - DNA, 1575 bp, Oryza sativa
atctgaaatgttaaacgtgggactaaccccaaactcaggaggcaactcaagtttatatgcattatcattaatcttctcaacaattttaaaagggccatcaacacgaggcatcaacttagactttctcaattctggaaatctatccttccgcaagtgcaaccatactaaatcacccggttcaaacttaacctcttgcctacctttacttccagcaattctatacttttcagtcatcttttcaatattgaacttggttgactcatgcattttcaaaataaattcagcgcgtgccttagcatcattatgaatcctctcactagtaggtaaaggcaaaatatcaattggagcacgagggttgaaaccatacactacctgaaaaggacttaccttggtagtagaatgtgttgcccgattgtatgcaaactccacatgaggcaaacattcttcccacatcttcaaatttttcttcaaaatagccctcaacatggtatccaaagtgcggttgactatcttcgtttgtccatctgtttgtgggtgacatgttgtagaaaacaatagctttgtacccaacttgttccatagtgtgcaccagaaatgacttaagaattttgcatcaccatctgaaacaatagtacaaggcataccatgcaagcgaacaatctcatggaaaaatagatcagcaatatgaacagcatcatcacttttatgacatggtatgaaatgtgccatcttagaaaaacgatccaccaccacgaaaatactatccctccccctcttagttctaggcaatcccaaaacaaagtccatagaaatatctgcccaaggaatagaaggtacaggaagaggcatatacaaaccatgtggattcaaacgagacttagctttctgacaagtggtgcaacgtgccacgaacctctcaacatcctttctcatccttggccaaaagaaatgcatggccaaaacatcttccgtcttcttagctccaaaatgtcccatcaaccctcctccatgcgcttcctgtatcaacaaaagacgaacggaaccaactggaatgcatagacggttagctctataaacaaatccaccattgagcacaaatttgttccaagtacgtccctctttgcaatttatcatcacttcattaaaatcaggatcaagcgcatattgttctttaattaattcaaggccaaaaatccgacaatcaagttgggacaagaaagtatagcgcctagacaaagcatctgcaatcgcattatctttccctttcttgtgtttgataacataaggaaaagattcaatgaattcaacccattttgcatgtctacgattcaaattattttgagagcgaagatatttaagcgattcgtgatcggagtgaataacaatttttttaggccacaaataatgacgccacgtctctaaggaacgtacaagagcatacaattccttatcatacgtggaataattcaaaacatgtcggatcccaaaactaatgatttggaaaccgacatgtttaactgtatcaagccctggatcagtagattgatataggttcaacaatctggatcttcattg

SEQ ID NO: 28658 - DNA, 7978 bp, Oryza sativa
tcaacttaaaccattgcatgattataatttgagaacaaaataaaatcttttcattcccaacattagactagaaatgtcaccaagcatacatgtacataatgcatgcctaggctcgagttctttgtgcatttggagttttggtcttgcattccataataggtcccatgagcataatctaaaagaattatttcaccaaacaaacctatagttaatcttgggtgataacatgtggacttaatattaaactcaaatatcatcttctcagtctaaaagaaaatttaatgtaatccctataataatattaaatgcaattatgaagtgggaatacatatacaaacaaaggtcatcctaattctctaaaatattttgtgcaagataaaatcatggaaaaatttatgtggatagtgattagcacaaacttatcctccgtaatttggtaacgtgttaacactcaagttgatacctcaaattaaacggtcaaagcagacaactaaaagaaatcaaattaaattttaatcggctaaaaccatgtttcatccaaaagtacatttaactgcacataagtgaacatgggaaataatgtattcaaatactagactagttatcatgcctaaatataatttttctagaattttcctcctctctttaagcctcctaaaaattcaatctagctttctaatagcccatctttgtttaatttctgtgagcagtccacccattatttttttagtgcaaccaaagaaaatggaatctaggtgtaatcatctaccaccagtaaaatctacactaattcttctggtctacacattgaattatgtagttacaaagttagaggagaaaataattccgaaaaaaatgatctaaaaatcaagtttacccagaatcttacccaaccctctcaccctagcctagtttgccatgacctggacccacctggcagcctctccagctcgcccttcctctgtccctcatcctcagccgaccaagaaacacatagagggagagattgagagccgaccgagtcctggacgcgtcgacgcgtggtgacgacgtgtcgacgccttcaagtcactgagtcatgcctccatctcctccagaccgagtcgcccaactccacacatcactctggagctgaagaagccgagggagaggtcctcagcctctccgtcatcctcaacctcgccactggtcgtagtgacgacgaccttcgccatctccgtttgagtcaaggtcacctccatctctttcgcgttcccatctctccacacaatgccgagcatttcctcttttgacctaaacccctctcgtgcagtgcatcgccgggaacgcaagccacgccgacaacgccctggagcacgcaccggagcgccgccgcttcaaccatcgtcgccgtcgtcggccattctcatccacctcagagaaagccgctgcgccattgtcatcgcctcgacctcctcttcaaaacgcctcaagaaccccagccggaaacatcaagaacacggagaacacatccttttcttcaccggcgccaatctaggatcgcctccgccgtcatcgtcgtttaccgctgcctcggtgagccattgttcgattccttgcgcatacaccatctccttgacctcacaaccctcgtgcatgcttgcttgaagcagctcattgtcccgttcgagccgtcgtcgttcacccgaggaggagcgccgtcgccgagccgttccacaagtcaccgctgccgccaagacctcgacaaccctagctcgacccacggtgagcatcctgaagtctagaagactacatgcatgcatccttttcgttcgtaatcgacttccatgcgcacatgcactttcaccccaaaaccaccgccactcacactcgccatcggcgctactccgatgtcctctaaccaggaaaactagaggaatggaatcgcgagagctttctcttcattttatcttttgacctcaacctcaaacgagccaccgtttgccgccggcgagctccagatcgagctcagccatggctagctctgctctgcctagagcagagggatgacttccgtgaattagattaagtgcagggatctgtttacaattgtagaaacacactgacatatgggcctaggactgcgggttgattcctagaaacctcaagggcctttgtgcatattggtccctcacagccatgtggacccatcctttaaaatctgaagaataattaggaaaatgcccaaacaaatatgtttagcagaaaaatgcacaaagttgtaaaatctatataaaatcaaatatagctcattttgaagtgattctagttgctgtagattcttgaagttatgaactttattccaggaatataaaacttgacactcactgtacaaataatgtctctaaaatttatctaagataggtcatacataaaacatgtacaaacttataaaatacatagaaaattcatcacaactcattttgaaacaaaatcaaattctacagattcatcatcatacagtctctgattaggtgaaataaaagtaattacttactttgcatcaaatgcctctaaaactattatctctataatgattagttttagataagctaaactttagaaattcatgtagaacccaatttagcttcaatttgagtaaacttaagttctgtaggatcactaaacatgtatttctaagttatgaaataagattatatacttactgtgtagtaaaagtctctaaatattcatataaggatttactaacatagagcagcctttaatttgtaaaacttgtagaaaatttatttttagtccaaatgaaatgaacaaagtttctatagaaccagcaaatagttatcttcaacatggtaaaataaaatttggaaccttttgtagagaacatagatcgaaaccttaacttagtgaaataagaatttaaacacatagtgttgtttaagtaatacataaacatatataagtatatatatacactttaggtctaattaaacctaaataaaaacttgattgaccagtgaagccatagttccatcctcatataaaacttagaagaacttggctcatataacaatttctaggttaatataatatattgctagtttagattaaagcatctctactttataaaatatgaaccatagtagtaaagaccataaacatgtgagataaaaatgttttagttaaccaaattattccttttattcaacttaaacatgaagtagcatgttctgaacctataactcaggagtcatgcacatataaaacactatatgcctaaaacacgttgtaacttgtaaaatctataagaaaatcattataactccaaaaattgtgaaacaaaatgtgttagtcttagaaaacacatctccacacccctgtgaagtataatctaataaaaatcactttacaaaagtatttcataacactacctaagactatactactataaaccgataaaacttctaaaaattcataactccctaatggaataagataaaataaaaattctttcacctaaattcattttagatcagtaccaacccactgtgcataaatcatgcattttagagcattttggattttcagctctttcggtgtttaattgcatatcgtgtcctttatctagataattgcataatcggtgaagaagtggattaggtgctaacaattctctgatcaaggcaagttttctcctcccatcctttgaacacattgaatcccatgatttgaggaatgaaaatatttgtttgcaaagttgcatgtgaactcagattatatcggtatttgaaattgggttaaggtagttatgacctatttgctgcataccccaccttgaataattgatcctcttgctgtttgaacccctagaaatggttagagtacactctttgtgctcaaatgggtttatatatgctctatgtgcaattactttgcttagccatgcttagaaatatgcaaatgctcattccatttataattaaaatgtggttttgatacttgaaccttcgctagaataaaatgaatatgatgggtatttgcgaactaaaatgtgtaaaatgtgattttacacttgggcagcaagtggtgtgcatacagtgttagttgcataccgatagggggagtgtttgcccaagtccataaggaccgaacttgtgtcacccatttaaagttattcgtacatccatatgtgctagtatgggatggcctaagctgattaatctatttaggactagccttgcattctggtaggccggtgtgtatgagttcgtataattcagaggagcttcctatttaccccgacgtggtagtttaggtgactaagcgtgtccaatacaacggtattgtgccacgtggtgggttcccgtcgtgtccgccaccacggtgttaagtttaaggcgtgggcccgccacttaacggttctaggtatattccaagtatgcctaggatggaggaacacgtatcgtgctggtgcaaggctaggctctaagtagtgtaaaggcttcgttatgacctctagatcacattcaacatgaagagtgtggtggagtcttgcaaactcaaaacaaactagagagttcatatcatgtgggtaaagctgtacaaactctgcagagttctttaaactaatcgattagccgtgctcacggtcatgagcgctttggtgatgtgtcatgagtatagactatgttttaaaaatgtgatcatgtgacactggtttgaaattgataaatgtgttgagttgtgtgtgtggtgatacattatgacttattgttaagtatggcaataagagattgattatgatggaattatgaagaagttaataatgaaacttaaaacttgtctttgttaattgaagcatcaactcttttacaaaagaattgcgaaacaaaacttgctttatgctgaaaatgaactacatattgtcttcctttgaatatatgccttacatgtagtatagtaggattgacttgtgcttgccagtacattaacttgtttaatgtactgactcttgctattgatataaccttttgtttgcaggtttagtcttagtctttgagtgatgcgggttccgattgcttcttctaggatgagaacttaatggggtaaacccctagtcggtgtgcttgtgattgggtagtcaagcttccgctgttctctaataagtctatttggccggttggcctatgtaattattaagttgttgtaagtcttaagtttctttcatcttagttgtgtttgctatgtgtaatcatgcttaagatgaaagtgtgaatctagtgcacatcctgggaactagattcacatgagtatgagttaggaatatttgagaggttgtagatctttagctatttttatcaagtctcctgaatgtgtaacacatctggtcgccgccttcgagtggtttgacgggcacatctcaggctgaagttgactggcaggctaagggctcagcaatgtctccaatattcctctctcgaggcgtcggatgtttcattatgcttgtttgatgacttgaattattcacttcatctcaaatataatggaaggtccggagagcctacgacacttagtcttgggagacaaatagccacactaaaggcaatacagccgaggaatggcaaccttactcacaaggacaaatagtcattaaaaaattatgacagcactaaccatatctaatttcagttcaccaaacttacatttaaatttaggcagtattacggagatctaaatcaacaaacaacaaaccatacttcattgtcaaaacaaatggccttctatgtactttacaaattctcacaagatcatatttgcaatttttcctaaactaattaaccaagagaaaatatgtagtggaggattccacatataatttcacagcataagtacataatacaatatggtataatacacatatgcacagtactttgaaatatgcataccagaacatatgctttagttcactccattcattcttgcattcttgcacattcaacatcaatcagatctaccaagcattcttgtacattcaaccacaagcagatctaccaatgaatcactaacttatgtagcaatgggggaaatcggaggagaattaaaaccattcctcgtcagacgacggaaggacaggaggcggcggaagattcaccggctgcacaccacggcacgcgaatccctgaggtgtgggcatcgcatctatcagcaccaacgacatcggcagaggcaggggtggactggggctctttcgtagaccgatgtaaactagacttgttggcttcgttttagggaggggacggaaaagagataaactttacccggctggcctttgggcctgcgtggagagggataggagtttgcttggtttcagccaaaagataggaagaggattttaaataggttgcatatgcatgctttgtctaaagaaaattcctaaaaataaatgaagcaacaataaatcccaccaaaattctcataaatactaaacaacaccctaagcttccagcaattttagtttgaatttatcacatcaattgataacccaaataaatctttcaacacagctaaaaatctggaaacagcataccaattagcctagtttgcaccttcaccaaaattaaaccataactcctctagcaaaatctcaaggtcagaatgttaaacatactttatcatctggtgcaatggcttagtctaattcgaaatgtaaccacatgaaatgagagccataaattacgtaaactttggaacttggcaccttgaaccatcaaatccttgtctaccttgccgtctcccccctaattctaaattaaatgtatgagagaaagagagtaatatagtttagtgtgatagtgccaacacatggaaaatttagagcttctagttctctccttctacatctctcttaaatgtgggaccaagtccttgtggggcccactcatcatacaaccatagccaacacatcatctgctcttctctcatttaaatcttcttttatttctcaaaaggtgagagaagggtttaaattgaatttccacccaaaatgccactctaccactccaagccttctaggaaacatctatatatgggcctatttgtcgtccaaatacctacaaacaaccttggtgaatcatctctttgatcctaaattatattttcaaagagagaaagaaagagagagagggaattaaagtccaatttacacccaaacttcaccatacctctcatcttctcataggaaacatctacatggggccactagacagccactcatgctaggttgagtgaagtacaagtgggatcatagcctcaattcactgccaactcctttaaatcgtttctacccctcatgttgacacctagctctcactttccaccttcactttcaccattcactactacaaccaagatttttgtgtgagggctaaaatgatttttgcgtgcgggtaaacggcccgcatgcacttaggggtctgggaaaatgacgatttttgcgtgcaggtgaagcaccaccacaggaaaacaaaaacccgaaaaaacataaattttctttaaaaatgaaatcctagaatctggtggtggcgccgccgctcttgcttgccgctgccgcctcctcgtcgtcatcatcatcgtcagtggcggcctccgcgccgctcgcctcggatccgtgctcccctccggccgcaccgccgcggacgcccctcccctccgccggatctagggagggaaggaagaggaggggaggggagatggatgccatgcggggggagggcggccggccgctggatccgtgcgtggacgaccgccaccgctggatttttgcgttgatggccgctgccgctggatccgtgcagggacggccgccgcccgccggatcccacgccctccaccgccacaacgtggaggaggccggcgcgtgcctatgcccaccgcggctgtcaccgcgcgccgccgccgctgccgccatcgggaggagagg

SEQ ID NO: 28659 - DNA, 21862 bp, Oryza sativa
  unsure (1)..(21862): unsure at all n locations
tgaaaggtgtgattttagtgcacatccttgggaactagattcacatgagtatgagttaggaatatttgagaggttgtagatctttagctatttttgtcaagtctcctgaatgtgtaacacatctggtcgccgccttcgagtggtttgacgggcacatctcaggctgaagttgactggcaggctaagggcccagcaatgtctccaatatttctctctcaaggtgtcggatgtttcattatgcttgtttgatgacttgaattattcacttcatctctcaaatataatggaaggtccggagagcctacgacagcatgagatatgggagataaagaatataggacatttatgctcaagagaggaataataacttgccttgctccaacgcaaatgaatccaagataggcaacctgattaaccgattctcgaaataccataggttgccatcccaaaagacaatagactttactgagaaagtggaagaaccaaattcaataaaagccataaaataataagaagacgataaacggctaaaagggctagggtttaaggtataacctatatcttagggattatggggcttgtatttgctagtggtaggtttaggtggtataatacctagggtttagttatatgggagtcgattgtggagtaggatagcatataggttaggctctatattttatgtggaggttctagaggattggaggctagaggggattaagcaattattgtcgcttatattttatgtgaaggctctcgtggtttggatgataggaaatatgctggatagttgatatggttaaataggcatgtggctaatatgggtcaaggttgtacttttgtagaatagtggctagggtttagttgtttaggccgatatcaaggtaggataaatatcggctagggttttgggtgttcgctagtcgtcgctagagttggacggcatgacgactagatttggtatcatttctagccatgtcgatagacagcatatcagctagaagaataggaggtgggtgcaggtttagtggggcggaagtgttactccgacaaccgtgagtggcggcggagcggctaggatcacacagagctcaagagctaactgtgcggcgtgcaatggaggtcgaggggatagtgaagctccgaccgatgtacgcatcaaggcgtggggtgccaggagcagcacttcgaccttgggtttggtttatgccgggctttacaaccaacggtccgacgttgaggtccgtagaccgtgaacgtccccatggaaggcgtaaagttccaaccggcggctttttagtggctaaagggtattttggaaataaaagaaaatatttgaaaagcaaatataagtttaaattgtaaattcaattataagattaaatcaaatatttattcaaatggtatttgaataaattaaagaaattcaaataaaatcttaaaatagcaaatttgatatcaaaatgaagagtttgaatttagatgaatttaggtccaaatttcactggaatcggatctacggtttaggagatatgggcttctaaagattgggatttgaattaaatctagaaaatacgaaaaggtactatttatgggcccacctgtcagtacctgcccttcttctcttcttcttttcttcttcttcttcttcttgccggcaacagagaggagggagggaggtggggcgccggtgctccagtggccaaagtgtggcgacgttagcggtatatcgtgttcccgggcgacgcgcacttggggattgtggtagctagccaagggaaagagggagatggccggaacggcggcgacgagagctcaactccggcgataagagaaggtggtggtggcggtttatctcaagatggagggagaggggaaaggggaaaaatggaatcacctcggtgaggcggagttggtggcgcaagggtttggcttgcgaagctccggtgagggaaatcggccaatggcaaccatggccggacatgggagagaaagagagagagatggagctctgattgtatgtagagaaggggagggatggccggctatttatatgggagagaggtggtggtgaaaggcggttgtggaggaggagatcgagaagcacacggcgacgacagtggcgtgcaaggaagggcaacggcggccggctttcgtttccttagcggcgacgtttgcggcggcgtgagcagtgcacggcacgcgcacgggaggaggaggcggctcggctggggtgtgggctggtttgggccggctcggcttagctgggacggcagcccaagatggtggaggaaaatagaagataaaagaaaagggattgggccaaaaaggaagaaagaatggagtttcggcccgatgacagaaagaaagaagtctaatttgaatacctgatttggataactaggttttgcaaaggatttgaattcggaaagaattcacaaaagagatttcctaatttatttgagtgcaatatttagaggtggagtttgagggaatttgtttggaagcactcaaataggaagggaaattaataatattcctcaaaatatttttgggaatatagaagagaattagttgaaggcaataaataggatttgaactctaaaattggtgttatgtatatttgtggctaaaagagaaattgagtgaagagtataaattgaaattttcttagcacaagagcaattattcacaatatttgcaataatactattcttgtgccgaagaggaaatcaagccacataaattaaattggtggctagatcaaaaggaggaatttggatagttggatcgagaatcaaaggatggttttaagatcaaaggatgggctaacaattaattccaatgagattggaattactttggtttaggttcaagggcaaaattggaggatttcttggaccataattcataatagtaaaaatggttttcaaactaaattcgaataaaagagttttagtcgaaagaaggtttaatattcgaaaataaaatttcaacaagaaataccaaatatgtttttaaatgaaaaacacaaaagggattaaataccagagaggttttatgcgagttagttctaggaggtccagctaattatattttcctaggtctagaaggttattaaaaacataagaatcagcatgatgcaagattagaaaatgacacattttcaggatgttacaaaacaagaccatgcaacttctcgctaaagtatgcaacaggcttaccatcttgcattaacacacctccaatgccaactgcactagcatcacattctaactcaaaagtcttaccaaagtttggaagttgtagcaaaggtgcatgtgtaagcttgtccttcaaagtatcaaaggacttctcctgtatctttccccaatggaagaccacccctttcttcgtcaaatcattcaatggtgcagcaaaagtactgaaatctttgacgaaacggcggtagaatccagcaagaccaagaaagctcctcacctgtgtgatggtttcgggaaccggccaactccttatggcttcaattttcgactcatccacctcaattcccctgtggagtaacaacatatccaagaaaggagactcgttccgtgcaaaagatgcacttttcaagggtagcaaacaaacgtgcatcgcgtagagcattaaaaacagcacgtaaatgatccatgtgttcattcaaagacttgctgtaaatcaatatgtcatcaaagtacactaccacaaatcgtccaataaaaggccttaaaacctcattcattaagcgcatgaaagtactaggtgcattaatcaaaccaaaaggcattactaaccactcatacaacccaaatttagttttaaaagctgttttccattcatctccaagtttcattctaatttggtgatagccactacgcaagtcaatctttgtgaaaattatagagccacacaactcatcaagcatgtcatctaacctaggaataggatgacgatatcagatagtaatattattaatggctctacaattaacacacattcgccaagaaccatctttcttaggaaccaaaattacaggaactgcacagggactaagtctttgacgtacatacccgtggtctaaaaggtcttgaacttgccgctgaatttccttagtctcctctaggttagttcgataagcagcacggtttggcaatcctgggggtatctcggctggaaagacatcctcatactcctgtaaaaggttagtaacaacaagatgtatcgaactagcaatatcatctaaagaaaccaaggcttgtttgcatatcaagaaatagcacatatcatcatctgaattttcagcaatgtcacatttcgttgcaagcataacaccacccttcgacttaattcccttagccttagaactaggtgaaagattatcctttttaggtggaaaaacagttttagccacttgctgattttcagattcatcaagtttcaaactagcagctcgctctttatcagcttctacaatttcagcaggggtcaaaggtagcaaagtaatttgcgtcccattatgcacaaaagcgtatttattactcctaccatggtgtgaagcatcattatcatgttcccaaggacggcccaacaaaagtgaacaagcttgcataggaaccacatcgcaatcaacagaatctgcatatgagccaatggaaaacgaaatcctacaaacttgtgttacctttgctcttccggaatcgtttaaccactgaatatggtaagggtgtggatgtgtacgtgtagtcaagccaagcttcttgaccaaatcagaactcacgaagttgttgcagcttcctccatcaatgatcacacgtgcacgacggttgttgatgacaaagaaaatctgaaacaaattatggcgttgcaacctgtcatgctgctgtacctgcgtgctgagcacccgctgcacaatgatggttctgtagtccgttgtgtcatcacgaccaaagcttcgccatcctcatcctcaacttcttcttcctcctcttcctcttccacgtcggaggtggtgatgtagccatcttctgtagcaacataggcccgttgactagggcaatctttctgcacatgcccaaacccttaacaacggtggcactgaatgcgtcccgtcgaggcgacatatgaggcactcttggcgggtacctgcgaggatcctttacctgactctgctggtcgtggtggtggagatggttttggtgccgcagaagctccgaatgctgctggtcgcttgcccgctggctggaaggatgcccgaaacgaaatggccttgggcagtcccgcagatggcgtcgtgcgcggagtgtatgtgcttgccttgctcttgccctgatggtcgcacccctgtaattccttctctgcaagcataacaaatcgaaacaactggttgacagagttaaattccttataatcaacaatgttctgaatttcctccctcaaaccagaatagaaacgacaaatagcatcctcgaccccctccactatgccacagcgtctcacacccttttgtagctcaccatagtaatcctgtacagatttatccccttgttccaaacgcatcagtttcttgcgtaaatctctatgataagatggaggaacaaacctatcgcgcatagctaccttaagttcttcccaagcagtaggtagtaccccctcatcagataacccagcccaccacataatagcaaaatccttgaactcactactggcttgtctaactctatgttgctcgggtacaaggtgggcattaaacttttgttctaccgtcatctcccaatcaaggtatttctcagcatcataatatcccgaaaaagatggtattttaaacttaaccttagcataaggatcatcgggcacatgattattattattaccttgttggtggcgagtgccacccatacctgtgcggtttgtgcgtaggcgatgtcgtagccatgcttgccttgtagccagtgcatcaatatagccactggaatcatacaccgtgtcttcaggatgagcatcgtcgtcaccactcaccacttcctcattggaaggtgtctccaacgcggcgacctgatcagatagcgtggatatccgcttgtccaacctctccatgtggttcaggaaaccgattttagtgaaggcatcttgaacagactttgcaacggcctccgtgatgtccttttgagtattttgttggagagttcgtagttgctcttggctgacacagtcagcaaaatcctagggactcttctcaccttcgttacctgacattgaaacaccaaaacataaacaaaatggtgaaggttatccctaataatctactacgcaggtgtagtggtgcctctcaacgattctaagcaatatggagttcctaaccaagctcttataaggttcttaccagcaaagcaaaggatacctagaaggcgtagtcagcgattgcagggatcaagaacctgtgctgtgcagaagtaatatgtggagctaggaaggccaaatatatgtatatgagtggtacacaatccaatgacagatagtaatgctgaataaaaatcccaagtcacttgcccatagttgctagtctactcatgtcctagacagtagtgataacaaagatggctcaaagaatatgacactagtaaacagcaaagaaggactggcaggcaagcttcggcgagtttcagcaaaaactacaaaaccgaactggcaaataagctcaacggagcgcgtcatgagctcaatgcactagtggaaatcaacttttctttttttttcttttatttttttgatatttttttcttttttcagaacacaaaaataggcagacctccaagttacagcttaatcggagtaggtatgtggcctatggatttttctgaaaccactataaacaaggtgcaggaacttgtgagctcgaacagacaattttgcaagccaattttcggaattttggattcgccaaacccgccgaaaattttgcaagccgatttttggaatttttgagaaaatttttttctcttatctgaaaagttaaattttgcctgattccgagtccgtatgcaaaagttatggccgtttgaagtttcggcttctggctaggttttccaaaggggatataacctagtctattttgcggtggaattggggatatggtggcagcggagttgtagggtgttctggtggtgatctggatgggtgtttatgatggcggaaacggctctcaaaggatgaaccctagcacacggtgaaaggtagcggctagggttacgaaaggacaaacacacgactagactaaaacacgcattagaccagcaataggaatttagactaggactcaaactcaacactacggactctgaaaaggaatcatgcaaaggctaaacatggtctaggttaaggtaactaacaactaaattttttttgccttttctgtagactctaggataattgcgaaaaacaaaaactaatctagggcaaagaactcagcgaacttgacggtgaacctagagctctgataccacttgatgtgcactatggttcccgatcttccgaaaggttctgataaacaacgatttggacggagtcgcgacacaaatcgatccggcttcttgaacgcgcacgtcttgagccccgcaatcgcagcaccacgtctcctctggttatcaaccatgtcgaaacgcggatgacctcaccgagaaacctaatccctgtttgccagtcgaagaacacaaacaagaacgagatagaaaaacaaccaaaattgcagatgaatgattaagctcacggagttggggtcttacaaaccgatctagcggcgaaactgttctcgacagattaatctaagcaaaacccaaaaacctaaagatggcggtgggtactgatatatagagtttagggtcgtgcaaacccctctcgacgccaccctaatgggttccaacactatacacgggccaaaggcccaaatacggtgacgcagcaccgggacagattctggatgtcaatttgttcggtcatttcccattgactcggaaagaatttagacgtgggaccaaaaccattggaaatgttatcttcttagctttccatccatataaagtatgccccaatccggacacgtatgcgacctgggcgcccgttttagtgcagactggtcctggactccgaattgcacccgacgtcgacttggtttgggcctccaccttgacttggacgtcccagatgatcctccatggctctaagtccttctccaagtgtctccttgtcccctccattgttcctaattacaacataatcattaggtagcaatctattctcgaattcatacaaagaagaacataggaacgagctcacctctaaatttaattgtcgcgcacgagctcttgttatcggtccttgaatgaccgttggaggattgttgtgtgtatccgaggtagtgatgtccgcatcagtaggtacacaggcccgagaataccgatctctttgacaaggtgacaaagcagatgcgtcattatattgaaaaacgaaggtggaaatgtcaactcaaagctgacaagacattgcaccacatcattttgaagggcttctaatctatccggatcgatgaccttctgcgaaattgcgttcatgaaagcacattgctttcttattgttgcccggacattgtctggaaggataccccgaattataactagtagcagttgtgtcatcaacacgtgacagtcatgagactttaggtttgtgaacttcttctcctttatgcttattattcgctttatattcgtggaggacgtccaagaattcccaatagggtaactcccaaaatatagagttctttttccacatcgtcgcgtgaccatctgcgctatcattaggttggctgccaggcccctttccaaacactactttaagatctttcaccatagcaaacattgttttctcactgcgatgtttaggcttcgtacagtggtccgccttatgttcaacgtgcttgcctttctttcgtacagggtggtttgcagcaaggaatcgacggtgacccatgtacacaaccttcctacagtgcttaagatacgtactttctatttcatccatacagtgagtgcaagtcttgtaccccttgttaaactgcctggataggttgctaagtgtaggccaatcgttgatggttacgaacagcagcgctcgtatgttaaactcctcctgtttgtcctcgtcccacacggggacaccttctttcttccacaacagtttcagatcttcgaccagtggtcttaggtacacatcgatgtcgttaccaggttgcttggggccttgaataataatcggcatcattatgtacttcctcttcatgcatagccaaggggggaggttgtagatacacgtcgtaacaggccaagtgctatggccgctgctcatctctccaaaaggattcatgcctgtcacgcccagaaattcactagtaatttctgaactaatttatgcatagaatcctcgtccaggaatcagccaaggtacacaaactgacaatttaatatacaaattcatcataataataacgttacatacttacaaaacaaaagaaaaacaacagcggaattacgatctagcgatggcttcagctccactaccacaggcagctcaattggggtataagccaaacgtcttctccttctggatcctttttcttcagctgaggttgattgattattgcaaggtgagcatatgacatactctgcaagccacatagcaaatatgcaagtgcacaaggataccaaaggatggcataaataggctcatttgcaaaagcagcatttagcaaacatttgagaattgaaaaacagtagagtaattaatcaatgttattcaacatgaacatcacacccatgctgctcaggcccaaccatcctgtacacaaggagctaagcaaattattaccagttatagcatcaataattatttgagaggtgtgacactaatcacgaaaaatattgctcaacccgcccatgaccgcgggcacggctattcaaatagttttgttctggccagaggtgtaccactgtatccacaagacacagctccacgatatgttaccatgcgcctcaataccaccacggtacctcggaaaagaactgtgacggtacccctcgcacaacacaactcatcatagtgcaccaatcctggatcataatcaccccctctataaatataaccagaggcatggactccccagcgacccccatggacttctcgccgcttctcggtctaatgtcctgcaatgaaccttgctatataaaaggtaaagccgttgcccacgctggcttgtggttggcacggttaatgtctcacaacagtagctcgcgaaccggtccttaattgtcatgagcacgagcttcaaaaccatatgctcacaacccaccattatcaagtttaaattatcataacacgattaaccatcgtgagctaccattaaatataatcataaataataatgtagtatgattcattccattaatgagctaatgtttctaaacatggctaagcaattatatatatagcatttagctgaaccaatccaatatataaggtccatgctaatcaatttattacccatagaaaaataaagtcatcttcgaccataattaattgggaaaggctcaccacccgatggcattcgaaaataatgcataagttgaaataaaacattagctttaaacaggttcaacatgctcaaagggttgtttgggatatgtgtgacttgccttacaataatcagtcttcaattaatcttctgaaccacttccgacgctctcacgaaccttcgcaatgacggaaatgacaagctaacacgcaaaacgaagaaaaagactaataaaaaccaaataaacagtacataaaaagtaaacgaacatgtagatcatgattttagatgaattatgagacttgaacggcctcattctgacttcatatgaattagttatgaattttacaagattaagtccaattaaacctattaaagaaaaaaaactattccaaattaattaaacaatttacaaataatttataactgagatataagactaaagcatcctccggaaattattggaatgaatttagtagacgacatatagtaaaaagaactaatatgccattgaaagggataacatgatttatattgattttggaaggctgagatcaactttgacctagttgaccaaaattggatggctcggattgatctgatctaaggttttagatggctgccacgtgggacaaaagagatgacgtggcacttaggtgccagggacggtagctgacaaggcgatgacatggcaaccacgcgggatcgacgtcggctgctctgttcggcggtgaggacggcaaacggcggcacaacggcggaaaccgagagcatggggaggatgaggatgacgcgacgatccttaccaacacttacgcagcgatgaacagcgaaggagatggccggcgacgagatcgggagtggcgatggggtactgatcaacgacggcgacggcgttctccttacagatgcaaatccaatggaggcaacggcgaccgaaggcgacgacggacgacgacgaacagcgcgactggagatcaaaccatggcaacaacccacaggttcacggcgacggcaaccttccggcgggattcggcctcgggtaaggggtggacggggtgtagcttgaccttgcggagccgaaagaggtggcggcgtaggagggcgacggccgaggcgacgacaaacggcggctggagcgactgccggcggcggagaaagaagacgagcgtggggaggcggctagggttagggaaaacttcgggaaacagaagaggaggctgaggggatgctatttataggcaaaggtggaggagatcggctcgggaacgcatgaattcggtgaaggaagttaggatttatcctgagtttccccggataaaaacgaccaaaattcgtgagatagataacgaatttgatgaggcatcttagggatatgatagaggagatagggaggaatccgtttttgcactcaatttggaagggaagcaacggatgcatcgaatttgatgcaggagacggcggctctcgggaagaacacggcctctagacggctggctggagctttaagacgcactgtatcgcgggggaggccaaacagactttaggctgggctgaggaacagggagaagggaggaaggaatggtcccaaaagggcccaagctgaggaggaggatttttattgcttttccaaataaatcaatcaccaaaatgatctttgaattgttaaaaatacttcccatgctcaaataatttcaagaaaaatcctgaaactaattggacacccaaagtacttaactatattataatcagaccatttacggattaatttattatttcaataattgctgaactgctctttgtattattaaaattaggaattgagctctgaaaaatccgagaaaatttcagagagtataattaaccatggagaatttaataaaattaaatccagccattctttatatttaggaaattttatttcccacatttaacttcacttgtaatttaatgagcatttaatataaattctaaataaacacaataaactcataccttgccttagcatctaacaaacggcggctcaaagatgtgatgttgtatccgtcgctgttcatcttctcttggttccctcataagcataataatgtcttgccccttgagcaaaatcggctttcttgattgcacgatttcaaaggcaagacgaacaccgcaccaacatccatagcatcatgtgaaggagacttatctctaatgaccgatgattcttctctcatcatattggatttatcactagtttgggaaatcaccgatctcttaccttttacttctataggtctccacactcgcttaggtgtcattcgaggctctaaattattacatgttttgttctccatatattcggcctccttttctttttgacctatggcccgaagacgctgtagcctcctcttttgagagcgagataagtcagaaggtatccatttcgactgtggttgttttccaggagctaagcaatgattcttcatatttttggtcaaagtgaaagctcctgtgttgctctcaattttctcactcttctccaatgcccctcggtcaaaccggcctctgagctcggtcagaccggccacaagccgtcggtcagaccggccaggagggtcggttagaccggccgttgtctggcggttagactggccagctgttttggtcaggccgccgatgttgacagtaacggcgtcggcttcagtctcctccgcttgtatagttttcgccgcatctccagtaggtacatgaacatcttgagattcctcattgatagcaacgacctccggagctttggcttctttcctcacccacaccttcttcacctttgatccaccggaccgattcttttgtgggaaacgatcttgtcttgaattagatgaatgattctgtactgacctaggtgattccttccactcttgataatacggcataggtggttgatgcatccacggcatgtaatacataaaaggataaccaaacggtgacattggatatggataccatggcatcacaaccggtggtttatatggagttggtatagttgatggctccgattgctttgatgtttgaccaaatctcctcttacgagatgatcttggtctttttgaatcactagtttgattatcaaatcgttgaccggctaatcctttcttgtacttagccataagcatctcaaaagtgagcttcggctttttggtcctttggaaactagatgactcatcctttgcaactttatgatcttcggccttcgcattttttattctattcttgggccgaggatccccaataataacacttttccatttctttttgtcaacatcaatagaactaacagggagagaatcactaacaattccggtcttaggcatagaaataaccgaaatagtttcacaagtgaccgatgaatcatcaaccgatcttttctccatcaagcttgcatctttaaaataatcatgaaactcatgctccatttgtaaccatgtagaaattgaagtaggagcaaggaaactataccatgtagatgcaaagtttgacaaagaaaggggaaacaacttcaaattaagcaaatcatcactatcgcccttaccacattaataaataaagcggccgatatgctccattgtagtcatagcattctcacctttgaatttcgtgaagttgggcacctcaaatacttgcgggtatgggaccgaatctacatgttcaggatatggcctttgatatgtatgcatagctactttggattctatttcaccactattgtcacaccctaaaaatctccaaattataaattttcgtttaattggaattagtagaatttattttaaaagcctagaagagaagatctaattttaattaataaattccaatataaaatggggccagataaaattttattaaatactttgcttaattctataattcctagatttttccgggatttatttgagctaaggaagtatttttaataaatggaattgcatttaatgaataatttaaatggaaaaaggtttttaaaattcccttttggttttgggccgaaagtcggcccaaaccgctctctctctctccctcggcccaagttggcccaagccgaccgcccgcccgcgcgcgcgcgcgcgaccgccgctgacaggtggtgacccctttcctctcgccgaaaccctagccgagctgcgccaccgccgccattccaaatccagccacccctttccgtttccggtgaaattgattgaggggaaaggatccccatgatccactctaccttttcccttttggaaacatcgtctaaatcgctttggaaatcgccggatttgagttcgattcggatcgatctctctcctccaaaccctaaactttccttcccgtcgccggtcgccgtgggccttcgccgccgctccctagcccctataaattgacccccgagctcccctctacccgtcgccactctcgccttagcccgccgccgtctgtagcgccgcctccgcgtgagaccttgagccgccgtcgctgccgtcgctccagccgtgcgccgctgtcgctccggtcgtcgtcaccgctcgggaaggccgccgtcgtgatcgccgtctcgttgccgtctccatccgcaccttctccgtcaccgttgaccgccggaacgccgtcgccgtcgtcaagccgaaggttgctgccgccttttcctcgtcgccgacgtcgtccgttgctcgtccaccgtcgctttggtaaccggtgagttcgcagcgatgcccgcatcgtttcggagccctccgttcgcgccgccacgccgtcattcgccggcgagaatgcgtgcccgagccgccgccggtggtgacgtcgtcgctgacgtcatcgtcatcatccctcgtggtctagccgtggaccgatggatctcggccgtccattttggatggatcgatctcggccgtccgtttcgtgaaccgccgccgtgcacccggtcaaccgtaaacccgacccgctgatgcaataattcccttttccttttcaaaaataattaattattgcgtcataattcaattaaaatctacataaatgatttaaatcgatttaatctttgaaaattcataactaattcatcttagctcggatttagttggttcaagtctctaaatttttctaaaattgagatctacatgttaaaaatatccacatgtactgttcatgcgtgtttatgtgctgttttggtgattttgttcttttctctttagattccgacgttccgggagagtctgattttgcaggagaagactttgaggatttccaaggccagcaaggcaagtcacacagattcctaacaaccctttgagcatgttgatcctgtttaaagctattgtttctattcaactattgcatttattttcgaatgtcattgggtggaattaacctattatttgttatggcccttttgttcttgattactttattctttgataccttgggttaatgtaatttgactagttgagctttatatgatggttcagctagatgttaggcataattgcttagccatgcttagaaacattagcacactactgggataacttatgcttcactattatttaatgatggtttaataatagctcatgatggttaatcatgattggtttattaattaatttgccaactaaaacttgataatggtgggttgtgagcacatggttttgatggtcgtgctcatgacaattatggaccggttcacgagtttcggttgtgaaacatttaccgtgccaaccacaagccagcgtgggcaacggctttactttctgtatagtatggttcattgtagagcaccagactgtgaagtggcggagataagcccacgggggtcatcttcggccattaattaattgggaaaggttcaccacccgatgatattcgaaaataatacatagttgaaataaaaataatagctttaaacgggttcaacatgctcaaagggttgtttgggatctgtatgacttgccttgggcttccacaaatgtttcggaaccttcctcaacggaaacactctatccggaacgtcggaaactaaagcaattaaacaaaaattaacaaaacagtacaaaaacaagcataaacagtacatgtgaatatttttaacatgtagatctcaattttagaaaaatttagcaacttgaaccacctgaaacggatctacggttatttagttatgatttttcgaagatttaatctattagaaaaacgggaaaaagaaaaagatgatgatgtcatgatgacatcatcaatggtggccggaccgagatggtgacctcgccggagattggatggtcggctgcgaacatggaggacatgtacacgtagaggacgacgagacgaacccaacggtactcaccctcgagccaaacgacgaacgacgacggccggcgacgagatgaacggcggcggcggctccggtcggtggtggcgagtaggctccggtggtcggtggctacgggggacgggcggccgggcttcccctcaccttggcacacctattggcggcggcggcaaggggcggcgacgacgaaggcggcggcgcggcgctacccaagttggccggcggcggtggcgagctagccgncggtggcggcggagctacggagcacggaaaggcttggagacggggaaaacgaaagaccagcactaggggatcctatttatagccttgattgaagagatcggactcctcccgcaagaaatcgatccgggaatccaaaacttcggttttgaagataaactcgagaacgagtttgattcggataaaatactcaacgattagctccaattttttgggggtaaagatagagaaggatgaaaggatcaaaaccccttaaacaatcggactcggggaggccggatttgatgcggatttgaaggggaaagggggcggctcgggcggcatggctgggctcggccagccgactgctagaggttagggaagggtccgacatgtggggcccacatgtcggtctcccgagtggagggggtggctggcgggttgggttgggccggctcggtggctttgggccggctcgggcgcgcgggagagagagaagttgggccggaatcggcccaacgacttagggaagggatttttgaactttttaattaaaataatttgtgaaatgttgttccaattattaaaaatacttcccttgctcaaataattcccagaaaattctagaaaatagaggaacaactaaagtatttaataaaattttatctagctcatttttatgttgaaaattttcctagattattagagtttaacttgtaggcttttagaataatttctaaaaatgatttaaaatatgcatttttaatttaggcgatttttagggcgtgacagcccctctgtcagaatagagatccaaggtgtacctttcctgtttaaccttattctgttagaatctaaagatcatgatgtcatcctagggatggactggttagccagatataaaggtgtgatagattgttccaatagaaaagtaactctcaccagcaatgatggtcaagttgtaactgttcatgcattgccctctgaacctcgaaggtcaagtataaaccaaataactttggaagagattcctatagtccgggagtaccctgatgtgttccctgatgatttacctggtatgccgcctaaaagggatatagagttcagaatagatctggtgccaggaacaactctgatccataagcgaccatatagaatggcagccaatgaattggaagaagtcaagaggcaagtagatgatttgcttcagaaaggatacatcagaccgagttcatcaccatggggagctcctgttatctttgtagaaaagaaagaccatacccagaggatgtgtgtggactatcgcgcacttaacgatgtgactatcaagaataagtatccactgcctaggattgatgatttgtttgatcaacttaaaggtgccaccgttttctccaagatagatcttcgatcagggtatcaccagttaaggattaaggaggaagatatacctaagatagcttttactactcggtatgggctgtttgaatatacagttatgtcttttggacttaccaatgcccctgctttctttatgaacttgatgaacaaggtgttcatggaatacctggataagttcgtggttgtctttattgatgacattctcatatattcccgaactaaagaagagcatgaagaacatcttcgtcttgcattagagaagctgcgagaacatcagttgtatgccaagtttagcaaatgtgaattctggttgtctgaagtgaagttccttggtcacgtcatctcagcaggaggagttgtcgttgatcctagtaatgtggaatccgtaaccaactggaaacaaccgaagacagttacagagattcgcagtttcctaggtctcgcaggatattaccggaggttcatagagaatttttccaatattgccaagcccatgacacgactgcttcagaaggatgtgaagtacaagtggtcagaagaatgtgagcagagttttcaagagttgaaaagtcgcttaatatcaactcctattttgattttgcctgatccaaagaagggtttccaagtgtactgcgacgaatccaagcttgggctaggttgtgttctgatgcaagatgggaaggtggttgccaatgcatctcgtcagttacgtccgcatgagaagaactaccctacttatgatcttgagttagctgcagtggttcatgcgttgaagatttggcgtcactatcttttcgggactcgaacagaggtgtatacggatcacaaaagtttgaagtatatctttacccagccggatctgaacatgaggcagcggagatggttggaattgattaaggattatgacctgggaattcattatcacccgggaaaggctaatgtcgtagcagatgccgttagtaggaaaggctattgtaatgctatggaaggacgacagttgccattggaattgtgcaaggaatttgaaagattgaatctgggaattgtcagtagaggctttgttgcagctttagaagcgaagcctactctcattgagcaagtcagagaagctcaaatcaatgatcctgatatccatgagatcaaaaagaatatgaaaagaggtaagctatcggtttcttggaagatgagcaaggaactgtatggttgggtgagagaatctgtgtcccagataacaaagatttgaaagatgcaattctaaaggaagcccattatacgttatactccattgaccctggtagtactaagatgtaccaggatctcaaggaaagattttggtgggcaagtatgaagcgtgagatcgcagaatatgtagcggtatgtgacgtttgtcagcgagtcaaggcagaacatcagaaacccgcaggtttgctgcagcctttgaagataccagaatggaagtgggaggaaatcggtatggatttcatcaccggtctacccaaaacatcgtcgggccatgactctatttgggtgatagtcgactgacttaccaaagtggctcatttcatcccggtaaggaccacctattccggaagttgtttagcggaattatatatggccaggattgtgtgtttgcatggggttcctaagaagatcgtgtcagatagaggtagcaagtttacttcgaaattctggaataagctccaggaggagatgggttccaagctgaattttagtaccgcttattatccgcagacagatggacagaccgaaagggtaaatcagattttggaagacatgttgagagcttgtgctttagacttcggtggaagttgggataagaatttgccttacgcagaattctcgtacaacaacagttatcaagctagtctccagatggctccttacgaagcactgtatggtcggaagtgccgcactcaccggtgcaagaaactacgacggacgacgacgtacggcggccggcgacgagctccgacaacggcacggcttggctcgacgtcgacggcggcgctgcggcggcttgcgacggtggcgaaggggcggccgaggtgatcctcctccgcgcgaacccgacggtggcgacggaaggcgggggcaacggctacaacggcggcgcggcgtggctggaaaggcatcagcgacggcagcggctagggctacgcgccggcgacgctacgggcaacgatagagctcgggacttgaggggaaacatagaggacgactaggggatgctttatataggcttggattagagagatcggaccctaaccaagagggatcgaagccggaaaaaagtagggttagtttggagagataaactcaaaacgaatttgatttggtttattcgggcaaaattgatctccgaaactttagggggaagggagaggataaggaggagatgatttcccctcaagcaatcgaactcggagatggccggttgaggcggaatcgaaggggaggtggcggcgctcgggctcggctcggccggaggtggaagaagaccccgacatgtgggccccacacgtcggcggcttgagaggagaggggcggcggcttggcttgggccggcgtgggccgcacgcagctaagaggagagttgggccggaaacggcccaacagccttggggagggttttaaagacgttttcaattaaaataattcgtgaaatgatgtttcatttattaaaaataccttccttgctcaaataattcccagaaaaatctagaaaatagataaacaagcaaagtgtttaataaaattttatctagctcatttttatgttgaaatttttcctagattattagagtttaacttgtaggcttttagaataatttctaaaaaagcattaaaatatgaattattaatttaggcgatttttagggcgtgcaagtccatatgtcagaatagagatccaaggtgtacctttcctgtttaaccttattttgttagaatttaaagatcatgatgttatcctagggatggactggttagccagatataaaggtgtgatagattgtttcaatagaaaagtaactctcaccagcaatgatggtcaagttgtaactgttcatgcattgccctctgaacctcgaaggtcaagtgtaaaccaaataactttggaagagattcctatagtccgggagtaccgtgatgtgttccctgatgatttacctggtatgccgcctaaaagggatatagagttcagaatagatctggtgccaggaacaactctgatccataagcgaccatat

SEQ ID NO: 28660 - DNA, 1584 bp, Oryza sativa
attttatcttgcacaaaatattttagagaattaggatgacctttgtttgtatatgtattcccacttcataattgcatttaatattattatagggattacattaaattttcttttagactgagaagatgatatttgagtttaatattaagtccacatgttatcacccaagattaactataggtttgtttggtgaaataattcttttagattatgctcatgggacctattatggaatgcaagaccaaaactccaaatgcacaaagaactcgagcctaggcatgcattatgtacatgtatgcttggtgacatttctagtctaatgttgggaatgaaaagattttattttgttctcaaattataatcatgcaatggtttaagttgatcttcacctaaattaaaacggaaatttttggctctctcaaaattggagaagttaacctctaactattttgacaagaaattttaagtcctaaaatttcgggtatgttacactaagaatacaaggaatgtgatagcagccgagaaattgaccatgtttcctcccccctccctttgctttcctagtaggattcggaatactctttggcatgacaatcttaattatctcccatagtctaaaactcacaaaaacatcagaaatacgctaagaataaattaagtaaagaacatgcacacacaaataataataatcatgttgcattaaattgctaaggtcagagaccaacagatgacacattggatagtgctatggccttattaaaagtagcaagagaaattaaatatgcttgtgagcgcacatatgcacgacatacaaatagttgggaccaacagatggatcgactatagatcgctccatatggtcaacaatttattggagataaacattaacataacttggccataacttgaagcaaaacaacatattcttatgaaaggcattaagactggtagcaatgcgagtaggttgttttaggcttgtccttccatcttagcaagaactcccatttcgtccatcttagcaacaactgtgaaattaaaatatggaaatcacattagcgcattagttaattaattttgtagtggaagtagagcataaattgtcttcatgttgcaagatatatgcctgaagttgtcagatgggaagtgaagtcaacaaactatattgatgaaaatgcatggaaggccacacatatgtattagtccacgatatgctacaaagtctgtatctacatataagaagtgcatttaaaagagtgacttcagtgaatttaccagaatcggccagaatacatgggaaacaacaagtgttcttgcagattgagtcggagccaccagcagcaatacaaccaaaacaacatgcttttgcccgagaggatatgcagcagccgcactgtgccgcggtggcggagtcgacagtgaggctcaagatgaccaggcacatgatcaccatcgaagtggtagtcctctttccctccattgcctcctgctgctgatgctaccttccctggttacctagctatgtttcttagttgtgtgttgagaggtgattcttgaatgtaaggtgctgctgctatttataggcag

SEQ ID NO: 28661 - DNA, 2841 bp, Oryza sativa
cctcgtgttgatggcccttttaaaattgttgagaagattaatgataatgcatataaacttgagttgcctcctgagtttggggttagtcccacgtttaacatttcagatttgaagccatacttgggagaaaaggatgagcttgagtcaaggacgacttcaattcaagagggggaggatgatgcggacatcactacctcggatacacacagcaatccttcaacggtcattcaaggaccgataacaagagctcgtgcgcgacaattgaatttagaggtgagctcgttcctatgttcttctttgtatgaattcgagaatagattgctacctaatgattatattgtgattaggaacaatggaggggacaaggagacacttggagaaggacttagagccatggaggatcatcggggaagtccaagtcaaggtggaggcccaaaccaagtcgacgtcccgtgcaattcggagtccaggaccagtctgcactaaaacgggcacccaggtcgcatacgtactcggattggggctttctttatatggatggaaagctaagaagataacctttccaatggttttggtcccacgtctaaattctttccgggtcaatgggaattgaccgaacaagttgatatccagaatctgtcccggttctgcgtcaccgtatttgggcctttggcccgtgtatcgtgttggaacccattagggttgcgtcgagaggggtttgcatgaccctaaactctatatatcagtacccgccgccatctttaggtttttgggttttgcttagattaatctgtcgataacagtttcgccgctagatcggttagtaagaccccaactcgtgagcttaatcattcatctgcaattttggttgtttttctatctcattcttgtttgtgttctttgattggcaaacagggaatagccttctcagcgaggtcatccgcgtttcgacacgggtgataaccagaggagacgtggtgctgcgattgcggggctcaagagcgtgcgcgttcaagaagccggatcgatttgtgtcgcgactccgtccaaatcattgtttatcagaacctttcggaagatcgggaaccctagtgcacatcacctacacaacatgtttcctttcgagaggtacatgggcgttctgaagaagtatgtttgtaaccgtgctcgtccagaggcaagcattagcatggggtatggaatagaggaggtcattgaattctgcgtagaatttatcgaagacctttgcccaatcagggtgcctgaatcacgccatggagactacggggaaaggggactctcagaaggaacgcagcaattacggtagacaataatttattccgtaaagcccatttcacggttctgcaacaatcttcattggtggctccctacatcaaggagcacttggctctagttcgcgccagaaacatcggtaaatccgatgcatggattacacggcatcacattgatactttctccgcgtggctgcgacaacatctcatgggtaacgagacgattaaccaacaactggccttcctggcgaggggaccatctggctcgatcgcaacattctagggatatgaaatcaatgggtacacattctacacgagagcccaagacatgaagagcacgaaccagaacggtgctgttcgtatcgatgccatgggacacgatggtacaactggcacctattacggtgccatcgaggacatatgggaacttgactatggacctctcaaggtacctctgttccggtgccaatgggttaggttgactggtggaggcgtaacgattgatgacagtgggatgacaacggttaaccttaacaaggttggatactcggacgaaccgtttgtccctgtcaatgatgtaacggaagttttttgcgtcaacgacatatctagtaaaggaaaaaagggcaaagggcctgacgagccgaagcgccacatggttctcccaagaaaaagaaaaatcatcggagtagaggacatggtttgatgggcaaccccctttcacagtgacgattgaccctagcatctatcacaccctaaaaatccctaaatatataaattgttgtttaattggaattattagaaatgattttaaaagcctagaagaaaagatctaattttaaataataaattccaatataaaagtgggctagataaaattttattaaatacttcacttgattctatagttcctaggtttttctgggatttatttgagccatggaagttattttaataaatggaattgcatttcatgaataatttaaattgaaaaaaggttttaaaagtcttcttttggctgcccaaaaccctctctcaccctctcctcggcctagccggcccaagtcagctcgcagccgcccgctcgcgcgctctctctcccgctgacaggtggggcccacctgtcggggtcgtcgtcttcctcccgccgccaagccgcgccctagccgccgccgccgcccttccaattcggttgcccctttccttctccggccaaatcgattgaggggaaatgatccccgggatcccctctaccttttctcttttggaatcatcggctaaaatcatttggaaatcggtggattcgatctcgaatcgaattcatttctcgcccccgaaccctaactttccatcgccgtcgccggccgccgtgggcctccgtcgccgccctctagcccctatataagaacccccaggacctcctctttccgtcgccaccctcgctttagctcgccgccgcctgtagcgccgcctccgcgagaacttgtgcgccgccgtcgccgccgcttgtccagccgtgcgccgccgccgctccggtcgtcgtcgtcgc

SEQ ID NO: 28662 - DNA, 11236 bp, Oryza sativa
gtccatctttagatgtcagacctgttctccgatcgcaagcgccgctccgagcttcagagtcgccgcccttagctttatcgtctttcttagtttgttgtttgctagtttctgtgtttaggtctgctgcttgtgggttagtcggcggtcgatatcatgtgtgagtggtatggctgccttaattaggagttgtttgcttccttttcggtgttttaatcaaaattaagataattgtacctaaatttataagaaagattagattctgagccccctgtttttcttccttttctcatatttctacctatcccccttcagatggtgaagacaaggaatggttcccgggaatccaacaacgccagtggcagcgaagagcagatcagtggagcacgtgcaagcgatgcatctagcagcagttcatctccaccgcccgagaacccaacgattgctcaggtgttggacaatcagactcagatgatgacaatgatgatgcaacagatgcagcgacagcaccatcaggtgttgtagcaggtgcatcagcaagcacagcagcagcagcagaacctgcagtttggtcctccacctccacagtccaaactgttagaatttctctgagtcaagccgcccattttctcaagtaccaccaacccaatcgaggccaacgactggctccatgcgattgagaagaagctgaatcttttgcaatgcaacgaccgggagaaggtcgcttttgctacacaccagctgcaaggtcccgcttctgtttggtgggacaactacatggtgaccagtccagctgggacaaaggttacttggtcagagttttgtcagaatttcaataaagcacatgttccagagggaatcgtggcacaaaagaagagagagttccgttctctgcaacaaggaaccagaacagttatagagtatctgcatgagttcaaccgcctcgcgcgctatgctcctgaggacgtgcgcactgatgctgagaagcaggagaagtttttgtttggtcttgatgatgaattgaccaaccagctgatctccagagactatgaggactttgagaagcttgtggacaaggctatccatcaggaggagcagtgtaacaaaatgaaccgtaaaagaaaggtcagttcaagacttcccaggggaaaagtcagaagcctcgcttcacgatgggatgtcagggtgcaccttccaccatgattatctggcaacatcgtccgtaccacccgggtaatttcaacggcatcaacaacagtggcaggcacagtaacagtaagcagcacagcctcaaccttactctaagtcgactaatgattccagatcagtcagttcagtcagctctgccagctcagccagaacagccccagaggtttggaggaaagcccaaactctgcttcaattgtaacaaacccggacacacggttggaaagtgtcaatcatgcgtatgcagaggaggcgcagtcagcaccagaggttatattgggcacatttcctatcaactcgacaccggcagtaatattgtttgactctggtgcaactcattccttcatttccaagcgttttgctggtgcacatgggttatctttagtgaagcttaagatacctatgcgagttcatactcctggaggtggcatgaccacaactcactattgcccgtcagtgacagttgaaatccaagggttgatttttccagccaacctcatttttcttgaatccaaggatctagatgttattctgggaatggattggctgacaaggcacagaggagtgattgattgcgctagccgcaccatcaagttgaccaatgcgaaaggagaagtggtaaccttcccgtctccagtaccgcagaagccagggatcagtctgaaccaggctactagtgaagaacaagaggtagtagtggataaaaccactaagaagttggaggatattcccatagtcagagaatatccagaggtttttccggacgatctgacaacaatgccaccaaaacggaatatcgagttccggattgacttggtacctagaactgcaccgatccacaagaggccttacagaatgggagccaacgagttggcggaagtcaagaagcaagttgatgaacagttacagaagggatacatccgcccgagcacgtcgccatggggtgctccagttatttttgtggaaaagaaagataaaacgaaaaggatgtgcgtcgactaccgcgcactcaatgaggtcactattaagaacaagtatccgttgccaagaattgatgatctgtttgatcagttgaaaggagctactgttttctctaagatagacctgcgatcaggctatcaccagttgagtatccgtgaagaggatattccaaagacaacattcatcactcggtatgggttgttcgaatgcacagttatgtctttcggactcactaatgcacctgccttcttcatgaatttgatgaacaaggtgtttatggaatttctagacaagtttgtagtggttttgatcgatgacatacttatctactccaagtccgaggaagaacatgagcagcatcttcagttggtacttgaaaagttaagagagcaccagctatatgccaagttcggcaattgtgacctctggcttaaggaagttcagtttctcggtcacatcgtgaatgctcaaggagtagctatggatccaacaaatgtggagttagtcaccaaatggaccccaccaaggacagtcactcaggttcggagtttcttaggactcgcgggctattaccgccggttcattgagaacttctctaaaattgccaagccaatgacacagctcttgaagaaggaagaaaagtttatctggtctgctgaatgcaacaggagtttcaaagaactcaaacgacggttggtgtccacaccagttttaattctgcctgatcagacaaaagatttccaggtttattgtgatgcatctcgccaggggctaggatgtgtgttgatgcaagatggcaaagtggtttcttatgcttcacagcagttgcgtcctcatgaaggcaactaccctagccacgatctggaattggccgcagtcgttcacgccctaaaaatcctaaatatataaattgttgtttaattggaattattagaatttattttaaaagcctacaagttaaactctaataatctaggaaaattttcaacataaaaatggtctagataaaattttattaaatactttgcttgttcctctattttctagatttttctgggaattgtttgagcaaaggaagtttttttttaataattggaacaacatttaacaaattattttaattaaaaagttccaaaacccctccctaaagttgttgggccgtttccggcccaactcttctcttcccgcgcgtggccaagccggcccaagtcggcccagccgagccgccccgccccctcctcctctagccaccgacatgtggggcccacatgtcggggtcatccctaacctccagccggccggccgcctagccgagcccgagctgccgcctctctccaccaatttcgcctcttccggtcgccctcgagtccgattaattgaggggtttttatccccacatcttcctctatctttaccctcaaaaatcggagcaaatcgttgggtattttatccgaatcgaactcgttttcgagtttatctctaaaaccgagtttttgatttcccgagtcgatttcttgcgggaggagtccgatctcttcaatccaaggctataaataggaccccctagttcccctctttcgtttgccccttttcccaagccttcccgtgctccgtagctccgtcgccaccgccgcctagcaagccgccgccgccggccatctccggtgccgccgcgccgccgtctccatcgtcgtcgccggtcgccgtcaccaccgttgggtgcgccgtggtgaggggaagctcggccacccttccttttccgtcgccggtcaccggagctccgccgccccgtgcaagccgagccaccgccgccgccccttagtcgccggccctcgtcgttcgtcgtttggctcgagggtgagtaccgttgggttcgtttcgtcgttctccacgtgtacgtgtcctccaaagttccggccgaccgccctatctccggcgaggtcgccaacccgggccggccattgatgatgtcatcatgacgtcatcatcggttttccctttttccagttttttttctaatagattaaatcttcggaaaatcataactaaataaccgtagatccgtttcaggtggttcaagttgctaaatttttctaaaatcaagatctacatgttaaaaatatccacatgtactgtttatgcttgtttttgtactgttttgttaattttttgtttaattgctttagtttccgacgttccggaggagagcgtttccgttgaggaaggttccgaagcgtttgcggaagcccaaggcaagtcacacagatcccaaacaaccctttgagcatgttgaacccatttaaagctattattttctttcaactatgcattgttttcgaatgtcatcgggtggtgaacctttcccaatggttagcggccgaagatgatcttattttcctatgggttataatttgattagcatgaaccttatatgttggattggttcagctaaatgctttatgtaggtttgcttagccatgcttagaaacattagctaactaaagggattaattataaactatgttactttattattttaattatggttacattaaatggtagctcacgatggttaatcgtgtgatgttaattaattgataattaaaacctggttaaggtgggttgtgagcatatggttttgatggttgtgctcatgacaattaaggaccggttcgcgagctactgttgtgaaacatttatcgtgccaaccacaagctagcgtgggcaacggctttatcttttgtatagcatgattcaatatagtgcgccagactgtgaagtggcgagaagtccacgggggtcgctgggtagtccatgccttgtttataagggggtgattatgatccaggaaaggtgcgctgtaatggattatgttgtgcaaggggtattgtcacaactcctttccgaggtaccgtggtggtattgaggcacatggtgacatgatgtggggttgtgtcttgtgggtacagtggtacacctctgatcagagtttaatctattcgaatagccgtacccgcggttatgggtgagttgagcaatgtttttcgtgattagtctcacctttctcaccatagtaaatgatgctttaattggtaataatttgattagctcctggtttggaatggtatattcctggtttggagatagaactgtgcacccgggatggttgttctgaatggttgggcctatacaacagggtatgttgtatagcgttggattaatattgtttattacttaactgttttattaaattctcaaatgtttgctaaatgctgtttttgcaaatgaaactatattatgccatcctttgttatcctgtgcacttgcatatttgctgtgtggcttgttgagtatgtcatatgctcattcttgcaatattcaatcatcagaagaggagtatttcagcgaaggtgatgatctgaaggattgagcttgttctggttaagatgcctgtggagtggagtcgccatagctgttccgtagtttgttatagttagtttttttccgctgcgtagaaggttatttttttgagaggaactatctacctctgtagcaatttattatttgcgaatattaaatagttaattatttgtactctattatcaattttgttattgtgtgcctcggttgattcctggacgagggtttaacacacatgtaagcgtttggaattttggatagaaattccgggcgtgacaagttggtatcagagccaccttgaccttaggataagccaaatggtaaaccttaagtagccttcaaaatattttgaaaaaaatagaactgctcttctctattctcttataaattaattaagttggcagcacatgcaaggttatgcacaaaattaaattaattcattttcttttcttttaaaagaaaaaaaaattgttcttctcaaaatgtttcctattccgccttagtaaacttcattgattagtcggcactgtacatctattatggtatcgatacaatcatgatagcactagtactactcatccttcttatggtgacactgtaccgtgcatataatagatcataagtattttagttttattttagttatttgtcaaaaaaaaattatttgtctctgtccaaaaagttaaattctaaaaatatatgtataatagcttaagtatgtgtcttttcttttatttttcttcctctttggtcaaatcagttaagtctagatggtgcagctaacttaaaaaaaaatgcattaattcctctcttctatgtttctttagatgccgccccattcaccgagaaatttgatcaaggtgttaggattcgtcagggagctgaggttgatggcttttgaggtaggctatgaagttgctcctgagtatcgccggatttcccatgaccccaacgaggagaagtgtcgtgttcgtgtgacgttggctagtgatcgtgaagaccttccgtccattaagttcgaaactagaggaagatcgtacaaccatgcttgtcaagaagcagctttggtggccattggagagttgcgtcaacgctttgaagaagagttggattcatcagctttccagtatcatcctcacaagcctcgtggtcaagactatggaacctatacctgtcctgatggtgaagagagtgccactctgatgcatgcggtgcatatgcttagtgctatggatgcagtaagtgtggagcgagacaaagcagctcatgacagggaaaattggaatcgaggcaagatttgcaagttggagagcaaggtgtaccatctacagaaggaattagctgaacttaaaggagaaacgccgctgccaacacccaagcttctcctcaccgcaagaaagagaacctgtccgccacctcgtctccagttagcttcaaagattcgcgtgatgggtgaagttgtgcccgatcgtgctgaacttgtcatcgacatcgtaagtgatgaggaggaagaggaagaccctgaagaaagagagccagctactccagaggaagaagatccatcgcttcgttccgacgcaaggcgggattagtcgcttagttagatcgttgccgtagttcgctgtgttagattgcttgtttaagtttgcttgtgagtgtgtgggttttagttgttgcttacatcattggtgggatgtaacagcatgagtctagctcttttgcttgtcagagtgtaagatagttggtgagatagtgttaatgcaatttaaatgtaatcatacacagttaagagcaatatagaatttaaattaattaaataactccgttctaagggtgtctctttgtcgttctttcctgttgtctctgcttatcgtcagatggtgaacacgcgaactggaagtggaagtggaagtggaagtggagctgctaacaatggaggagatcccacgctagctcagattctggcccaacaaacacaactgatcaatctgttagtgcagcaggcacagaatcagcaggcaaacaatcagaaccagaatccacccccacctccccaaaacaagctggcagatttcttacgtgtgagaccccctacctttttcaagcaccaccaatccagtagaagcaggagattggctgcatgcggtggagaagaagttggatttgatccagtgtactgagcaggagaaagtttcttttgcttcgcatcaattgcatggtcctgctgctgaatggtgggatcattttcgccaaggcagggctgaaggagagcctattacttggcaggaattcacggccgctttcaagaagacacacataccaacgggtgttgtagctctaaagaagagagaattcagagcactcaaccagggatctcgttcggtcaccgagtacctccatgatttcaaccgtttagctcgttatgctccggaagatgttcgcaccgatgaagagcgttaggagaagttcttggagggactgaatgatgagttgtcttatgccttgatgtctacggatttccgggatttccagcagttggtggacaaggcgattcgtcaggaagacaagtataaccggatggagcagaagaagcgcagggctgcccaattcaaggcacaacagggcagtaaccagaggccgcgtctcgttacggaacctcaagctccatcgtaccctcaaggaggatcttcatcagttgtccgcccccaacgccagttctacaacaacaatactggtaatcgtggcaatgacaaccgcaacatggttgctcgtcctgcagcaactccagctcagaaccagcccgtcaggaaggaacagggaagcaagccaggggtgtgcttcaattgtggtgatccaggacattatgctgataagtgtcctaagcctcggcgcgtgaagaacgctccagccccgaacaactccaatgctccagcaccgaaggcacgtgttaatcatgttgcagcagcagaagctcagaatgcaccagatgtggttttgggtacgtttcctgttaactctatacccgcatctgtgctttttgattccggtgctacacattcctttttgtctaaaagttttgcgagcaatcatgagatggaagttattagtcttgggagacctttactagttaataccccaggcaatcaagtatcttcgacacagtattgtccttccgctactatagaaatagaagaagttcctttcccatcctcacttatcttgctagaatccaaagatctagatgttatcttagggatggattggttatctcgtcacagaggagttatagattgtgccaaccgaaaggtgaccttaacctgtagcgatggggaaaccgtttctttctttgtgtcctctcctaaatctcatggtgtgaccttaaaccaagtcgctctacaagaaatcccagtagtacaagactactcagatgtgtttcccgaggatttgccaggtatgccacctaagagagacatagagttccggatagacttggtccctggaaccaaccctatccataagagaccttacagaatggcagctaatgagttagctgagataaagaggcaggtggatgatttgcttcagaaaggatatatcaggcccagtacttcgccgtggggagcaccagtcatctttgtggagaagaaagatcatactcagagagtgtgtgtggattatcgagcgttgaatgaggttactatcaagaataagtaccctctacccagaattgatgacttgtttgatcaactggaaggtgctacagttttctccaagatagatctccgttccggataccatcaacttcgaatccgtgaggaagatatatcaaagaccgcctttacaacccggtatggtttgttcgaatgtaccgttatgtcatttggactcactaatgcccggcctttttcatgaatctgatgaacaaggtgtttatggaatatctggataagtttgtcgtggtgtttattgatgacattcttatttactccaagacaaaagaagaacatgaagagcatcttcgtctagctttagagaaactacgtgagcatcagctctatgccaagttcagtaaatgtgaattttggttgtctgaagtgaagtttcttggtcatgtcatctcatccggaggagtggcagtagatccaagcaatgtggagtcagtgttaaattggaagcaacccaagacggtttcagaaattcgtagtttccttggacttgcggggtactaccgcaggtttattgagaacttctcaaagatcgccagaccaatgactcgtctgcttcagaaggatgtgaagtataagtggacagaagattgcgagcaaagtttccaagaactgaagaaaaggctagtgactgcgcctgtgttaattctgcctgattcaaggaaaggttttcatgtgtattgtgatgcatcccgactcggtttgggttgtgttttgatgcaagaaggaatggtggttgcctatgcatctaagcaattacgtcctcatgagaataactacccgacgcatgacctagagttggcagctgtagtgcatgcattgaagatttggcgtcattatcttttcggtaaccgtacagagatgtatacggatcataaaagtttgaagtacattttcactcaacctgatttgaacatgcgtcagtgaagatggttagagttgattaaagattatgatatggaaatccattatcacccgggtaaagcaaatgttgtagccgatgccctcagcaggaaaagctattgtaatatgtcagaaggtcgacatctaccttgggagttatgccaagaatttgaaaagctgaatttggggatagtcagcaaaggttttgtggctgctttagaagctcaacctaccttgtttgatcaagttagagaagctcaagggaatgatcctgacatccaagaaatcaaaaagaacatgagaagaggaaaagccatcggttatgtagaagatgagcaaggaactgtgtggttaggagaaagaatttgcgtacctgataacaaggagttgaaggataccatcgtgaaagaagctcatgaaactttgtattccattcaccctagaagcactaagatgtaccaagacctaaagcaacaattctggtgggctagtatgcgacgtgagatagcagaatatgtggctctatgtgatgtatgtcagcgagtcaaggctgaacatcagaagccagccggtctgttgcaaccattgaagattccagagtggaagtgggaagaaataggtatggattttataaccggtctacccagaacgtcggcaggacatgattctatttgggtagtggttgacagattgactaaagtcgctcatttcatacctgtcaaactgtcaaaacaacctacacggggaataaacttgcagagctatacatggccagagtggtatgtttgcatggagttcccaagaagatagtgtcagatagaggtagtcagtttacctcgaagttttggcagaagctacaagtagagatgggtacccgtttgaatttcagtaccgcttatcaccctcaaacagacggtcagacagaaagagtaaaccaaattttagaagacatgttgagaccatgtgttctagattttggtagaagttgggataagaatttgccg

SEQ ID NO: 28663 - DNA, 4884 bp, Oryza sativa
  unsure (1)..(4884): unsure at all n locations
ttcattccagaccttttgtatttctattttctttgttcgcacgtatttctctcttgctcaatgcatcggggaggacaactagagatcgtcaacacattttataaggacttggtcgctcgatacacatgcacatttagttcctcccggtaagttcgtcgtcgactcgtcgtcggatcgtcgcccggagccataatgcaaacgctcgacaagccgacgatggcgtcggagctgagggcgatggcatggacggtgctgctcgtcccggcgtgcgcgtggtacgcgcgctcggcctgccgccgcctacggccaggactgccccgcctcgccgcgctcgccccgacgttccccgtcttcgtctacctgccgtgcctgttcaactccctccacttccgcctcttcagcaccttcttccacacctggctcgccatcaacaagctcgtcctcctcgcgctcggcatcggcccgctacacccgtccctccccctcgtcccgttcgtcctctgcgccagcctccccatcaagctccgcctcagccagcagccgcccgccgtcaagcgttctccttcgtcgccgccgccaccgcccctcgctgacttcctccgtccctgcgcccggagctttttcttcctcagctgcctcttcgtggcgtacccgcacacgggctggctacccgtgtacgccgtccacttcctatactgcgtccaggtcttcctcacgctcgacctcgtcctctcctccgtcgcgctcgcctcggcgaccgtcctggacgccggcctggagaggcagttcagcacgccgctcgccgtcgcgtcgctgaacgacttctgggggcggcagtggaacctgatggcggtggacctcctccgggcgtcggcgtacgagcccgtgcgcgcgcggtggggccgcgacgccggcgtgctggcggcgttcctcatgtcgggcctgctccacgagctcctctacctgtacctgacgctgcggcggcccaggggggagatggtgctcttcttcatgctccacggcgtgtcccagatcgccgagcgctgggccagggcggccgggctgtggcggccgcccaaggtggcggcgtacctcctcgtcagcgccttcatggtcgtcaccatatcggagctcttcttcgggccgttcatgagggccggggccgacgtgcggctgatggaggaggccgcggcgatgctgcagttgatcatgggcgtctcgaggcgtctgctccgaccgtttggggtggtttcgagcctctaatcatctacgggccggtgttatgtactctgtgtacgtgccactgtgccatctgggcctatatatgttcgagtgttaatttgtggcgctggatgcagaatgacgaaagtttcgttctcagttgagtaccaccaagatgttgtcatgtaacataataagaactcattccctttgcatgataattctgcccatatgtcagtttgtattgtagagcacactattgcttgcaacatcagtacatttttattctttgttccaaaacttgaacatttctcttcattcgagagggattctaatctccctggttaacgttcactcgtttacatgttaactaaattgttatatttttttaaaaaaaatgacaatataaatcaatgtgtaatagatttaaatttgatatatgcaaatttaaatcgacttctacaagttataccanaaatacaattttannctgtaaatatacgtataatagtagcgtcaaatttgttatttctgttacgacttatataaaagccaattttaaagtcatgtattacatattaatttatctttattttctaaaagaatcttataaccatctgggcgatatataataaacgagtcaacattcatcccgatgcttaagaaaatgtttcccctctccatcggttcaagtgttcaatagaggagttgtgtcatagcagcggccgcaggctcctccaactccatctcaggttctcaacacatagttagaacatgggaaactattctgaactctagagtaaacatcccctcgttatctgcatattgcctaaatggttatgaaaaaaattaaaaaaataatcaagaagatatataaatatgtgataaattactccacaaatatgtaaggtcaaattcaaattctactagttgcaacgaaaaaaacaaatttcattgtgcaatatgtgataaatcactccacaaacatgtaaggtcaaattcaacttctacaagttgcaacgaaaaaaacaaatttcattgtgaatatacgttaaccagtcatagtttaatttgtttattttgttgcaacttgtagaagttgaattttaactaatatgtttgtgaagtgatctatgtattaatctatctagttgaatgttttacatttttttcataacaattcaggtgacatgcaaataacgagatgatgtcctttgagagtttaaaatccacccccgtcagaacattttgtttggaaaagcctggtcgatacatggcatggcccacgttccctttgcaacccgtcacctaattagaacatcttgtttgaaaaggaaaaaagttcacttatctaccttgttttagttgcagaattaaactaactaacacgtttaaactctaaatttagaacttacactagagctaagaaaaattcctgatcttcgtgtgttgggcagattttgagccaacaccgttgtccccctgcttgagctggcagtggtgaacccgctatgcgatgtagagcagcggcagcgcccaacatccagctccgttgctaccgatgagtgtgccgcccactagtaaaaccggatttaattcatatccctatccgtaaaatcaagtataatgactcctccaaccggtaaaccaatgaaaaagactcccaaggcaatatctagggaagtattcgctaacatgataactacgtggcatctcaatcactaaataaaataaaacataaacataattccacatatcaagcatcgtcctttcttcttctctcctatgttttagttccctcttttttcccaaccacgtcagcagtgcggcacacgctcacgatcaaggttattagtaccgggatctaagatagtatcgttttgctgaaaatagtatcttatcgtaggatcatatcgtagtatcgggatactatgggattttcttttttaaaagtttaattaatatttgtattaattgcatatagtcattctatatcaaaaaaaatatgctaataatatgtcatgcaaatagagacaacatttatcaagagaaaccaaaccatattagttttgatatatttaactgatttttatataaacttgtgcatatatatttactttattttcaaaccatcatattttaaataatattctgtaggatcataaggttggtagaatcgggttactacctaagattttgtagaatcgtgtggtatgaatagtaagatcaagatactattaaaattaggatactaggtgggatcagtatcgtttcaatttggtagtatcatactacgatacagatcaagatactgataaacttgctcacgacttcacgagcccacctgctacaccgccgccttctcctcctcctccggcatggccgcatgggtaggggcggtggtggcgccggctgcgacgacgatgtccgctctcgcggcagccccaccccttctcttctaggccatgtcctctctttcggtgtgctagcttgctcgcctccggtggagccatgtcgccgcatccaagggcgtcccggccaaatcgggtccccgtgcgaaatattaaaatgggccctagtagcctagtaaatttttatagtaaaattaaaaacgggcgtggcgattagccgatcatcagcgatgaagtagaagcggaggccggagggaactggggagaggagacgaagcggctgcggcatcggaacttcggcgatacgcgacgacgcggacacctggacgggagtacgatggaagatggatcgattcaccttctgcagcgttttgggccatgtgtttgctactatttgaactgcaaattaacaaaaataaagcctctaatattattatatatagggcatacttaatattttaggggcccttaaaatttgggggccctgttcggtcgcacggcccgcactggcccccgggacgcccctgccgcatctcggatcgggcacagcctcagccagcgggtccaggtggggagctttgagcctttgagtgtcctcccctttgttcgcattttcgtcaccacgcctgaaccacaaaaaagaatcgagttaatccataaaatcccaaacgtactagagtaggcaggtacaaatatttggcgagacaggtttgaatgttaacccagattaatcaagtactgaattaccaatatttgtctttcagtttcagatcaattcccttttgtagtcgtctgattctgaaactcgtaatagagtttttttttaatgaactcataatggaagccttgatggtttcagttactcgtggcttgcacagaagatcatttctgcaacggatggatgaatgaacaaacaattctgcctggcaagacgagtacctcgggtggaatccgatgatccgatccatgcgtgaccggcaaaaccaccggcaaaaccagtccgtgttctacagtactccggcgtcaccgcactatgtcctcccgccatccagagcacggaatcagaaaaaatggaggaaaaactaaccgggagacacgaggacacggaatcggctggcgcgtaagccgcgacatcctgcggagccgagttgggagaatggagagaatggagggagaaacatggagagtagagcatcctatcagatgcactgtcccattattcatcgagaaaagcgcacgcggagataaaatc

SEQ ID NO: 28664 - DNA, 9239 bp, Oryza sativa
tgcctgcaggtcgactctagaggatccccagatcaattcccttttgtagtcgtctgattctgaaactcgtaatagagtttttttttaatgaactcataatggaagccttgatggtttcagttactcgtggcttgcacagaagatcatttctgcaacggatggatgaatgaacaaacaattctgcctggcaagacgagtacctcgggtggaatccgatgatccgatccatgcgtgaccggcaaaaccaccggcaaaaccagtccgtgttctacagtactccggcgtcaccgcactatgtcctcccgccatccagagcacggaatcagaaaaaatggaggaaaaactaaccgggagacacgaggacacggaatcggctggcgcgtaagccgcgacatcctgcggagccgagttgggagaatggagagaagggagggagagacatggagagtagagcatcctagcagatgcactgtcccatcattcatcgagaaaagcgcacgcggagagaaaatcgcgctccagcaaatacgccatcattgcctccaaatttagcgcgtccgtcatccgggagagagaaacgttaaatttagagtttttctctcctcatgccatattacaaccacttgcgtccggaccgagctcccgcctctagccggatcagtggcgtgcagggtggagtagtgaaggtgaagactggaaaggtagaagcataccaaagaacgagatgtagatgatagagcgaggcctgagcccaccactagtgccgcccacaacttcatcgccccgctgttggtgccgaccacagcttcctcacccccgccgcttctccacccacgtcgccccggcattggctccgaccaccgcttccttgccccgttgcccagccgccggcaacgactgcttcctcgccccgctgacagttgcttcctcgcccccaccgtctgtcgtgctgcctcgaccgcacgtccgcaccttctctgccctatcacccgcgcggtgctgtcgcccgcgacttctcccctcgtgtctgctcccgcgctcacatccgctccgcccgtagcacctttggcccgtccctcctctgccgtcggccctttgccccttaccttcccctcatccttccccttttctctcatgacactctctcgttctctcctctcaataggtgcagataaagaaaagagagaagataaatatgtttgaacataaaaatgagattagagtattagttgtttcctagatttgatagatccgtaatacaataaatttggacttttcaggatgtttgtaaatatatacattataaagaaaacaatacaaatgtatggatagttgaaagatattactaaaacataggtggatatgatatagaggatgtaatatacatgatttgttagagtgaagaaaaatatagagtggaaatttttttggatgaccatccaaatagggatatagagaatcaaatttggatgagctgctagggatactcttagctggggatggtggtgttggtactcctccctttccgtagtaaggggaagggggagagaggtagtatggcggagaaaggaagaaggggagagaatgagatgatatgtggatttcattgaacataattaacattatgcatgattcaacatttcttttatcatagtcaacctgtcatgccagtcaataccaccatcaatattaccctagagtcattttgtaacagcttaagcagttgtgggagtcgttatacatgggtttttttttttttttacagttagggatataactcaaattcgacctgtactgagggagtcctaatggactttttccatttggtgaagcctacctctcgatctcggatttcccgggccggcctgcccagccgcgacgctccccacggtccaaacccagtagtccccacccaccgaccatccgatgggcgacgttccatggacctcacacgttctccataaattcaaaccggctggttgcgatcgcaggtcaggaatcgatcagaagttcagggcacccgtaacgtcgtgcacctacgcagtaggacaagagtgttgactcttgatgagcgcgcagtgatacagttcacacatacgagttcgctagacgtgctctgtgtagtgtgtgtagtgtgtagtcgcctcacaccgtcacacggtcacatgtctagtgtactggaagctgtcccctgttcagctggcccaccctaacatctagtggcatgcatgtgtgacatgatactgcaaaaatatgctcctcacgtgaagctagctaggtcctgtttctttttttcctaatgcacaaattgattgcacgtcaatatattaaaagaagtagagtttaattatacaccgcaatcagctaaagggacattatcgggataaggagtaaaggaaactgaaaaaaggagaaggaaaaaactgagctaaaactgggtgcgagggaggagagagacggagccccactacacttccaatagatccacaaaagacgcaatgccatcagaccatcggtggccttcatgtaaaatggactccagaaccaccaaaacctacgagagagagtaatcgaacaccctgaagttttgctccttccatagctaccgggagacgaggagaactaaggaatcgaagcccttctaacaatgcttatgcatgcaagccctagaagggtgtgtttggatgcctcttttcctaacccctctccctcgattttcgcgcccacgcttttcaaactgctaaacggtgtgttttttgcgaaaaaattctatacgaaagttgcttaaaaaatcaaattaatccattttttttaaaaaaatagctaatacttaattaatcacacgccaatggatcgttccattttccgtgcaggagggattagttcccatccgtgaaacctgaacacagcctaagtcggccaccaaacttgaagagaggaaccacgagccggagtaaggtcatgccagctaggtgcagacagaattcggtgccagacctgatgagcgaacacacagtcaaggaggatgtgattcgccattttgagttcttggacacaaaacggacaaggcgagtggttgtcaataccacgcttctccaggagatcgcctatccaacaacactgctggaacgcaagccagatgaaaaggttgtgtttagtagggcctttagcccacccaagcagatcggcacgcaaataaaggattgctacccaagaaagcaagcttggtaggccgagtgagccgagtaacgctggttgcttatccaacgccagacaggacggtcctccgtgcccggagagaactagacaagaagcatcgcatcccagaccatcaggtgttgggagaggacatacattgtgagagcgccgcggatgtcccttacccaagaattattgataagggtagaagcaactgaacgcaagggcacggtgaagtgaaggtcccgcactaaggaggccaccgagcgaccctcaatctacttatatgtccaaaagagagtcgacgcgccatcacctggcacgaagaaggtggacgccataaacatgtcggacgtgccgtcaactaggtcatgtttgtaacagattatttacttgatatgcactacaaattaaaatcttaaaaaaggtagattttacaaaactatatatttaaaatgtagtatcacaaaactacatatttactacagatttaaaatggcgtgtaaaataataatattaaggagcaaattttataaaaaaaaaatacaggtttagtgccaatttatcacaacactataatgtttgtagctccaacaaaatggtagtgataaggatttaaactatagaatctaatgttttgtgatgacttcaatattaaatatctagttttgtgatacttgatattaaatatgtattttatgataaatttactgttaaatatgtattttttatacaacaccttaaacctataattttacgtacaatagtttggttagattatgtgtagttttgtgagaaattttatttaaaaatgaaattgttatataccatataataagtggtataaaaatgcagtaaaaatatttttttaggaatgttgtattttgtagatcttaaatgttcaagtatgttaaattatactccatgctttagtgagctatatatataatctttctagttttcattggacgatgccattgactttgactatactccgtatatcttatcaagaaaattatgtaattaccatttgttttgatgttatttgttttattattaaacgtgtataattttagcatgagttatatttttcatatgtatgttcaaaagacaatgacgtgatacattaaaaacctagaggtagtattttaccctgttttcgttaaaaaaaaagccatgtaagtattactttttaattgtgacttgttgtatcatttaagatattttttaaaataatagatagaaattcggactatctatcacagccaaacgttaaaagaaaaaaagactaaacttcaaactcttgctaaccttacgcgcgcagcaacatccatcgtcatttaagatactttacatgtctaacgtaaaaggactcaatgacaaatccataagccttacgaaattcctaatgaaagcgtgctcacgagtgtaattttgacttgtgaccgtgagaattcaaatttagtaaatatatttatgcatataggaataggagtacactatcaccaccggtccaccacgagcaacactatagcaatacttgcggtgcatgctagtgagtagtgacgaagaatttactgtgtgacgtcaacaagcttacatgtggcaatacatgcaaaaaaaaacatgacatcctttgcctgcaaaattcatccgcatattccgaggaaggcccgtggctctcactttgagacatgtaattctctgtacgctcaaaatttattgcaacgattcgtcaggttcttcccttaaaattaagcgcattaatcattcgtttgttttgcttgcatggagttttggattaacactcttcttccatggtcttttctagataaggctctctaatgtagtgatatactacttcttaataactattgcttatttttagatatataatcattgatcttaattattgagtgtcagtagtacatattcctttcttgattctgtcccgtcgccccacaagtttatatctttcctccatctcttggttcaaaggccggtctttccctgcacgttcaggcagtgtgggatccatagtaacttgtacccatccatcccgtgaggccgtgatccaggctcttgtttctcctttctttcagttgcatgtacacaaagttgcacaaatgtgttgctttctgctggtctctgtactgctagccaccactctcaccgacgtagccagtgcacagagatggaggcagaccagcggcggcggcaaggacaggtgggacggcctcctcgacccactcgacgccgacctccggcgcgacatcatccgctacggcgagctggcgcaggcgacgtcggacgcgctcatcggcgacccggcgtcgccgttcgccggcgcgtcgcggtacgcgcccgacgcgttcctccgcaaggtgcgggcgttcgacccggacgcgtaccgcgtcacgaggttcgtctacgcgacgtcgagcgtccgcctccccgacgcgttcatgccgaggcccgcgccgtctgcgggcgcggcgtgaagcggggagtccaactggatggggtacgtggccgtggccgccgacggcgtcgccgcgaaggccgggaggcgggacatcgtggtggcgtggcgcgggacaaagcgcgcggtggagtgggccaacgacctggacatcacgctggtgccggcggacggcgtcgtcggtccgggcccgggctggacgcacccgtcggtgcacagggggttcctgtccgtctacacgtccaagagtttctcgtcgccgttcaacaaacttagcgcgcgagagcaggtataattagttgcgactccctcgcatttacgcccttaattaatctagacttggccaatacagtatatcattttcttaaaaaataattaataaaacagtatagtactatactgtttcattatttttttatagaaaaaatgtgatactgttttggccgtgctactttacgctcgccactgtggcccaatcattcacatatttgcacaaggattatagttcacggtttggactttcgtttcctccaacataaggtgtctccagtacagacagagctattaaaagaaggcatagaaaattgaagagtgcaagagacagtttcacactcattctggggaactgacgaataatttcgttcacacattagtctggaggaactaaccaataatttgacatctcatctgaactgcacatgttgttcttgatagggaatgctgtttttctctagagtaggaccgccctcggatattgtttggagcatctaataacctccatagaaaacaaagtagcaaaatttcggtaactttaacctgtacaatatggaatgaactataatggtcattgccatgggattctccataaggttttcaaatcaaagtgtactactacctccgtcccaaaataagtgcagccataagtttccgcgctcaactttaatcgtccgtcttatttaaaatttttttataattagcatttttgttgctatgagatgataaaacatgaatagtactttactcgtgacttatgtttttaattttttttaaaaaaatttcaaataagacgaacggtcaaagttggacgcggaaaaccatggctgaacttattttgggacggaggaagtaataataaaaaatccagatagaacatgtgtccaagacataattgtgcgttgaatcttttaaaaagagaagttgagggacatggtaacttccagattttttacgtcttgtcttgctccagagaatctgttgcgtttgaacatacgaagacagtggacttgtacatattttccagattttctgtacataaattgctttttttttcaaaatgcatttgtagcaattcgatgaggctcatgtagtcatgcatacaaatgcaatttcagaatatcctttgcatttattatttaagatctttcagttagagaaaataaactggttgagggggtaaaaggctcatttgttcatggaaatatcttgtacatctatcaacaatttttctctcaaaaattatcaaatgtaaatacattataattataatataattacatttagtttatatgaaagtataatataacttgtatgtaactttcaaaaagatccaggggaggtctcagaggagcaaatctaatgatacaaaattatgtgaaacttacatataaattatactgtagttaaaatgtaatcacagtatatttatatttaataatttttggaggaaaaatgtcgatagttcgatatatgtgtagcaaaatcgctcagtcggaggtgggatgtgatcatgtggagtccaacatcccttacttacgacagcccaaaacatagctatatatgtacacttccaagtccaaatcaagcagaaaagcccttttttttttctttttttgcggggacgaaaagcccaaattaaccttctagcaatttcattttttttaggaagaggtactcttcgatcgaaagagacggaatatatttagagctagtacgattgcttcaaattctgattggaacaacaaattcgatgctattttctgaaaaaaaattgcaacaaaatttatgcaggtgctagctgaaataactagacttctgcgcgcgtacaagaacgagaactgcagcatcaccataacgggccacagcctgggcgccgcgctctccacgctcaacgccatcgacatcgtcgccaacggctacaacgtccgcggctcgtcccgcgtcccggtccccgtcacggcaatcgccctcgccagcccgcgcgtcggcgacgatcagttcaagagggccttcgactcgacgtccaacctgagcctgctccgcgtccgcaacgcgccggacatcgtgccgaccatcctgccgtcggccttcttaaagaacgtcggcgcggagctgctcgtggacaggcgccggtcgccgtacctgaagaaccccgcgggcccggcccagtggcacaacctcgagtgctacctgcacgccgtcgcgggcacgcagggcgccggcaacggcgcggggttcagccttgtggtggaccgtgacctggcgctggtgaacaagaaagtggacgcgctcaaggacgagtaccaggtgccggcggcgtggtgggtggagaagaacaagggcatggtgcagaacgcgagcgggcgctgggtcttgcaagatcacgaggagggcaaccttgcaatgtgatggatttggggaattttgtggaatccaataaactgatgggtttattgcttggatggaagttttccaagaaaaacatgaatagtaagggccgtggaaatgcagatataaattatgtatgtacgtctgaaaattctgagttgtaactgaaaattcttacggcccctttgaaacgtatgattatcaaaacacgggaatagaaaaaacgtaaaaatagtatgacacatttattggattcctacgggattgaacacgcataaaagcttcaacactattgtttgatagttacatggaaaaaacataggaaattaagacacgggaagaagaaaacatgaggtatgaccccatgctatttttctctagaattcctctacaatagtccattccttagaaattttagagaaattggtagaaatcaatactttattttaaaggattattcccatagggtataaatcctttagaattcatgtttttcctttgttttaaaagggacccaactccccggaagagggggatgggagtttggtagtggtggtggtggtggtggtgtgtgtgtgaatatgtgagaagaggggaatatgttttaatcctggcgtgcgctttgctaacaagtactccattttatattataagtcgtttgacttttttcttagtcaaaattctttaagctcgactaagtttatagagaaatatattaatatttttaatacaaaataaaaatattttcataatatattcaatctaaatttaatgaaactaatttagtgttataaatgttgctaattttttctataaacttaatcaaacctaaagaattttaactaagaaaaagttatttgacttataatataaaacggatggagtaacagttttg

SEQ ID NO: 28665 - DNA, 1541 bp, Oryza sativa
ataaacttaatcaaacctaaagatttttaactaagaaaaagttatttgacttataatataaacggatggagtaacagttttgccaaattggcatgccacgtgtgcattgtgccgcctaaaccgctcgaaataatgctcggggattatttgcccaatttaaatagctgggagtgcaaaacgatactcaagttcaaaggtaattcagtcaacctcaatgctttaggggtaatgtagactattctgtatttcttagctattctcactttcatatatatactcctgtgtaggcactgaatcttatgttgttacttttcccctctaataatacatatcttcatgctggacatctataaaattgagggtcaaaaagatatatacaaagtttttcatatttattccctacagaattgagtgcgttttggtgccactaagaggtccgcgaccatttatcagtcaaaagggttgggctaaaagtggcgttctgcttcattcatcattgggcccaaaatggactatgaagtatttacccaccgacttacaacccatcaatgcacacgtgtttccatagaggaaaaagtgcaccgaaggtccctcaacttgtcatcgagttacaaaatcgtccttgaaccacaaaaccagatataatacatccctcaacttataaaaccagtataatcctgaacggttttgactccggttttgtctgatgtgacagctgactcagagtgggacccacgtgggtcccacatgtcagccacttcttcccctcccctctccacggcggctgcagagagcagatgggcgttgcgggcgcgggcagcggccggcgagggaggagctgccaccggcggcggcggcggcggctctccgccggccgacctccagctgttgcatctgctcatcaccagtccgcggcgagacgacgacgccgcccgacgcactatggtcccggagcaaacacccgcacgcggagcccgacgccgctgacatgccgccgcccacgaccgcaaaccgcccgcagcagcgcggccctccgcccctcgtctgcctctttcgctggcgccggcggcgctctgcgtcttgcagagcctctcggcgatggtgtgccccatgtgcattgacaggtgacgagcagcctcgtcgcggcgacgtcgagcgcttccgttcgggagctccacgatggagtggccccggtggttctccctgacgaccgagaccacggcggcgagcgaattggtgtgcgcggtgagcgcgacaggacacggatgatgctgaggttgagcttgtcaggaatgaagcacttgagcatgtggatgaagtcgtagatggattacttggacgtgaggacgtggccttctttgttcaccacggtggtatccggatcaatgctagactcgacgacgttggcgaggacggcggcggccatggccttgtaagggagcgcctcgtcgtctacctttcggatgtagagctcctccaccatgaccgggacgacctcgacgagcgtcttgctgttggggcggtgtgagaaaagttcgatg

SEQ ID NO: 28666 - DNA, 6296 bp, Oryza sativa
tcgtctttattctcatcctcgcgtcgtcgcccgctccgcccaccgctcacctactctgccggccggccggccgctccccgcgccgtcgccgctcctccagctggccactccgcgcccgcatcgtgccctctccggcgatctgcttggaggggaggggagagaggctgagaggggatagagaaaagtggggaagaaaactaggtttcgttgacatggggcccacatgggtcccataccgactcagcagccacataggataaaactgagatcaaaaccgccgaaggacctattgtgactggttttgtgtagttgagggaccccgcatatctggttttgtggttggaggacgattttgtatcccgataataagttgagggaccttcggtgtactttttccttccatagatgcactctgctagccaaatgtttgagccttttcttgttttttcttaatccggtgcaactgtataatacacgcaaacaatcaatggcagtcgagtgccgaattggatagattcgtaagagctttaagaataaagtggctatgataacagtacgaaaagctctgaaaaagatttggatggatctccacaaccctatcaatttgagatagatccataatccgtttctgggactccacctagatccatggtaggcagttaaaggacctagcaccgctattgtacgtaatctcccggagaaaaaaataggaccctaaagtagaacatcgagatcgaagagcacgtagatccaagaccttaacctcccaaacggtggtgacatgaccatagagctcatcgactagcttgttactatttggagcacagtgcaagaaatacaactcactgatgaccaagcagatgaaattacatgaaagctcaaaaaaccataaagagtacatgttgggatttgcctacagagcgtaggttccttggttcaactaactacgaaataatcttttggaaaaccttagacccaaagaaatacaaactctttgcatagcattttgtgataaatatagtgtggacaacacatagagtggcaactcgaggttggccaaactactgtttttatcctccatgctagcacaccatcactagtacagatccttctatctgtgacgggctctaatatgcttagaaatagcgggccgtcataaggaagtcatctcaattgggccgaaaagtgcccgattgagatatggtcgcacagacatattagatgggcataaaacttaagctcgtcacggatgacacctatcagtgacgggccgtagtgtaagcccgattgagataacattccatatctcaaacgggcctaaagttgtggcccgtcacaaatgaccatcatctgtgatgggcaccaactttaggtccgattgagataacattccatatctcaaacgagcctcaagttctggcccgtcacagatgaccatcatccgtgacgtgcaccaacttgaggcccgtttaagataacaactaggcccgtcaaagatgactcatcagtgatgggctatatacttaatctctatcgggcattaactaaagctcgtcaccgatgactatttttccatttttcatatgaaatgtttatatttgtaagttgactatagcaaaataattgtcacgccccaaactagccccgaacgggactagcccgtgacgctccaaattaacctgttaatcgataccagtcccaggaaacagtgctggtatcataggaagacagaatatcacagccacaaaggtctctttattacagagtaggagtacagccatgttgggctgcggacaggtcccgagctcacaactgcattacaaaagagaaaacggaagccaagacttgggccaaacatcacaggcgcgacttgggaactaggccgaaaccctaaaactcatcgtagccgacttgctcctggaagaactcctcgtcagcgggatcctcatcatcttcttcagcgactggggggggaattatttatatagaacaagggtgagtacgggagtactcagcaagccatgggaattaagtgtttaatgcaggcttcaaaggaaaggctgttgtttttgcaattgattttatttaaactcctttttgaacaactaagtgtgtgcttctcaaacgacacggatgggacagtgcgtctcgtccggtcggagtatgtgcaatgtatcaatctttgaattgattcaaggttggcacctggccaacaaccttaaaacggccacccgggcctggctgatcccatcagccgcagatttaccaaacatcgaacccattccacaacagcaaattcacaaagcagtagttaaacaaaactacgctaggaatcacctcacatccgcccatgaccgtgggtacggctgtttgaacagtttaataacctctgcagagggggtacactttacccacacgacgttactagccttggtcacccagcccgtgcaaaacagccatgtttggtgactttggggctttcacgacaaggcatttcgaaagccgacacagggttaccatatgccaacgagacgggtcccagaccaacaacaggttaggtcccagaccatactgtgccaggaagcccgggggttctccccgacaccaccccgttgaatccacatgtctctttgcatcaaggctccccttattagcaatttactcagccaggggtgtcccatttcacccatgtggtcgcacatgtcttatgttcggatgaaattccaaggaaacggtccttaagtgcaagagcgggaaaccgtactcccggtacgtccctcggcctgcgattttggaaattcatttagttcgcaagcaccgacccaggtgtcgggttttccaagtcttttgtaaaacccaaattttacccatcgttggatgttttatatttgaggggaggtgttccgatgcgcgtgcccgaaggcccgtacatcgaagcaccacagtcgacgagggaaggttaagtgttcaataattcaaggagggtaattgcagcaattaggattgggggccgacgggctatctcgcaagctgcggccgaattactcgtgttaatcctattcatgcaatatttgtggaaaagaaataattagatttaaattataggtgcaagatgatcaaaggtgacttgccttgctcgagatcttgagcttgatcctcgtaatcctcgcactgcgggtcttcgggctctgaaactacaggcgaaacgggacaactcaacaaacggcgaaaataagctttattattgacctctaggcgtgccattagatagatcttgagatttgaggaattttggaagttggacagagtcaaacggacttacggttgggaagatattgaatttctaagattattggatttttggtctaaaggaaaaggatctatttaaatcgttttgaaaaagaaaagaaagagggaggggaattagacttcgcgggcggcttgagcgcggcccgagaggtgttggcgcggcccggccttgccattgggccggccggcctgagggacggcccaagggggctcgcggggaggggaggagagagggagccggtgggccgggtccaccttgcgtggtcccgggtgggacccgcttgtcggtggctcggctcaccgtgagcgaggtgccttggtttaataggaggcgatgtcggtttgggaactgacctagggtggtcaagggagcgagctagcactcggcggtcgcggccaaatcggcgacagggggggtgacgccggcgatgggaggaaaaagaagaaaggaagagggaaagggggcttgcctccttgcttctttgggaaaagaaggagggagagagagcgacccggcagagggaggaggggctctgcctccgtcccttggaagctagcgcgcggtggtggcgaggccaggttgatgacgacggcgatgacggcggaccggtttggagcggaacggcgacacgggcggcagacgcagggcaggcgcggcaggtgctgacgacggcggcgactggccggtcggccaccacggtgtgcgcgcgcgggaagcaacgggcggcgcggcgatttgggcggcgtcggcgggaagcggtagcgagggcggagggcactcggctcgcgcggctcacgcgcacgcgcgcgcggcgcatgggcagagcgagggatagaaagaaggagagagagagagggggagggagagagagagatgggccgagagggattcggcccatcgaacctaagggaggcaaaatagacttttgcggaggaattgaatttggaaggaaaattgagattagggtttggatttgacgatggatcggggattcgagatccggaatggcacggagactgactgcaagcgaaaaaacaattttcgcaattagggtttttagaatttaaattttcccgctaggcgccacgacggaacgggcgctacaataattaagtgtagtataataattcattttatgagtcaaaataattttatgggtagtaaatgatttcaaatggaaaaaatatcaacaacaaagttgtataacttatcaagatgtacaaattttagtttggtcatttttcaatataatatttttttgaacagtttgaatttgaatttaaaaatatgacaactttaaacaacattttcaaatactaaatgatttcaattgaaaaagtcattaccaacaaggttgaataactcatcaagatctaaaactttttttttgttatttcttcatccgacgaaatgttagtaatattattcacaaattttacatatatgtgttatagtttatagaacatgataagagatatgtcaattttatgaacaatgttactatcattttgtcgtatgaagaaatgaccaaaataaatgttttagatcttgatgagttattcaactttgttgttgatgactttttcagttgatgagttattccgtcacggtacgatccttttgcttaagtgcccggaactcacgcttcttcaaagcaacaacacctgcaggtatgtgtgtcttcttgaatgcttccgtgaactccgcctaagtgattggttgtccttctgctctgttcatccggaaatgatcccaccattctgatgcaggtccttgcaactgatgtgaagcgaaaacaactttctcctgatccgtgcactggagcaattccaacttcttctcaacagcgtgcaaccaatcacctgcttccactgggttggtagtgctagaaaaggtaggtggcctcacacgaagaaaatcagttaacttgttctgcggcgatggagcattgttgttcccttggttgagctggttctgcatctgctgtatcatcatgttcattaactgagtctgttgagccagaacttgagcaagagttgggttcccttcattgttattgtttccacttccattagcacgagtgttcaccatctgttgcagattagagaagataggaggagaggggttacactaaagacaagaccttaaccaggttaacactgatctgatgtgtgtagaccaatatattgttcaagttgattaagcaagcaacctagtatagttacacactcatcactgaactactccaatgatggaaatgcaaccatacctacacacaagcaaacaacaaacgttctatcctactaactattcttcaaagtcactttggtggtttaggttctaaggtaggatccaaacttcattccatcttgaccacttggcacttcagatcgaccatcaccttcttatttatcgatccacttgacttaacctccataagttgaccacatcagcattttctagtttcaacaactagtttcagaactactcaagttgaaagagagaggggagtagacaatgaaacaatttgcaaagaattctagataaggaagaaaggagaaattttcacaaatcatgttttcggaaaattagtccttaaggtttgaccatttggcttatcctacagtcaagatggctctgataccaacttgtcacgcccggaaattcactagtaatttccgaacttatttgtgcataaaatcctcgtccaggaatcagccgaggtacacaaactgacaatttaatatacagattcatcaaattaactaaaacgataaatacttacttaagaggcactaagtcctcaccaagaagaaaactgcagcggaaaataaaatctagcgaagctccagctccactcccacaggcagctcaactggggtataagccaaacgtcttttccttcgcaacttgtcttcaactgaggttgattgattattgcaaggtgagcatatgacatactcagcaagccacacagcaaatatgc

SEQ ID NO: 28667 - DNA, 626 bp, Oryza sativa
agccgaccccagtcagcccctccccgtgcgtgcgttccaccgcgaaccgtgaggctgcgcgtgggcccgccgcatccacgtccaccgcgaaccgcgcgcgtgcaccgcgtccctcccccgcccgcgcgcgtgcgccgcgtgctcgctccgcacggtgaaccgtgtcaccgacaagcgggtcccaccaaggaccacgcaaggtgagcccggtccaccggctctctctctccttgcctcccgcgcgcgtgtgccttggaccgccttgggccggctggcccatttagctcgaccgagccgccccttttctctcgggccgcgccctagccgcccgaggaaagtctattttccctccctcttttcttttctttttttttcttttccaaaaaggatttaattaaatccttttcctttagaccaaaaatccaataatcttagaaattcaatatcttcccaaccataaatccgtttgactccgttcaacttccaaaattcctcaaatctcgagatctatctaatggcacgcttagaggtcattaatagggctttattttcgccgtttgttgagttttcccgtttcgcgtgtagtttcggagcccgaagacccgcagtgcgaggatttcgaggat

SEQ ID NO: 28668 - DNA, 5668 bp, Oryza sativa
taaatagagaatttaaatataggatcaacatgctcaaaggattgtgtttaggatctgtgtgacttgccttgcaataatcggtcttcaattaatcttcttgaatacttccggcgcactcgcgaaccttcgcaacgacggaaacgacaagctatcacgcaaaacgaggaaaaagactaataaaaaccaaataaacaatacataaaaagtaaacaaacatgtagatcataattttagatgaattatgagacttgaacggcctcattctgacttcaaatgaatttattaagaattttacaagattaaatctatttaaagcccatttaaaaagaattaaataaatttaattcaatttatggacaattttaatatgtagatctttattttacacaacttttgcaacttgaaccacattaaactgagttaagatgaattagatatgaatttttaaagattaaatcggattaaaacctttaaactgattttaattgaattatgacgcaataatgaattatttttgaaaaggaaaagaaggattattgcgtcagcggctagggtttcggtggaccgggcgcacgggcgacggttcacgcgaacggacggccgagatcgaaccaatccaaaacggacggccgagatcgatcgggtccacggcggctcacggcggacgactccgatgacgtcagcgatgacgtcaccaccggcggcggtggctcggcggctcgggctcgcatgctcgccggcgaacgacggcgcggcgacgcgaacggagagcaccaggacgtagagcgcgacgcggcgaactcaccggtgaccaaagaagcggcggagaagcaacggacggcgacggcgacgaggaggaagcggcggaaaccttcgggttgacgacggcgatgaagctccggcggtctccggcgacggcgaaagggcggacgaggacggcgacgaccttgcgaacccgacggcggtcttcccgagcgacggcgacggctgaaacgacggcggcgcacggctggagcggcggcggcgacggcgaagctagggcacacggcgctagagctcttccgacgacgagaggcgaaggcgagggtggcgacgggtagaggagagctcgggggtccttaaataggtgcaaggaggcggcggcgaaggcccacggcggcggagacggcgaaggaaagctcggcttggagagaggaaaaccgatccgattcgaactcgaatccatcgatttccaaaccgatttaggcgaagcttccaaagaagaaaaggtagaggagatcccgaggatcattttccctcaaacgattcggccggataaggaaagacgcggccgaatttggaaggagacggcggcggcttgcgctagggtttcgggcggcggcggcgacgcgaggaagacggatccgacaagcggggcccacctgacagcggctgagagagagaggagagcggcggctcggcggactgggccagctgggccgagggaaagagagaagagaggttttgggccggctttcggcccaaagccaaaagaagactttttaaaacctttttcaattaaattatttcttaaatgcaattccatttattaaaaatacttccttagctcaaataaatcccagaaaaatctaggaattatagaattaagcaaagtatttaatgaaattttatctggcccctttttatattgagatttagcaaattaaaattagatcttctcttttaggcttttaaaaatcatttctaataattccttttaaacaacaatttataagttaaggatttttaaacaagaaaagctcttaataattatacttagatcattaatgatcaaataattactgaactgttctttgtattattaagagttgagctctgaaaaatccgagaaaatttcagagagttgacttaaccatggagaatttaataaaaattaaatccatccatgctttatatttaggaaattttatttcccacattttacttcacttgtaaattaaagaacatttaacaaaaattctattattaatttattaaataatttataaatcctgaaacaaaaaatcaggatgtgacagtgaccgaccgggaagtttgtatttcccgcgtgggtgcacacgagtgagggctagccaaaaaataaaatttatttatttatggattatactcatctgtgatgggggggacgggcattaacttaggctatagttaatgccccacccgagtgggggctagccaaaaaataaaatttatttatttttagattatactcatctgtgacgggcattaacttaggctatagttaatgcccgtcacagatgacaggcataaaagtttgaatttcccgcgtgggagcaatttcgggatgggtgaccgaccgggaagtttgaatttcccgcgtgggtgcacacgagtgagggctagccaaaaaataaaatttatttatttttggattatactcatctgtgacgggcattaacttaggctatagttaatgcctgtcacagatgactcatctgtgacgggctatagtttgactggtcgtctgggtcaaaactatcggtgacgggctttacttagagcccgattgagatagattcatccgtgaccgccgtttgcccgattgagataactcttcacattagtgacttctagcctgtgacggacgccatgcccgattgagatggggcttaccgcccaattgagatgagggtatccgttctagtgcataaaaacaacttaccaccatcttgtggaatgcatatacataaggagaatatggagcacactatcaacctagatagctcaggaacttaggttgcgctcttttttgatggttctttctggctaaattagttgtacgtaaaacaagaaacatgattaattgagtgttaattatttaaagagtaaagtgcataggcggtccttaaacttgtagggttgtgttatctatgtcacccaaactctcaaaatatagatataggtcccaaaactggttaaagtgtatcatttaagtcccaaatcgacacaacccctctagaatcctttgtggcgctgatgtggcatgccacatggacgtgacttgtccttttcctttttttcttcttttctttttttgttttcttctcatttttttcctttcatctgctcgggtcacatagaaaggagaagaaaggaaaaaagagaagaaggagaagaaaaggagaaaaaggaaaatttttaaatggatccatttgtcaatcaaaatgatgttacgttatatacgtgtggcatgccacatcaatgccacgtaggatccttaaagggttgtggcgatttgggacctagatgacacgctatgataagttatgggacttgaatatgtatttttaaagtttagggacttagatgatacactcctatgagtttaaggaccgtctatatactttactcttatttaaaaaagaagaatggatctgtttgatttttaaagaaccttttctatggaaaattttcacacataacatattgttttgtagtttgaaaaatgtgttaacagaaaataggaagtagctatgctcaattagctatttagaacacacccttagatcggataggtagcctgtgtctacgtaggtacatgcttgatggacagtgctagcaaccgccataggtctatcaaagaaaggagcatgctcgctcattctcctgacgacatggaaggtgtgtggaaggaaaggaaccaaagagttttccagcataaagagctccacatatgtttgccagcataaagaactacgtgtaactcattatctactctggtagcaaaaatcaaaggaggaagccaacacatgggctttagcatgagcgaaacgcctcacagagcttatcctttagttttaagttttttaagttctcgtttttacctctagaaactttttactctgtttcaattaatgaaattggcatagctggttcattaaaaaaaagaaaaattctgaattaccccctgaactataaggatagcacgaattacacccataaaccgcaaaatcagacatccttcactctcaacttttcataccggacgaattaacccccctaactctctatgaagcggttttatcctacatagcgtacacgtggcagtccaattagcataaaaaattaaaagatgatggggccagcatgtcagttcttttttttattttttttaaaataattgtttgaatccacaaaacagaactgacatatacgtcccactgatttcaatttttttgtgctgactggattgcaatgcaagcaccatataggaccaaaaccgctctagatcgagtccgagggttgggggggggggttaattcgttcagtatgaaaagtagagagtgaaggatgttttattttgtgggtgagggcctaattcgtattgttctttgtagtataggaatgtaattcggattttttttccctataaaaaatatataaggcatttaaggcatacaggatgggctgtataaattgagccagttggtttctgtttcaaaaggaatttaaattttgggccgttgggccttcggctcagcaagtcctatttgaccgcccggcgttcgtctctgtccccttccttctcagtttctcctgtcatcccgccggggtcagatacgacaagataaccaataaaccagagtacaaatcttaataagttctccaactatggtctctgattttcgtacgcttacttttccaggctaaataatggacacggccacacggcaccagtttgaacgtcgtaccatccctgtgcacaataatgtattactaacaagcaccacccgatacggaaatctggtggagcggacagccggacacattagcattagaatcggtggctaccggctgcctgatgacctgattcgttcggaccgatcttgctcaagtttggctaccttaccaaaactttgttccccttcccatagtttcgattctacattcgtcatggtctccaacaagtatgtgtgctgcatagcagaagatcatttgcttccgggttacgtgcctgtttgttttgggtattactaattaaggtcgtcacgtaccgatattctagagggaaaggaatgattggcggcattggcactcctagtacacgccagcttaattaggattgtcatttgtcaatccgatggaagagcatgcatcagtatcgcgtgatgtgaaatgcagctgttctccgtggtgaaatgcattgagtgaaagtttccagaaaagatcctctgttccgtccttttttttttaataatgaaatagtcatcccggcctttgctcaaagagagctacagcccatctattatataattaaaggaatagaaaaaggagcctccacgttcgctctcatggcctagaaattctcacattaatcggagaaaaagaaaaagcagagtccatatagaaatacaatttagaaatagctgaaattcggaattaaaaaataaggaatattagaagaggggactagagtccatatagaaatacaatttacaaatagctgaaattcggaattaaaaaataaggaatattagaagaggagactagagtccatatagaaatacaattagaaaatacctgaaattcggaattaaaaataagaaatattagaagaggagactagagtccatatagaaatacaatt

SEQ ID NO: 28669 - DNA, 722 bp, Oryza sativa
ttatttaattctttttaaatgggctttaaatagatttaatcttgtaaaattcttaataaattcatttgaagtcagaatgaggccgttcaagtctcataattcatctaaaattatgatctacatgtttgtttactttttatgtattgtttatttggtttttattagtctttttcctcgttttgcgtgatagcttgtcgtttccgtcgttgcgaaggttcgcgagtgcgccggaagtattcaagaagattaattgaagaccgattattgcaaggcaagtcacacagatcctaaacacaatcctttgagcatgttgatcctatatttaaattctctatttatttcaactgtgcatttattttcgaatgtcattgggtgaaattaacctattctttgttatggcccttttgttcttgattactttattccttgataccttgggtgattataattggactagttgagctttatatatattggttcaactagatattagatatgattgcttagccatgcttagaaacattagcacacatttgggataactaatgtttcactatcacttatggttatatttaatggtagctcacgatggtcaatcgtgattggttaattaattacttgccaactaaaacttgataatggtgggttgtgagcacatggttttgagagtcgtgctcatgacaattaaggaccggttcgcgagctactgttgtgaaacatta

SEQ ID NO: 28670 - DNA, 1692 bp, Oryza sativa
cacctctccaatcctacatgccaaatcatcaggttaaaccctatcgtccattcgcaaattaggtatatctccaccacatgatttctccacgtcaccacgtgaagactactctctaagcgtgaggactacgcatctccgcgcaacacgctactctccacctccacgcgactcactactatagatggccaaaaggcccacccggcccggcccggcccaggcacggcccaccagccatcgggccggcacggcccaatcggcacttcgtgccggaccgtgccagcccatgggctgcgcctcctgcccaggcacggcccacaagtagtcgggccatgccgggctggccgaaggtacgggtggcccatcgtgtcttttttttaaataagtctattttccctccctcttctttgggttgtgacctatatatagctaaaataagtctattgtccctccctctctttgggatgtgacctatatatagctaaaatagtctattttacgtccctatgctttcgaccgtggcatataatatgtttatttttactccctattgcttatgtatcgggcctagcctacggcccatcgtgccgtgccgtgccgagccggcccaacgtgccggtggaggggcctaggcacgacacgattgtcgggccgggccagcacgagctcgacccccgtcgggccaggccgtgcttgggccgagccaaaatactgtgtcgtgggccgggccgtcgggcctcgggccttttcgccatgtatgctcgctactcctcctcgctcctccccgcatgtattggcaccgcgccgcaccgccgcatcctcgccggagccgacttctccagccgctgccggatcctacttcttccccatctgccgctcctcagcggccggagccgaggacaaccccttccgccgccaccgccgccaccgcgcactccaccgctggccaccgaggtcgtccccagccggtcttccccatcgactgcggctggagccgaggtcgtccccatccgccgccgccgccacattccaccgctgcccccgccgaagacggagccatggtcttccccaacgccatgctcgctcttctggtcttccaacactgttgagctcccgtcaacaccaccactgcgtccaccgcgctcgctcttcccttgccaccaccgacgccggcgctggtccggtcttgcgaggggaatccatggaactcggccacatacccacatcgtggcctccactacaccactatcacggtgctcgctggccgctctaccgccgagcccttcgctgtgaagcagatctggccagttccaccaagaggccgttatctgccccacggccgaggccgttgccccaggcccatccatgtctgcctgacgaccatctccatcatcagcactccatggaatgtatgaatgtatctatgtgagcttgtgcgtgctgtaaatcttaattttaatttaggttaaaatatatttgttctatcaggcaagagtgaagctgggttcaatcttgaacatctggaagtttgatttagagaatgccatgtaatgtgacatcgaggaaagagtgaagcaatttagcttaggtaaattaggtcatccagtgcataagagatttacacagctaagtagtacagtagtggtagcttgacatgcatgaatgcttggtccattgattgaattcacagctaag

SEQ ID NO: 28671 - DNA, 3186 bp, Oryza sativa
ccagttccaccaagaggcggttatctgccccacgaccgaggccgttgccccaggcccatccatgtctgcttgacgaccatctccatcatcagcactccatggaatgtatgaatgtatctatgtgagcttgtgcgtgctgtaaatcttaattttaatttaggttaaaatatatttgttctatcaggcaagagtgaagctgggttcaatcttgaacatctggaagtttgatttagagaatgccatgtaatgtgacatcgaggaaagagtgaagcaatttagcttaggtaaattaggtcatccagtgcataagagatttacacagctaagtagtacagtagtggtagcttgacatgcatgaatgcttggtccattgattgaattcacagctaagtagtacagtagtggtagcttgacatgcatgaatgcttggtccccgatccaaattttatattatctccttccattgcatgtaataattttagaaggttatactaatgtaacagcattaggccaaacgtacatgttgccgatttggtggtaacttccgacaaatcaatcttcccttaatttgactcattttgtcctacattccaatcaatgcatattatctatgaagaaataatatacattcagtttcaggtaaaacacaaagaaagctgctcctcatttgggtcaaagctataaagtaattccctggttgtgattgtgatccagcaccaattcagcagttccctatcctggctaacatgaatgttttactctttagttatgtatatgttgatataatgcgcgctgattaaaattaagtcaaacctacccccaatcatttattttgcttcccttattccttactttggttgacgaaatggacctgaatgtgtcagatttattcttcttaaaatttatttgcgatgaaatggatggagtaccaatggctgttgcaacagggtaatttattcaataaacaatatatttgccctcaatcctgtgtactatcttttcacagtaaaccatgtacttttcaaactagaatcatgtctaattatttctttatatctatgaatcatttttccttaaagacacagaaccacaaggagatgtttacactgatgtaccatgttatcatgggggatgatccagacctgaagactggcaagccatctcctgatttatttctagcttgctgctatgaggaggtttgaggtgtttccgtatgtgttatttcctttagaatgttcttaatttggactaaaatacagtactataatttcatcttatgcaagtgcactgcatgttgttcagggcaatgtataaccaggtaattgccttctatttcaagatgctggaatgttggtacatgtatttgttgtagcagcagtaaaaaaatgctggaatacaagtgccttgttacatgtgtgtgaagtgtgaacaatcatgacaacaagaaaacacttcttccactataaaaaaggtaaagggaaattcagccaatgtccaggtatgtaggaacaaatgggcacgtgctttttttaaattgagaaacaccatttcttgtgaacagagttttacatgatcagactctccagtgccaccctcttatttgggtacaagattattttggaacagaaaaaaaaatatatttacttattactattttttgcacttcttgcgtaggaatatatctaagcaatcaacgtgaggaatagagtttgtgaagactggagacatacaaaaacctttattggcactgatgttgtacatcctgttgattgaaaattttcataccactgcaatgttttagctctttttccatcagttcagttgttataaaacatagaaaattgtaagcctttatttatgacctgttatctactaggttgttttatgaaatagccttcccattgtgaactgaagtaggcttataaaagttcattattagtttatttgacataccacagtgactctgtatcatcaattgagtttactaaaacttcttttttgatggagtcattaagatgatcattgcaatttgcttgctagcttgaagagtgtcgtattcaaattcttctatctccatttaatgtagaggcttaccttgcctatttgctcgatgaccagggagcatgaccagactatcgtattttgtttagatggtctataagattgctagactatatatgttcaatgatctttgtaggatacataggcagtgttcgttcggggagattggagatagattgcacatcgttttccgcgtgcatgttttccaaactattaaacggtgcgttttttgcaaaaaaaattctataggaaagatgctttaaaaaatcatattagttcatttttgaaatttaaaataattaatactcaattaattatgcactaatagctcacctcgttttgcgtatcttcccaatcttctctatctcccctttctcaaacacagcctatagtgtattgatgcagattcgggattccgcacttggttttgtcttgacaaacaatagatgagctgtcacttgtaggagaagctttgtttaaattgctgtgtttatcttagataatataaaataaatgagctgccactatttcaatagagattttgtgttcttatttgcatgatacatgggtttgaaatgtatgtatagttcctttgtttttgtttcatgtgatgaaaatttcattcacatacaattgtcattgttgtattacaaatagtgtgtgttgggattatatattaattggtggagacgtgcgttgcacgtgcatgcacaattactagtagaccacaaacgcacaggttagccacgtctggccgcaccactcggtcagtcactccgtgacttaatcacccactaatcacgtctctatgcatgcaggtcatatctccttgcgtgtagagcactaacacacacatgcaacagagctaactgatccactatccacgccactactgcagctacttgacatgcaagcaccttcatgcaggtcatggactttcttgatcaagctaactcatgcacacactaatcacaactcacactaaagtaaaggtgaatagctaatatggtatttgaagtttcgcttcgggctcagtttaaatcgaccaaacaagtcatccaaattaatcatttgggttaatatagtccttagacccacaaaaagtgccacgtaagcatgccaagt

SEQ ID NO: 28672 - DNA, 2372 bp, Oryza sativa
aaaaaacacaaacagaaaaaaataacaggccagcaacaatcgtaagtgacaattctaaaacgaacatacacgtgtgaaaacatttatcttcttttttttctttcttttctaggtggtatataagggtagaatggtcatttcattcataccgctgcatgtgaggatgacttggcatgctcacgtggcacttttttggatccaagaactatattaacccaaataattaatttggaggacttgtttggacgatttgaaacttcaagaactaaactgagcctaaagagaaacttcagggaccatattagctattcaccctaaagtaaataacaagattaagtctaacaaatagacgaacataccggcaagatcgtctgggcagagcaggccgagcagatcgcggaaccagttcatctccatgtcgaggtgcacggtgtcgcgcacgtgcacgcctctctcccagaagaagtccgggctgagcgccgtggcgccgcccaccgcgaagttggccccgctggcgaagtcccccgtggtccgcccgccccagtacggccgcaggaacggcagccccagcgcgtcagctgaggccggcgccacgcgcgcgatttccaaatctcaagtgattagtactatgttgggttaagcaaatacaggtggaggggctggattggttgcgagtagcgtaccgatgaagtcgatgatgaggcggccgttggaggcccggccggtggcgcggtggaagaaggtctcgccgtagggtggccacagcggtggccggcgggactcgttgccgtagaggaaagggccgttgcccgtgtcagctagcgagttccccgaagctgaacacgcgcgggtagcacggcgccgccagtgcctgtgacgccgacagcagcacagccacggccgccagcacaaccgccgcaggcgagaggagtcgtcctcgtcctcttctcccggaggtggaggaagccattcttcctgtctgctcgagtcgagattctcgcattctcgagtgagtcgagtcgataattaatgcgaagcgtcagttaagcacttaagcggctagggaaggtgttgcgtcgttgtgttactagaggcctttttttttctcttttttgatactccatccgtagaatataagaaactttagaattggacacaattattaaaaaaataggtagaagtgagtggtgaaagattgtgattggataagtagtggaggtatatgggaaaagtgaatggtggaggattatgatcggttgggaaaagaatattggtagagaagttgttatattttggaacaaatcctgagggctaaaacttattatattttgggacggagggagtaaatgataacttgccgagattgtgaacagttgctgtccatttccagtggacaagtggtccgttgcgtcgctgtgtagtacactgtttttaaaaacatactttgactaatattttattgcattctatggtcctaataaatataaaattagcatcacattgtgaacagttgctgtccatatccactggacaagtggacacgggacaatgaacggtgagaggctcacacaccctttgaagttttccttttttctttttccgaagaaacccacactttgaatttttgaactacacgtggaatttaacatttttgcacacaaaagatttggtcagttcttaaagtaaagatttgggtattatgcggcactctatttaccggtggcaatcagccggttaccactttcgatatcgcttccacacaagtaaccggttgatgcctaaatttgtgtatgcgagtagtgagcaatttcttgttttcaaagatgctgtcacaacatgattggtgttttttcaattgatgaaataaatcctgatctttgcttaaaaaactacagctacttattacttggttcgctcaacataaagcaaactaaaaatccaacaaccaaggatactaagagcatcccaacagctcctctatctggtcctccatccctaatttggcgcataggagcgaaaaaaaccacttctagtggatgcgccatccagtcatccaaaactagcgcatgcgctaaaacgggagagagaaagggtaaatatagcatatctctctcctcacgttatatcacaacaaccgcgctccccacccccatccggagttccgcgacctctcctccgccgcgacctcccctccatcatcatcgtcgctagcccgttttttattttttttacaacggatggttgagagggagggtgtagccatggagtgagggtggagagggagaagcatgccagatctggaaggagagaggggagagcggtgaggcagccgacggggagataggagcggcggtgccgtcctcgatccgcag

SEQ ID NO: 28673 - DNA, 10871 bp, Oryza sativa
ttttttttattaatttaatttagaaattatgaattactaagtatcaacagagagtcttaactatattttgtttcaccatttaatattttttttgagaattacacggtacaacacagatactcacaatgcacgcacactcacccctatgaaagtacgcacgtaaaccctacccctataagcatctttgaagactgggccggcaatctatcctgaagattgacgaagtcaccataggtgcatcgctgtcgacgggtacgtctcctaccatttaataattttgaattcaacaacaaatcagtagtgagaatagtgagttgtgtttgataattggcatggagtcacaagtaattatagctttttatataatctaataaataaaatcgacgataaaaatttcttattgatggctttgggcacatatttgcatgtgttatcaatatatgttcatataattttttttaatatctatatactttttcatcacatagaacatgcaaatgcacaaacgcagtcacgcacacaacacttacacattcaaggtgtgccctaactcatgattaagggcatgtttagtagagctccaattcctaaattcagctacaggagttggtttggagtggagttgtggagctgcctaaacccaactccacctctattttaggtggagctgaaactgtttggctgagctccagctccaaaagagatggagctgaagttaaagctgtgccaaagaggcgctaaagagtcttaatttctgacataactaaaattttattaaaagcgtaggtgtgtatataatcaaataaaaatatattaaaatactactggatagagatgtgatcaaacttgatttgctaacctcaatgcattgacccttccatgaatccataatcaccttgtcattaagttctgcttatctacacaaacagggatgatggtacgttctcattgagaacatggaatttataaaatcattgtcatgattaatatttgtgatgaataattggctatacaaatgatttaattaaagaattggtttgagagtttatgtaaatgttggtgtgagtgcgtgtgactaatgtgggttagcttgtgatatctgtgtccagaaacggttgttttgtctgattgtgtgcaggtgacttgaggtcagccttggtcaatggtgagggccgggactatattcagggaggaacaaaggtctagtgcggtcgggataccatgtgagaaggtgactagagtccggattcttagaggtcaacttcggtcaacggtggggatcgggactaaactcatagaggagttgaggttcagacggttaaggataccgggtgacgaagttggatacgagatggcacatggtggatggacaccgtgtgggagagatcttcgcaacgggtttcacgaggtgtgcgtgcaagtgccagggttcgcgaaggagattggaagaaattagagagaagtatatggtgctacagtgcttcgagttactgtagcagtcgtgtatgcatatatgtgtgtatgctggtcgtagcatatgcatgtatgtatggtgattgatgcatgcatgttgtgccatgcatgtgtgatggctcggtgggcttcggtggcagctggctggaggccgagccggtccaggagcagcagcacgtcagcccacatgcgataggcccaagcaggagcaagcgcaggagatcgagtccgatgcggttggctgcggctgtgcgagttttggtaaattgtaaaaggtttggaaattgagagattgagtcctattgtgaataggagttttacacctactttgagtagggggttttttggtataaatagagagggagcgtgaggttttccggtatcgctttgagagcaattgagttgatagtttagttagggtttcgagtttagtcgagattttttgtaaggaatgctgtagttgcactttgtaaacacagagagaagcaataaagttgtcatctactttgagcgttctttgatttgtgtttcgtcgggttcaggcggcagcaaggtggttcaactggcagcgtgtgagcaatccgaccggcagcaacaggactacgtcgagatttccatcgatttgagggtaacttttatttccgctaaaagtttttgggtttttggttttccctaccattcaccctcctctggtaggcttgattgcttgtgttcgatcctacagaattaacgatggtaaaaacaggatccttaaatcagtaaaattagcagtaagttatgcaaagtgagatcagcatataaaaaaaagctacatatatacgtgtatttgtagatgagacgatacattaaatgtgcaacatttcttgtcaatcatcatgtcaacccctcaaggatgtgatgatggtgtcactactaaagaagaggatattgttgccggttgagaacccggtataggtgccggattttccaactgtcactacggaggtggtatagatgtgaaaccacataggtgccagcggtttagaaccggcacctataaagatgaatgagaaaaaaaaaagctggctcagctcgaatgaagccgaacacatcaagaacttcaagaacatgtcaagaacatcatgaacacatcacagaacacatctaagaacacattaacaacacagaacacttcgcgtcgcaggcggtcacatcaccctccgcgccggccttctccaccaccgccaatgtcgtcggatgttaacaaggaggagggcgtcgctgccttcagcaccaccgccgcctttacctccctttagaaatggcagagggaggacgtcgccaccgggtcgctaggctgccgccaccgcccttcccgtcgtcagatctggtggaggggagggcgtgccaccgggccgtcactgccaccactgggccgccaccacctccgtcgggccgctgagaaagtgagagagagagagaggtggggagggcgttgccgctgtgtcgtcgggctgccgccgtctcccctcccgctggatctggtggagggaagggtgcgccaccaggcccccgccgccacctccgccgggccgctgagagagagagagagaggtggggagggcaccgccgccagagcttgcgggtgggcagggctcgcgggtggggggagggagagagagaagcacgggtggataagggcgacgcagtcgtcgggataagcggtcagctcggctcgatttttttcgatgtcggttttttaaaaactgatatctattataaattaaaggtgctggtttttttactatgaaccgatacctttctctgacacaggttttagaaataaaaccagcacctatttagaaataaaggtgtcggttttttgtgatttcaacccacggaggtgggaaaatggtctataggtgccggttttagtatttttggaacctatcgtgccgatatctatttgatgttttatagtagtttgtatatgcatattctgatcggtgtcgtctctgaccgaaaatcaatgttgatcaacgaaaaatagttcaagtgagttgcagatggtggagtccatcttgttccgcttctggcctgatattcccatatgtcaattgtctggtctggttaattaatacggagtactctctaccctaggattagatagacgatcaataagtgtggcgattggagataagattaggtagcctaattgacgttgaccggattattagatcgatctgaagaaatctgtgcaagaaaaaaaaaagataattcccccggtgccggtgcatgcatggtctatatttaaagaaaattaaaaaaaaagaaaagataattattaacgtgacttgcgacttctccgggtgtatcatccatggatttcacaatcagcactcaattaggagttggacttgagcagtaccccctctgtcaaaaaaaaagacaacctagttataggatgtgacacatcctattacaatgaatttgagagatgtgtcacatcctagtacaaggttaattttttttgggacggagagagtacatgccgaactttttgattaatgtgagagctcctgaaaaatggccaattagtattggtatagatagatatgcatgattatcgactcaggttatggcatgagtgtacatatgtactactctctaaagaaatttagcataatgatacttacagaataaatgatgaatagtcccgttctttcttaaagaaatggatttattgtcaccattctaattcattcatactaaattatgcttagttagaattactcctttgaatccattccatataaaatcataattttaatccctaaaaaaataattttaaggggcatttttagtttttatataatcttgttactctcaacatgccaattagtgattagagctaagtacataggatgaaccgaaaattgaccactttaataaagattctatctaaatatgccatttcatcatttgaatgaacatgcataattgaagtgacaaagttgtgccaattaggttctaacttaccaacgcttttttaaaggaaacattaaatctggtaaggtaacggcagtaattcgtatttcaagcccttccaaggataggagtagccgattacgttaaagatgacgttttaaagtgattcaattttgtttccgaataatgataatagcccaatatactcaggcgtaaatgcaaagattatttaccattgttgttcttactgctttttggaaaaaggcaaaagctttctcacttttgtattaatagagaggagtacattcataacgcggaaatacatacagggtctatcacaagagagctattctccagggtgaatgatctctgtgattcgtgtggctaccgccttgatccacgctcacgcctccttttgatcttagcgataattgtagccggtatggtagctatgtgcctaaagattctgacattttgctcacaccaaagctcccagaacacaaggatgatgttaatgtcaaaatttggtaagccccgaagtcatcatcggcctagagtcagtatcggcatcagagttcaggaccggccgatgggcattatcagttgccagtagcccgattcttgatgggttcagctagggaaattaattacttaaaagaagcttatccagaagagaccgagttcgaggaggatgtggcttggcagtttatctattaattaggaatctgttcaataaggacttaatgtttttccttttatttctttaggaaagtttgtatcgtgtccaataaggataaggactagtatctacccatgggtataaatatatacaccggagtccttataaaccatctccacaaatcaatacaactacttttggcacattgccaccctcttgttcgaggttttacttatcaaccggcagaacttggcacctgatgcggggctgcatcggcttttgatctcctacgaaggggtgttgttcaaggctgtatcgcttcgacctcttggatctctcttgttcggttgatatatttgcatacctattttttatatatcttagttaatctatgtcgatgattcaatttatctgtatcggccgaattttttcagggtttagccggtatcgactaaattgttttgtcgatctagattggctaaggtatctatcacctaaaaattagtcaaatggttggtgtttagaatttatgcttcttttcataattagttctgcatcaattgggtttgacctactaagtcgtgcttagaatcataaaagctaacctatctttgattgccaataagtgtttcatcgtggtttcagccgataagttatctggacgttgcatcggctttacatataagttagttttagctaatcgcaataaatgtttcattgattatctaatcatttggatttatgaacatcgtatctccagctgatgtatgctttaatcaatagttattttatcgtatcgttattggccgattggtttctattggattatatttttttatatagtattatcagtcgattgtgtttatatcattatttactcaagtattagagtctatattggatatatagccgatttctcgaaaccctatcgacatcggttagtatcgacattgactggaattactatattggcttgctggccgatcggctctttgatgttcaatttatatatcttgttagttgcaggatccaactgactagcatgcccacatctcatcaatattttgtacctgcactggaattaagcagatctcctaggccttcgtgtgtttgtcgacacggttcgcgtcaatgcagatttgacaccattggtcggacgcagaattttttttttgttcgcactttttttttttggattttggctcctctgggcacgtttcactttttttttgccgtttctttccgattttttttcaatatttcgcatacctcttgacaaatgtagaattgaaagtttttaattttgacttgaagtttttaaatcttgacttgaaagttttcaaattttgtgttgaaagttttaaaattttgagttgaaagtttttaaatttgagttgaaagttttcaaatctaggttgaaaattttcaaatttgggttgaaagtttcaaatttgggattaaagtttttcaaatttgagatgaaaagttgaaatttttcaaaatttgacttcaaaaaaaattcaaatttcgagttgaaatttttcaaatttgagttaaaaacttttcaaaatctgacttggaagttttcaaaatctgacttgaatgttttcaaattgacataaaaatttaaattgtagttgaaagtttttaaaattcaagttgataggtttcaaatctttagtaaaaaaggaaaacaatgttatgtgaaaaaagaaagtataacttgattgaccgtaattatcagatctaattacctaacagttctgctaatcacgtttttatcccggttcttgtgcacgtgcggcagctttgtgacacgaaaaagaaaaaggaagaccattgccacgtgcgaggttagaggctaaaaaaaaaaggaaaaagtaaactgatgggctgcgcgtgagggcgtgggccgcatgcggagcaatgggccaaaatgcgcgacttaagttgatggcacgtacgcgctaattagcaattctgggcgcaagaagcactctctagctatcccgggccctctgctcagcatcttcgaggcacacatacgagtccgagtgacagtaatcattacattttggctaatgtgatagggggacaaggacaagactaagcatagtaccttccttccctaggaaagagcggccactatggactccccatagatataaaaggaggacccgtgccacttagaaaggggttggaagaaaaaagctggagtagaacctagttcacatcactctaagcaagaaatcacatacaaaccacatagtcccaaacacaggagtagggttttacgcatctgtgcggcctatacctatataaaccatcgtgttcatctccttgttaagaggagctcgggctcaactcaccctctagccgaatcatcttcaaaagagggagtgttcactttaccgttgtcggggtaccaaactctgacacttgtatatatgtatattagcttgatgataatgacatgtacatattttcatcaaaatactcaaagtactaaccactacatgcatatccttagttctatagtttacaaaatgtcaaaagaaaaagggcaaattgcaaaaccaccttaaatatcactatgaatttgagattccccctataatacggtttgttgcaaatacctctctcataattcacctttgtttgaaaatccccccaatagtcgttgcctgcccattcttgtgcccacaaaccccatatgcactcatcacatgaatacaagcaagtgaggagccgtggtggtcactcatgttggtcatgctctatatgatatgacaatgacattcctagtgatggctccaagcatgtcattggacaatggcagtcacaaatcttcgcacttggctcctgaggttcggtgcaggctggtttttattcagtagatttaagatgagaacgatgagctcggtgcaacactctgtcgctgagaaagaagatgtgtgctcggtgtgacaccatgtcactgagatagaatatgcgtttgcgaacatgtagatgaggagatacgctaagttgtataacacatgcagaaagagaaaaaaaatatgtgaacaacctaggtgaattaaaggggggtatttgcaataaaccgtcttataggggggtgaaatcaaaacctaggtgaattagaagggggtattttggggtgttttttttgcaattttcccaaagaaaaaacatgaaaatagatatgaaaatcgatgcttatgcacctggttctgatgaagcaacacttggaatacagaactaccattaattattgcaattatactttgcttattttagctagtagtggagcggaatacattaagctatatcaaaagcatggtagattgacatgttcttccaatggaaacaaacgaggagctcctaattcgcacatgcgccccctgaagcgtgcggcgcccctgctagcttcccccttcctctctcattgccctccccttgttctctctccaccaacaccggacaccaacggtgagcgagcaagcaatggccctttgtcgagctcctccgatggaagaacctgagcatgcagcggtgcagcaagaaacaaagcgcctcgctcaatccctccggcggaatccttctaccctcttccgacgatgccatagccaggtcagctccaatccctctcctcttttgcgtcggtgcctctcttcttttgcgtccaccggcgccgcccggcctcgccggtgtggacttgcctggtcggcctacccctctccttcacctagctttgtcctcatcacaaacaccggcccatcaccttctgcccactccgcgggttcgacaatgctgccgccacctcaccgccctcccttgtccaccacccaccaccgggtagccacctcccaggcaatccctctaagctaatcccaatttccccctcccagtgccacctttcctcacccatcccgaatcccaaaccctaaccctatcccgagcttgttgtcacgcggtcggaaactgcacgcgctcccccccccccccccggcccccgccacgcgtgcatggattaggattcctgaacaaacgagtactacaagaacaagataaatgcaatctaaatattatgaatggggaattaaacacaagataaattgttgaatagagaatgggtacatggtcgaatatatttagattacatcaacccagataatcaaacaaacaaactattgggatatatgaatgattagtcttcaactaagccattgagaactaaagacaagatgaaccgtacatgtcaaattattaactaaataaaacacaacttacgatggaaaatataaaaaaatgaagtgctttgattcatggaggtggcacacttgaggtggaagtcatagacctaatcctttacaagatcgatggcctaagtttaactcgatttcagcacaataccagcttattttgacaatttcacgtgaaccttttatccacacatacactctatgaaaataacaaaaatatagtcacaactacaaatcatagaggaccttgtattcaacagaagaaccgagctctgtaatttgtgggcacgcgagtggagcttgtgtgtatgaaccccgtagcaggccaattgcaatggccttaaacacagcttctgatggatgatagtcatcccatgacccatacagttgagggtcatcgcaccccttgtattcaccatgtccacatcttgcagtttcagatacaccataaggtcctcctccaccacagcaagctgccaaaggattctcaattcctgaaacacaatcagaaaatttttatttaagctatcaacgacaacaaaaaccgtgatttgtcaatgcagaaattagcatgggagtgcatgacatgggtgctgaaaaataaagtagccaacttgataataaatttgtggagcagaaatcctatttagctgttgtggctaagataaaagcatagataaagatttgctttggtttgagaagcactagggaaatcaaatttagatgcctattgcttttcagctcttgaatatcatgacatcttttcctattgcttttcagctcatctcctctagacactttgctgtctactacgaatagttgaagcaagaacaaatatagtatttgtcatcaagcgattcattatcaacatagaaagtagagtaggggtcccttacatgacatgatgaaaataaactagtggacctggcaaataaatgaagggggagaaatcgtatttagctattgtgactatgaaacgagcatacaaaaagatttgcttcgatttgtttgagaagccgtaaggaaatcgaatttaagcgaacacatatatagagtatttttgtgtaaaataaatactaaaattaatagtgttaagctttacaaaagaaatcagagtagcactggtggagaaaccatctttgatcggtcaacccaaatctacaatagtcccggttctattaaaaaccgggactaaaaacgattttttgtcccggtttataagaagaacatgactagatgatctttattcccggtttgtgttaccaactgggactaaaaatcatctttagtcccagttggtaatatgtcagaccgtgtcaggcgcctaggatctttagtcccggtttgtaacaccaaccgggactaaagatctaactttagtcccagttgttgttactaaccgggaataaaaatcaacgcgtactatataatccctattacttatcctcttctctcgtccacacaacaaactctatctctttctttct

SEQ ID NO: 28674 - DNA, 5606 bp, Oryza sativa
gttgcagcctatttgctatatttcccacgccttgtgcctctaaaacgtcctcatgctcactaaaatgttgttgcgacatgtgatatattagtacaagtaactatgtaactatttgtaactattactgaaatatcattttattttacttactataggaacccttgcagttcttcacaattattgagcacgtaccaacacagggaattatattgatcttgtgttaggattacgtcatccttgtgaccaaaagcacagaatctagataaaaatattgagtagcgatcagcgaattgcctctctccatcatagtttctctcttccctattgaaccttgtctcaattccattgagatacatagagcaaaatgttgagcactccttcataatataggcttccgcgattgaaccctctggatgtgccctattgctcaccatgcctttcaaagtaccaaggaacctacataccaataatatacacttactacagtacaacgacaaaattatagaacaaagagaaggatcctaatcaacacatacctttcaataaaaaacatccatctatactgtacaggtccaccaagtcttgcttgttgtggtaaatggactgctaagtgtaccacaatatcaaaaaatgcaggtggaaaaatcatttccaattttcacaacacaaatattatttgttcttctaacttttccagcacatcaagcttcaatgacttagagcatagttgacgaaaaaagctacctaactgtaatagtgcatcacaaatgtcattctgcaaataccctcgaattccaattggaagtattcgctgcaaaagcagatggaagtcatgtgtcttcaacccagttattttcccctctttatagcttagaccttttgatatatttgcaccaaaaccatcaggaaagcggacagattctataaattgaaaaaaatcttgtctctcctcttgggatagtgtataacaagcaggaggctttatgacattgctgcccctttgttgcaagtgtagctctttccggatgtttatgtcttgcaagtccatgcgagccttaagtgtgtctttagtcttaccatttatgttcaaaagagttccaagcacgctctcacaaatatttttctcaatatgcatgacatctaggttgtgtggcaacttgagttccttccagtacggcaactcatacaaaatgctgatcttagtaaaattctttcctgggatgtccctttctgaggtctttcttttcttatttccatcatgctttccatacttgaagccttgtagatgatctaatttttgtagcattgcaaaattttcatctcctgatagctgtcttggcctcaatgatgtttcattcttgccattaaagttcttacttcttcgccatctatactgaataggcaagtatcttctatgacccaaaaaaccaatcttgcttcttagcgaacacgaatcagtccaatctaaacatatcgggcaagccttatagcccattgccacatacccagatagtgaatctaatgcacgaaggtcactaatagtgcctagcactactgctcgtagattgaaagtatctcctacaaaggcatcatatgtactgactccagtgttaaagagtagattcaattcttcaatcaagggcctcatgtacacatcaatatcccttccaggtgctttcttccctggaatcagcaagggcattaatatgaagggttccttcatgcacttccatggtggcaggttgtatacaactaatataataggccacacactataagagctactcaaagttccaaatgggttgaacccatctgtagcaagtccaaagcgcaaatggcgaggatcgtgcgcaagccattggtattttccatccaaatccttccaagcttcgccatcagctggatgtctcaagacattttcctcaattacacgcttatcacgatgatatcttaagtctgaggctatgtccttgttcataaatagtctctgtaacctagggatcaaaggaaaatatcgcaaaactttgtgaggtacacgtttctttcccttgtgaattttccatcttgattcattacaaacagggcacttatcatagtcttcaagttccttccagaacaatacacaatcattgatgcatgcatgtatgctttcatagcccagccctagatctcttaacatcttttttgcttcataatatgaggctggaagtgtgtcacctgttggcaaagcttctttcaataatttgagtagcatctcaaatgatttgttagtccaatggtttaaatcttttaagtggactaacttcaacaagaaggataacagtgaatgacctctgcatcctgggtacaactctctttgtgcatttcttagcaagttatcaaaacggactgcctcttgattagattagaggacattatctccattattaccactttggttctcctgctctgcaaccccaattgtggccctatggatatcacctaatagatcttgaatagtatcaaatccatcaaactcatccccattatcttcatcctctaaaagttcatcgtcctgatcataattgttggccacttctccatggaatacccattttgtatatgataattgtataccatacaacaccaaatgtgttcgagcatcattggcacccatctgacttatattcaaacacctttcgcatgggaaaaatataaaactgttctctccattgtgttcacaagcaaattcaataaatgcgtttaccccagcaatatactccctagagaacctatcgggcaatctcatccaactcttgtccatattctaatcctctgcataaatgcaagtttccttagaattaatcaccaatgtggtaatgcaagtattacagattatttaatctaaaactatttaatctcctcacaaatggcaataaaacttctaaagccatggcactcacaaaccaacatgctaacccaatgtcatggaaatcaattcatttctaaaaccctaaaattcgaaatactgtgtgctaatcaaattagtgcagtcaaccagatttgtaagtcacactcatgttatactcatgttatagcagatcaaatctcacacaaaaaccattgaataatagtgcatacaaacattcatttgggttatagatcaggttcaaggcacatccagttaaacaaattgtttgtgtgcaaacatagaatatcaggagaatttaaccacttaccttgaatcaaagtggagactcctcctgctgcctgcaatgaatcaactgcttgccccgacgacgttgtagctaaaccaccagcgatccctcgggcgctgccatcgcagagaccaccgattcctgggcgctagcacaggggccgcgaaggactcctccaccgagcgccggcggcggcggcggcgtcgtcgccgcaaaactccgtcgacggtgccgccgccggccgcagatctcgcctcgccgccgccgccgccgccgcaggagacctttcccttgcctctcgatttgtttctggatggggatcgggaggaagtgtgttttgcactccagtactccacatattcaaatatcaggtacatgccttggttgctatatgttgtcacgtgactagtgaccaagtactggccagtaacttggtaactgtagaggtaattggtattgtttaactcaagtaacgtgctgacagctacagaaaccaaggtattagcatgttggttactattgattaatatctaggcaccaaacttcttggtaactaaatatacggtagctaattgtatgttttcttgtagtgagaacggtgtctactcaaccaaattagcatacattacaattcattggggcagcgggctcgatcttcaaccagacaatctcaaaatgttgggtgccactaagtgcgcgcaagttcttttcttggctcataatccaaaacagagtctggataatagacaggctccaaaagagagacaggacaaaccaacacaattgcccaatgtgccgagcttctacagaatcggtcctacacctcctagccaactgcagactgtcgagaaggatatggacaaaacttcaaagatggataaatatcgacctccaaataaatgagtgggcaaactgcgccaatgtagaagaatggtggtacaaactgtcacgtataccccatgtgccgagaaagacactaaaattggtgatcatccttgtggcctcgaagctttggtgcgagcgaaataccaggatctttatacacatagctaccacaatggctacaattatcaccaagatcaaagagaatgcgcgagcgtggatcaaggcgggaggcacatgaatcatagagatcatcccctcgaagaatagccctattctagttcttttgcgggtctattgtttgtgatagaccctgtatatatttccgtgctgtgaatttactcctctataatctattactagtacaaaagtgagaaaagcttttgcctttttcaaaaagaaaaaaacagatattagttcttatgatttgtgaacaatatgtacaaatgcagtaagaacagggacggtaaataatctttgcatttatgagtatattgggctattatcattattcggaaacaaaattgaatcactttaaaacgttccatatttaacgtgctacttctatccttggaagggcttgaaatatgaattgctgccgttaccttaccaggagatttaatttggtgccacaatcgggttccgacgccaccaggccgatcttggaaagcattgacacattttgatccgcgttcgatcacacggaggtttataaaagggggtctgcatatgcaagcaatgcagaacgatcgcgacaagtatatatctctctctagcaatcatctcgatctgtacattcttggcgatggagagcttgatcaggcgccatggggggcgccgtgccgtttccccgtcatcgtcggcggcggcggcatcgttcatcctcctcctctgcgccgtcgtccttctcaacactcacgtggcgctgtgcggctgctacaagcgcatcttcagcttcggtgactccatcatcgacaccggcaacttcgtgtaccttaccggcaacggcccgtcccagttcaaggagctcccctatggcatgacctacttcaaccgcccctccggccgcatctgcgacggccgcgtcctcgtcgacttctacggtgagttgcatctgcagatgtagcatgtatataattttatatacacgtgccatttcttgatttcgcgcgtggcaatctatatttgctcgtgtgtgtgtttcagcgcaagcgctcaacctgtcgctgctaccaccgagcataccggaggaggggtcagggcagttcgagaacggcgccaacttcgccgtgctggcgtcgacggcgctggggccggactacttcaagaccaagtacaacttcagcctgcccgtgccttactgcctcgacaaccagctcgcctcgttcaagaaagtgctcggtcggatagctcctggagtcggtaaacaatcaatcacgcgaacacgttgttaatttgatcgattaacgtgcatgcgtgcagtgcatggaagagcgtgttcagatcatgtcggatatatatataaat

SEQ ID NO: 28675 - DNA, 3766 bp, Oryza sativa
ctcgcctcgttcaagaaagtgctcggtcggatagctcctggagtcggtaaacaatcaatcacgcgaacacgttgttaatttgatcgattaacgtgcatgcgtgcagtgcatggaagagcgtgttcagatcatgtcggatatatatataaatctttgtctctgtttcagatgccaccaagagcctgctaggcgagtcgctgatcgtgatgggcgagatcggcggcaacgactacaacttctggttcaccgcgcggcagccacgcgagacggcgaggcagtacctccccgacgtcatcggccgcatcggcgccgccgtccaggaggtgatcaacctcggcgcgaagaccgtgctggtcccgggcaacttcccgttcgggtgcgccccggagtacctccagggcttccagagcagcaacacctccgactacgacgccaccgggtgcatcgcgtggttcaacgacttctcaaggcagcacaaccaggcgctggtgcaggaggtcgcccgcctcaggtcgcagaaccccggcgtgaggctcatctacgccgactactacggcgccgccttggagttcttcaagaaccccaagaactacggtgagcacgccataaatcctatatattgtgttcgatatatatgatgcttcattgctttgtttgactaataatgttttatcgatccgttcttggttttggaaggtatcggtgaccctctgctggagtgctgcggcggcgacggcccgtaccacaccggcatgacgtgcaacaagacagccaaggtttgggggtccccggccaacttcgccagctgggacggcgtccacatgacggagaaggcctacagcatcatcgccgacggggtgttgagcaagcgttacgccgacgctccgttgctctgctagaggatttagctggaattcgtgcgtggctttaattctgggatagagattcttgggaactcttacgcatatatatttgtatcaaccagtgaactagtaatgcaaataacaataatctgattacgcaacgcacgcattccttcctccggagtccggagtataacatttggtaagcgtaaacccgtagcaagatatactgcttatgtaagatatgaccacacatttatttttctaaatgtcgtctatctcattcggtttggtctttgacccaaatagtttcaaacctacatccatcctatagtgtttcacatatgttcgggacgggagtttggcttttgtgtttatctaaagttttgagacctttactcctaatatgagctgttgctatatgttgatcggtatggttatgtaggaatggtgtagcttttaaagattgattctcctttgcagggtaatctggcttcgtttttgggctacttcataagccaagtttacggaatttaattgcttttactacatgttagcaattggaaagtggccaagaagttttttacctacgagcgtgggtggcgacttaatctacgaattgataacccttaattcttcatgtttaattctttcaaaacaagtgtgggtatggtgtgcgtttaggttatgtgctgagtatctgtttaggctatgtgcattttaggtatgtagaggctacgaatgtttttagcatggttgtatcatcttgaataaaaacttatgttatctaaaagaaaaatcattaatattttaattgatcaagtcaaggagagtaggaccgacgagtaatgtagatgaggctagctatcgagctcttgagtttgtgagtgacaaaatgctcggttccttacatggtagaccggggcccatataagaatacctacttgttgaatttcccgcgcaattgcatgggactaatcgaattttccccataattgcaggagggatattgaaatagaattatatttgctaaataaatcttctcattttccgagttaacgcttaatatttaggtcttagctaggagagtgttaagaattagggtaaccaatagtttcaaaggtaccaaccctatgatggaaaattttcttcttttggtagaactctaaggccccctttgaatcacaggaatgaaaaaacgggggaatgggaaaaacataggattctgataggaatacaagtgtaaaacagaggattgcaaaacacaggaaaaacatagaaatgaccgtttgattgagccgcaggaaaaacacaggaatttgaggagagagaaagactcgaaggattcttaacatgaggtagaacctcatgttaaatttccttcaaaatttgcatgggaagaggcattccataggaattttataggattccataggattcattcctttgattcaaagggctatataggaaaaattcctatagaaattaaatcctttaaaattcctatgaatttcctttgaatcaaagggggcctaaaaagaataaagatttttaaacacacgggcataggaaaaaaatgtaggattcaaacgcctcgacatctcaaatcctatggattgggaagcacagaaaaactaaatgaatgattatttggataaaacgtaggaaaaacacaggaattaaaacagagatatagacatacaaaggtttttttttccaggagattgatcctcatgtaggaaatcctccaaaatttccatgattgagacaatcctaaggaatttcaaaagatttgaaagagccattcccttgttctaaatgaccatataggatagatgtctttccataggaattcaatccttgaaaattcctccagaattgctttgatttaaaggcccaaatttagatatggttttatacaattatatttgtaaaactagaagaaagagttgtatctcaaatacaattatgagaaaagaaaattatcttgaatcaacatttatacgatccattgatgctacagctacaatgtggcgtcactatgggtatacacatatctttagaatactatatctacacggcttcccatcaatctgcatttgaccacagggaaggaactgtccaaaatactttaagaagcactttaatagtattcggatgtattgcatatgttgtgatatggtaccataataataccataattggactacatctccatttataacaggggattcgaatgagccatttaaaatgcaggcgataaattgaagccaacaacattgtgtccattgtcttcgatccctctgtcgatctctgctgttccagcctagaggcagagcagcagcagccgttgtcagatatgggaagtttcagtcaccagaaacattccatttccgtatacctcgtcctcgtgtccgccgtcctgctgctgaactcaaccctgggtttgtgtggctgctacaagcgcatctttagcttcggcgactccatcatcgacagcggcaacttcgtccacatcgccggcgaccatccgtgtccgttcaaggaaccaccgtttggcatgacctacttcaagcaccccagcggccgcatctctgatggccgtgtcgttattgatttctacggtgagttcataggcccatcaactcctccctgactgttccaaaatttattttcccatgtatggtcaaaattgatttttcttttgtttacagtcagggcggatcacacagctaggatagccaatattttcgtaattcaacaacattgaaaatcatttgtccatgtttttgtccaggtttttgaaaatttctagatccgttattgtttacatagatagtaccctctttaatcatgaaaatatatcattttgattttttttaattatcaaactacatgcataa

SEQ ID NO: 28676 - DNA, 4087 bp, Oryza sativa
aaccctgggtttgtgtggctgctacaagcgcatctttagtttcggggactccatcatcgacagcggcaacttcgtccacatcgccggcgaccatccgtgtccgttcaaggaaccaccgtttggcatgacctacttcaagcaccccagcggccgcatctctgatggccgtgtcgttattgatttctacggtgagttcataggcccatcaactcctccctgactgttccaaaatttattttcccatgtatggtcaaaattgatttttcttttgtttacagtcagggcggatcacacagctaggatagccaatattttcgtaattcaacaacattgaaaatcatttgtccatgtttttgtccaggtttttgaaaatttctagatccgttattgtttacatagatagtaccctctttaatcatgaaaatatatcattttgattttttttaattatcaaacctacatgcataatttgtatattttcaataaaagattatttgatggaaaaaattaaaagcttgactttatgtttagtaactgaagagaatatacagtagagcaccattaattcgagtagtagtgcacatacccaatacagtagtacattttttagatgatgatactgtgtgtagtacatgttttttttttttttgacatgcccaccatgtgcttgcgtatatatgttgcagcgcaagcactccagcttccgtttgtaccaccgagtttgcccgagaaggacagggggcagttcccgcacggcgccaacttcgccgtgttggcctccacggcgctgccgccggagtacttcagaaggcggaaccacaccgtgccgatgcccttctccctcgccacgcagctggagtggttcaagcaaacgctgcagcggatcgctcccggggacggtaagtagtacgtggtacttgtaaaattaacaaccaaaaaaaaaaaaaaccgtgtgcacgggcaacagtgcacactgcacatacacagctgatcaatttgtccgtttcaagtttctaaaatgttgctcctgagtcctgattttaaatttcagctgctaggagagcactgctcggtgagtctcttatcttgatgggtgagatcggcggcaacgactacaacttttggttcttagatcataaacctcgcgaggttgcttaccagttcatcccggatgtcgtcgccagcatcagctccactgtccaggtcggcacaaaccatcatatcctgatcgaaccattgcatatgtacatgaaaaacatgaaccatcccactgacgtagcatgcaccatgtacatatacaatcgcatacacgcaggagctcatcggtctgggcgcgaggacgatcatgatcccggggaacttcccgaccgggtgcgtgccggcgtacctgagcgcctaccggagcggcaacccggcggactacgacgagttccgttgcctccggtggttcaacgccttctccgccgcgcacaaccaggcgctgctcaacgaggtcagccggctcaaggcgcagcacccgggcgtcaggctcatctacgccgactacttcggcgccgccctgcaactcttccgtaatccacgcagattcggtgagctgccgcttgtttcgatcgcatcgcatcgttaaaaaccgcaagatgcgtacgcacgccacaccacagtactgatatatggaatatcgatctgtttgcgattggcgtgcgtgcaggtatcaatgatcctctgctcgcgtgctgcggcggccatggcccgtaccacaccggcgcgacgtgcgacaggacggcgacagtctggggtgatccgggcagtttcgccaactgggacggtgtccatatgacggagaaggcgtaccatgtcatcgccgacggggtgctcaacgggccgttcgcggatcctccgttgctgcatagttgctagaattgtgctatggctgttccagaatccagctgactactgtagctgagatctccggagatcttttgctggttttattgatgaatttgaaatggaggaaattatttcagtttacttagatgatttcgaggagaaataagttcaagtaatgtcatgctcgatgctattatcgctttttttttaaagaaaaatagtacaaacgtaagcgctcacaatgcgtgcacattcaccatgacgaatacaaacgcacagccctaaccctataagcatctccgaaaaattggaccgacatgtattgagaatgacgaagtcaactcaggcatctgctttgaaagactaggatgacatatcttgagaatgactaagtcgttataggtgtatcactgatgacaggtacttctcctaccaccaaaagaaaaaagctgtaaatacgaacacccatgtcaaatctagaatttgaatccgagtatggtggttctaccgtaagaaacctaaccaccagttgagctattctcactttggtattatctcttgatttcaagcgttgatgctgcactttacacacaaaatgacaaagaaatggtgatctaaggtcccgtttaagttgttaactatgaacacgcaaaatgagaaaactattaatgcatgattaattaatttttaattattttaaacttttaaagaatttgtatatgatattttaaagaaacttctataaaaatagttttacacgaaatacaatgtctaaaaagcgtgttaaaaaaccaagatagaattggtatcttcatcaccaaaataatggggcgtacagattgatcagacccttcaattaagcccacaatgggcctactccttcgaagagcccattatgggcctacacaactaagcccattaaaattaagcagggccgagacccatcgtacacgcaaaaccgaacgagaaagctttgaaaccgtgcgaccctgaagcccgcggccacgatgcccccgccgtggccgccggccgcgccgccgccggcctgcgcgcgctcgctcgctgacctcctcgtcgcgctctccgccgcccgcgcgctccccaaggggcagcagctccacgggcatctcctcaaggcaggccacttctctgccacggcctcttcccacgcgcccatcgcccaccacctcctcaccttctacgcccggtgcgcgctccccggagactccttttgcgcattcctcgacctccccgcgccgccatccccggccgagtggtcctccctcatatcctccttctcacagaacggcctccccgccgccgcgttagacgccttccgccgcatgctcgcggctggcgtccccgccaccgaccgcaacattccctccgccgccaaggcggtcgcagccgcggaagactcctcgaaaaagcatcttgccccgcacgcgctccatggactctccgccaagacaccgttcgccggaaacgtgtttgtcgggtcgtcggtgcttgacatgtatgccaagtgcgggcaccttgccgacgcccgccggctattcgatgaaatgccgaagcggaatgtcgtctcctggtctgctctcatatgtgggtacgctgatgctgggatgcattccgcggcgatggagatcttccgcttagcacttgaggaggcagtgccggttaatgacttcacagtttcgtgcattcttcgcgtgtgtgctgcagcaacactctttgagcttggtgctcaggtgcacgcccgatctataaagacagctctaaatgcatcaccgtttgtgggtagctcgcttgtttctctttactcaaaatgtggccttgtggagtgtgcataccaggtgtttggtgaagcacctgagagaaaccttggaatttggaatgcggggctcaatgcatctgctcagcatggtcatactactgcagcatttcaacggtttatggatatgcaaaatgctggatttcgtcccaactccatcacgttcctgtctttgatcactgcttgtagccatgctggtcttgttgatgagggaaagagatatttttccctcatgaaagagtacagaattgagccgcaggctgagcattatgctgcaatggttgacctacttggccgtgtaggacgtataagtgaagcactaggccttattgagtcaaggggatcctctagagtcgacctgcaggc

SEQ ID NO: 28677 - DNA, 2564 bp, Oryza sativa
ttttagtgaggctgacaaagaacctttgtatgagcttctgaaggtatataatattattatttttattcctttatgtaatatctttgacttctctggagtgatcttgcaaatactaacatctgaattctatcttttgcagatgaaattcaacttagatctatctgaacctcatgttaaaggctgtctggagctactattttcgtcaagctataaaacatttcaccatagatgctatactcattatctcaagtctggtggtggggacagtgctcgtaacagtccatatgaaccccttcgtgacagacctggttattggacttggctttgtgatcatttcgaaacagaagaatttcaggtatatgattctttgcatgctttatcttatatctgaatgcatgcctcttaacaactagctaaatttatttcttcttcatattaactaaggcattttctatgtgttcctttggctattcttgccatatgcagaaaaaatcagttatagggaaagctaatcggatgaaactggcatatgttcataaaaagggaaccaaaccatttgtggcacttcagcatgaattagtaagctaaatttcatctattttccttatgatttatttttcgtaagcatctgtttaagtaaatattatgtcttggcagagttgtgatcaaatctcattgtacaaggaatgctattgtagtgacaaaggatgggcgtcaagagatgctagacagaactatgtaagtatcattctaacgagtcattttcactatagttaagtgtcttcttgtgctaacaaaaacttttgatttttttctatataaaggaaacaatgttacagatgcagcatgaaaatgagcaagaaggtgcaatccagctgacagagcaacaaatttgtgagaaggtgcttgggaaggcatatggatatattagagggagaggtcatggtccgaaacctaatagaagagcttcatcaacttcagcaaacacctatcaacaaatggaagaagaattggcttctacagaacaaactgtggcagttcaacaaaaccagcttgcagtataacaaaatcagcttgaatctcaacaaaagcaacttgattggttgcgcagtgtcgtgtccaaacttgctggtattccacctcctgctatggatgataatgatgcctcaggaccatcccacacaaccacaacttcaattgatggatccggtatgcaacatttttttttcttctaaaagaaaagaagaatatagtgttataatacatagaaatgacaattaacttttgttaaatttatttgataggttcactggtttcggatggaatgtcaaggagatcatgattttgaagatctttgattaggaggtattactactagaaattgattgcccaaaccatatggaaacttgagcatgcatgtagtactgcttctataaattcatgtttgaattgaatctctaatgtatacgctagaattctataaattttccaatcgactttttatgtcctgtttctattaaaactccactgtagtcatagcactgttttgaatttttttcaattaaattttagcaatatttcccatactccatgcatcttaaagttgcaactaaattgaaacttcgttcctatgaaataagttcatcattaacaattttgaagaagacaggattagaggatcgaccagatcagcatagtagtgaatacgaacattttatatatgtgatccagtccatgacattttctaatttccctgagattagctttttttcaggaacaccgcaacgtaatctcctaggctattacatcatcttgacaatactcatcatggtgtttcaaaacaagcatcaggttgcgatgctccaagagacttgtataaactcaaccatagtactacagaaattttgtttactttgtggtatagtgattcgtagttctgttcagatagaagtgattcatatttttcttcaaatagattactcatttagaagttgacttttgggtataatgatttccttgtaagactgcacatcagttttaatgtgttaccgtgtcaagcatgtactctaaggtgaagcttgagatgagtttattgtagcactattctgcagttgatgctatggtaacctagttgattcatatatgaattgcacatcaaattgccatagtactgtagtttctattaattgctctgtctgaattgaattatgcagtgggtgaacaaacctttagtcaccaaggtaattaatgttctaggtggcaggatgtatgtacttaccaaggagggttggacacaacatacttttagttgccaattacttggtggcaaattataaatagtcaccaagcaaccttggttattagatatttttagttaccaagtaccacttggttctaaaaaatatatagttaccaacattttcttggtgactattgcttttacatattgttaccaactatggttggtaagtaattatattatgtttagcaaccgaggagatcacacgttggttacaaaatacatttagcaaccgggttgtagccaccaagatgcgcccacggtt

SEQ ID NO: 28678 - DNA, 3257 bp, Oryza sativa
atgcagtgggtgaacaaacctttagtcaccaaggtaattaatgttctaggtggcaggatgtatgtacttaccaaggagggttggacacaacatacttttagttgccaattacttggtggcaaattataaatagtcaccaagcaaccttggttattagatatttttagttaccaagtaccacttggttctaaaaaatatatagttaccaacattttcttggtgactattgcttttacatattgttaccaactatggttggtaagtaattatattatgtttagcaaccgaggagatcacacgttggttacaaaatacatttagcaaccgggttgtagccaccaagatgcgaccaaggttcattggtagcgaaaactcaatagcaaccagcttgtagcttattgtcaccaaccaccttggtaactaatggtctgtttccttgtagtgtctgagtcaatttctaggtgatgtcatccgtttgatcattgaggagttctatgcgttagactaattaaatctctgtattgaaggacaaaaatcgtatttatttttataacgtgtctcaaatatatatacattgttgcatgtatataaatatattagcttgatgctaatgacatgtacatattttcataaaaaactaaaagtactaacaactacatgcacacttagttctagtttacaaaatgtcaaaagaaaaagggaaaattgcaaaagcaccttaaatgccaatctgagttggagattccccctataagatgatttgttacaaataccccctctcctaattcacctttgtatgaaattccccgaataacccgttacttgcctattcttgttccaacaaaccacacatgtgctcatgtgaattctagcaagagaggagctgtggtggtcagtcatgtccgtcagactctatatgatatgactgtgacgttcctagtgatggtactgagcatgtcattggacaatggcgatcacaaatctgttgaatagtctcacattggttgtggaagggcaaatgacctaagatataagtgggggagcccctcacctcaatggctagcttttggggtgggaaaggccccttacgatcctatataattggtattagagcctggctagtttaacatctctggcccgatggacagtgtgtgaaggcctgatagaccatgggtgcctatggggcccgtatacctgagggaccgtggtgaaacggtgaaggggcggtgaagggttgagggacaccaatgtgtgaagggggaaattgttgaatagtcccacattagttgtggaagggcaaaggacctaagatataagtgggggaacccctcacctcaatggctagcttttggggaggaaaggccctttacgatcctacaaaatcttcgctcttggatatcttggtcactagaggatgagctgtcgcgcttacttcctgaggtttggtggaggttggtttttatgtagtagatttaagatgagaatgttgagctcggtgcaacactctgtcgttgagaacgaagatgtgtgcttggtgagacaccctaccactgagaaagaatatgtgttttgggacatgtacatgaggatatacgcttagttgtataacacatgtagaaagagaaaaaaaacacgtgagcaatgacaactggggtgaggtgggggggatatcaaacctaggtgaattagaagggggtatttgcaacaaaccgtcttatagggaagaatctcaaactcagattggcatttgaggtatcttttgcgattttctctaagaaaaacatgaaaatagatatgaaaattgatgcttatgcaccaaaattgtgatgaagcaacactcagaatatagaactaccattaattattgcaattatactttcttattttagccagtagtggagtggaatacattgagctatatcacaagcttttaaagtcaaattttggtaaggttatttagtggattcagttaagaaaagatgtcgatcaaccaatggaagtttatctagaaatgaccgagttcaaagaggaatcgtgaagaccacggcatagcagtttaattctatatattaactcgacaagattttgtaattttccttttatctttaggaaacttgtatcgagtccgatcaggactagtatcaatccgtgggtataaaaatgtacacccggggcccttgtaatctatctctcgatcaatacaacttttggcgcatcaccaccctctttttcgaggttttatggccagaggaacttggcacctggtgcagggctgcatcacttcgatctcccgcgaaagggtaagtcctaagttctaccaaccctggcagtggcaattgtatcggctatattggcattgttcaaggctacatcgtttcgatctcttggattgttatggttcagttggtatacttgcctacctgatatttcaattctatctttaattgcaaaattgtatttatagacaaattagtttagctgggactgtctcgattaggtctgatattatgtcttcgtcgatatatctctacaatcacaatgttgttttaaatagatttgttatatccatcatgttagcatagtctatgggcttatctagcttattgatcagatgcaatctagaactatctcggttaggtccgatctttgcattgttttatcggagtgctagcagataagttatctttgcatcagactttcagccgatgtatgcattaaccatcgagtctacatttaatattatgtatcaatatcagccgattggtttattgggcatctacttcatcatattatcaacggctgattgaattgtcagttcaagttcttccattgtctttatccaagtgtcagaatctacatcggatatataaccaattgttcaaaaccctatcgacatcggttagtaccgctaaatcggcttattggctgatcaactctttgatcatcaatttatccatcttgtcagttgcaggatcaaactgactagcacgcctcgaatctcataaatatttaggacctgcactatagctaagcagatctcctaagcctttgtgttttttcacgtcaacacaagcatactagattgacatcttcttgcaatggaaacaagcgaggggctcctaattcgcaatgtgcccccttgttctttctctccaccaacacccccgcttgcttcccccgtcccctttcttccccatccctatgttctttctctccaccaacaccagacaccaatagagagcgagcgagcaatggca

SEQ ID NO: 28679 - DNA, 714 bp, Oryza sativa
ttatgttcggatgaaattccaaggaaacggtccttaggtacaagagcgggaaaccgtacacccagtacattccccggtccgcggttttggaaattcatttagttcgcaagcaccgacccaggtgtcgggttttccaagtcttttgtaaaacccaagttttacccaagaagttactcagattttaagtttgaaggcgaccgtcggtactcgcacagagtgcacgaatatcgaggcgcaactagatggttacaagggaacatggtataacaattaacaatggaaggatcaaatgcaacaagttaggtaggtctgccaatctgccttgcagacggaacaacagattaagtgcaatcctatcaatgcataatattttgcaagcaatataattagatttcaaatataggctcaagatgttcaaaggtggcttgccttgctcgagatctggagcttgatcctcgaaatcctcgcactgcgggtcttcggactccgaaactacacgcaaaacgggacaactcaacaaacggtgaaaataaagccctattaatgacctctaagcgtgccattagatagatctcgagatttgagaaattttggaatttgaacggagtcaaacggatttacggttgggaagatattgaatttctaagattattggatttttggtctaaaggaaaaggatttaattaaatcctttttggaaaagaaaagaaaaga

SEQ ID NO: 28680 - DNA, 2715 bp, Oryza sativa
ccatttgaaaacgaagctttctctctcctaaagcaagcaccaattagggggggaggttttcaactcgaaatttttacttgaactctatacgaaaggtgaagaactctctatcttgcttcatttggctccatttttggtatatttcggttgggggaaagtggagtttttttaatattttgacaaggtttggtccaactattttttgcaaaatctagcttcaaaatatatgttttgatgggcaaattttgcatgtaatcaattgtacatactagttacatgtattgttgtattttttttgggagacaaatgcatttaaacttttgtatgaaatacctgcggtctatttttttatctgtaacttttttgcctttatataattagatggatcggtcgtcatggatgtatgagatgcggagaacgcagccgatatttattaaggaagcatctaaatttattgatcaggctaaggagcatgctttgagggagaatatgacaaagatcttttgtccgtgccgtcattgcaagaatcagaaattgttggtagatcctggtgaaatattgggtcacataatggagtacggattcaccgccaactacaaggtttggacctatcacggggaattcgccaatccggaagatgacgatgaagagttaagtttcgagatgaatgaggcagagaattttataatcgaagacatgtcgcgtgaaagaatgattgtcgatgtttccaccgatagtgatgatttcgatggtggttttgatttagaggatatgctacgccatgttgaaccagaggtgctagcgggcaggtcacgaggattggagaattggcaagcattagagaaggcatcgaaggatcttctttacgatgaaacgaagggatatgataaggatttcacagtcttgcgttcagtgcttgaacttctgagattgaaggctaaacatggatggtcggacacaagttttaatgatctgatgagtttgttgcgtgtgttgcttcctaagcctaactttgtaccatcgaacacgtatcaagcgaagaaactcatatgtcctttatctcttggtgtagaaaagattcatgcttgtaagaatcactgcatattataccgtaaagaatatgcggaattggaatgttgcccaacgtgtggcacaagtcggtataaaacgggaaatgggcccgtagattcagagtgtaccgatccagattctgataagggtaagcgcgggaagattccttcaatggtgatgtggtacctaccaattaaggaccgcctgaagcgtctgtactcaaacccgactgatgctgagttgatgagatggcatcaagagagccggaaaatagatggtatgattcgacatcccgccgacgctcgccagtggaagacatttgatgcaaaacacccagaatttgctaaggatcctaggaatgtaaggtttgcgttgagcactgatggaatgaacccgtttggtgacttaagcagctcgcacagcacatggccagtccttctcacaatgtataatcttccaacatggatatgtcagaaacgaaagtacattctactcactatcctcatacaaggtccaaaccaacctggaatcgacatagatgttttccttgagcctttgatggaggacatggaggagctttggaaagaggggttacgactatgggatgagtttaagcgggagcacttcaatctacgtgcaatcatattcgttaccatcaatgacctacctgcaaacttttcattatctggccagattaaagggaagactggatgtctaatatgtctggagaaaacttcatacaaatacctgacgtcgtctttgaagacagtgtacatgcgacatcgacggttcctaccacaaagacataggtaccgtaagatggctagattgttcgataatacagtggagaatgacactgccccagtagcaagaggtggtacatacgtgtatgagataacaaagaagattaaggttgtatatggaaagggaaagaagaagacagtaaagaggaagaaagctgatggtgagaacggtactgcgtcgcctttcaagaagcactcaattttctttaaatacttagattactggaaggacctagagattcgacatgcaattgatgttatgcacctcgagaagaacgtgtttgatagcaccgttggcacattgctggacatcccgagtaaaacgaaggatggattgaagtcacgtaacgaccttgtagatttgtccatacggcatgaccttcacccagtactgctgccaaatgggaagaccgagattcctcctgcttgttactcgttgacacttgatgagaaaaaagccttctgtaaatgtttacaaggggttagagtgcctactggtttcgcatcgaacatcaggaagctagtatcaataaaggatttgtccatttcgggatacaatgcgcatgactgtcataggttgctaacagtgttcctaccaattgctataagggcagtcaaaccagtccatacaaaggtggttataacaaagttgtgctactttttcaatcgaatttcgcaaaaagtatttgatcctttggaattaggcccgcttcagacatttgccgtcgagactgtatgccagcttgagatgtatttcccaccatcatttttagatatgatggagcatttgatccgtcacatcgtccctcaaaatattgaacttggtgcatgatacttacat

SEQ ID NO: 28681 - DNA, 3056 bp, Oryza sativa
atatgatggagcatttgatcgttcacatcgtccctcagattattgaacttggtccattatacttacatcagatgtgggcctatgagcgttacatgtcgatcctcaaaggctatgtacgcaatcgcgctcacccggaaggatcaatgatagagggatacacaactgaagaggcagtcgagtgttgtatggactacataaaggatgctaatgccattggcattcctgttcatcgacatgaaggtagattgtctggaaggggtactgttggtaggaagcagttcttcgataatgattacaaaaaggtgtccgcggcacacaacagcgttcttcaacagctcgctatcgttgagccattcattgagcgacacctagaagaaatcaaagcctgcttcccagggcggtccaatgattggatatcaagagagcacaagcgtcgctttcctctgtggttgaaagatctaaacctgccagttggtgattctgtggaggaacttactttacaaagattggcatgtgggccttcaagtattgtcaattcatggcaaggttacgacatcaatggatttaccttgagtacgactacgaaggacatgaaaagcacctcacaaaacagtgggatccgtgtcgaagcgattgacacgagtggagaaaagaggtcgtattatgggaccattcaagaaatatgggaactggactatggcctaaacatccagatccctgtgctccgttgtgaatgggttaaagacacaataggggtttccgttgatgactacgggctaacgatagtcgatcacagtaaaacaggccacaaggatgatccatgggttttagcagaacgtgtggctcaggtgttttatgtgaaggacccttcagatgaaagaaaaactattgtcatatccggaaagcaacagatcgtcggcatcgacaacatcgaagaccccaatgattacaaccagttcgacgatgtaccattgtttactgatcttcctatgcgaattaagaaggttgagagaacaatcgatgaagcaaatatgtcgtacgttcgagcagatggtgttgccaaggttattaagtcatagttatttcgtaacctttagttctcattgtattccaaatgtacgtgcatgaatttaggtcccccttatgttgtaatcattagcaaatgtacgtgcatgaatttaggtcccccttatgttgtaatcattagcatgtaacatttgattacgagttttgagcaattttcatgagttttcttagtgccaaaaacatttggaatgtataattgtggcgaaatattgggaaaaaaatatatatggacagtttacttatagaggaaaaaaaatatgagtttttttggtaaaaagatctttctatgcggctggcttaacagcccgcatggaaagatctttttcgcatgcggccggcttaacagcccgcatggaaagatctttttcgcatgcggccggcttaacagcccgcatggaaagatctttttcgcatgcggccggattatgtcgaccgcatggaaagatatttttccatgcggacccttaagccgtccgcatgcgatgatctgcgcctatatatagggagcgcggggagccaaaatttctaagtcccggctcccgcgaaaccctagccgccaggctgccaaaatttcccaagtcgccatcgccgtcgtccccgccaccgccggctcctccccaaagtcgccccgccccacgccgccgccgccgccgccgtcaggacctctcccccctcgccgttgccgtcgccgtcgccaggacctctcccccctcgccgttgccgtcgctgccgccaggacctctcccccctcgccgtcgccgtcgccgccggcaggtcgccgtcgccaccgcacggaactctcccccctcgccgttgccatcgccgccgccaggtcgtccccgccgccaagtcgtccccgccgtcgctcggtaacatttacttttaaaaaaagaaatgtgaaatgtgcaattgtggattgtggattgtttaattgtgcatcgtggattgtgatatgtgcaattgtggattgtttaattttgagaatgtttaattgtggattgttaaatggagatttatgtttaaattgggacttatgtttaaattgggacttatgttaaattgggatttatgtataattgggactttgttaaattgagatttatgtataattgggacttttgttaaattggcagctatgttaaaatgtgacttatgtttaagttgagacttatgttatattgggatttatgtataattgtgatttttgttaaactgagatttatgtataattgtgacttatgttaaattggcacctatgtcaaatggagatttctgtttaattgtgacttatgctaaattgggacctatgttaatttgagatttatgtataattgggacttatgttaaattgagatttatgtataattcggacttatgttaaattgggacttatgtcaaattgagacttatgtgaaattgcgttaaattgggacttacgtaaaattgggacttatgtcaaatttttttacgtcaagttggaagatgtcgaacgaaaaggttccatcgaacgcaccaatagcgcctcaagaaggtaacgctcctcaaaattccggtagcaataagcatccaggcgcttctagtgaagaaacgtggcgcacaccaagtgacccgtttccaatggaaataacacaagtcgccccccgcgatgatgatccggactacatacctatcgaacaggccgtaagtgatgaaaatcgttagccatgtattattccctaactatgatgtgacatgaacctaatggtgtatagagttacctattctgtgcagatggtagtccgacgccgctcaaaacgtaaagccgggaggaacaggacagagcaagaagttgagatggacaccgctacgtctgcacctgaacgtacggagacatctacaagtgcaggcgggagtgggaaaaaaagacgtggtgagagaagcaagaataaattacccaacgaaacttacaacgtgattgctctcgatcagga

SEQ ID NO: 28682 - DNA, 1463 bp, Oryza sativa
acgtacggatacatctacaagtgcaggcgggagtgggaaaaaaagacgtggtgagataagcaagaataatttacccaaggaaacttacaacgtgattgctctcgatcaggatgggaagcccatcgagccaccgatagtgcggtccaagttcagcaacgcctgtggcactctagtcaggacgcgttgtcccattaatgtcaagttgtgggaaacagtggacgacaacatcaagacacttctctggaatgagttgcagaagtattttgtgttccctcctggatcagaggtcagggggagagattacgcacttaaaaagatgggagatcgatggcgacagtggaagtccgatctaaatcgggattatgttcagaagaatctcccaccgtttacggattatggacatatatcgcaggctgactgggacacgtttgttgcggatcgtacaacagctgaagcattggctttgaggaaaaaaatgtccgagctcgcgaagaagaacaaatatccccatagattggggtcgagcggatacgctggtcacgtcgatcaatggcgggagatcgagcaaagatttgccgcggccggtaagcccctgctggtagaccccatggttgaacgtagcaagaactgggtttgggcgcgcagcacaggtcaagtctcggatgagggagacatactattcgagactccagacatagaagaagtgactactaatttgcagcagatagtcgagaaagaaagatcaggacagttcgtcccacggagggagagagatcagcttactgcggcgttggggacggctgaacactctggacgtgtaaggggtttgtcctcaaagacaagttggaaggtcgggtttccacaagacgcaccaagttataagaagagagacaaatacaaagaacaactatcggacaagatctatgcgcaagtgaaggaacacttctactcgttggcagctgaaaacccgacagcatttccaaggttattccctgatagccagcaacccacacaatccgcacagcaaacaactaatgtacccagcagtgtaggctcagtgcagacaagtaccttccctgtggatagtataactggaccaactccgtgcagtctcgtcgtaccaatcggccgcgctggaaagactaaggaggttgcaacgggtttagcgatacccggacgtcaattccacaacacggcaatccctgaggattacgcaagggtacaggtcgccaaggtccatagcgaccacgtttccttggaactagacatacctgcacctgaggggattgaacttctcggtgatgcagtgaatcagtttatcttgtggcaccgcagagacataatcctgagcgcggccgttcttgcagcaggatcttcaaccccatcctcatcgcaggcaatgactgctgccgctcctgcaccaccgtcgcctcttgaaccaccgtcacctcgacatccgccgt

SEQ ID NO: 28683 - DNA, 1964 bp, Oryza sativa
ctgccgctcctgcaccaccgtcgcctcctgaaccaccgtcacctcgacatccgccgtcaccaccaccgcttaggtcaccgcctcgccaacctacaccaccaccctccccttctcaacaaccgcctctcccgaccccgcaaccagttcaagcctctcccacctccccaactaaacagcatgctcccccggctccgccctcagttcaaacctctccacctacaccccaatctgctttggtagaagaagtgcacataccagatggtactacatccgactctagaggatccccactttggaacctcgtcgtataattccaaagttgatatcgacatacgacccaaaggagattgacaaggacaaggagaagttcatgttttcagctttcaggaattctgagaagagaaaagaacttgctcacgtcttgtcagactcccagaagtcagtactagcggcccaagatgaagtgcaatcctggttatctgccgatgtgcctgaaacttatgagtatggcaagccattcttgccaacttatcttatgaacaagctaccatgggaaatgagggtaatgcacgaatggtatatgaaggcatctaggaaaggtctcggtttcataagcgtcgccgtcccggaaggcactttcatgagtggtcctaatgggatattttttatctctttccaagacctttacgccctctacaagctagataaaatggacgttaatctcgttgcggctttctgtctgtaagtctaaactctttattacatgttgcacgtttcattcgaaacaaataaaccaaatctcatttcttctttattcattgtacagtatgcaattccacgaagctgatagaactggagcaaaggttggatacgtcgatccaacaagaatatgcaaaacacaacacaccgtagagctgagacaggactgcgagcaattggttggcaagaccccggaagaaaaggaagaatatgtgaagacattgcacaagaggaagaagctagaagtagcaacatacttggcaatagcaatgttggcgcacgccgacaaagatgtcttaatggtcccctaccagttcacgtaagctctctcttctttttgtttaattaatttatcttcttcggaattttctgtctccaataagcctatcttatatgtagagaccactacatattattccttgtatatccgaaagaccaattgatcatatcattggaccccgcacactatgacaaggagacatttatggaattcctcactattttgaatttgtaagtgataaacatttcattactataaattgtttaggtcgatcaccagtcttctaactactaataaaacaattgtttccttcaaacagagcacacaagtactaccgcaaaagaggtggaccagtacatattccatcccagaagaagttatccgtcaggactggctggccggtactatcaaatttataccaatacaactaattatcgaatagtacatatatactaaatatatctactgagatcggtccccataattatatcgcagtgctacaaacaaccaccaggaaccaacttgtgtggttattacgtgtgcgagatgctcagagtaaatgggaggtacaaaacaaccagtaaccgagtaggtcatcgaactcttctctacaaagaaacccatctcgcacacacttctcactgagtaccgttttattttcctttctgtgtgcagatccccgaaatcccatatattgcacaacgattcaaccacactactatcttgaacgtggccgctgacctctgccgattcatccgtcgcgatgtctgcaacgcaagaggtctcttctacgacaaccagagtgaactcgcaatggacgacaaatttaaacctctcagagagtgggagaaagaacatatgcaataacatgtacactacttatacatatgatgaaaaaactgtgccacttgtattatatatttgt

SEQ ID NO: 28684 - DNA, 957 bp, Oryza sativa
cagttcacttggtaacagtcatgatgtgtataatagtactacagttctataatgagaacaataccacagtccttacatattttaattgcatatattgtgtataataataacaaaatataattacagaactacatgtcatagatgaccttgcgttcagcagaagaaccgaggccaatgatctgtagacaagaatcggtgatgctagcgattggaggttgagtgtatgggccctgtagcaggccaattgcaatgcccttgtatgcagcttctgatggatgaaagccatcccacgatgcatactttgatgggtcatcacacactttgtattcaccatatccacagcctgcagatgcagatacaccataaggtcctcctccaccacagcaagcgaccaaaggatcctcaattcctgaatcgcagtttgggagtgttaaacaagctaccaacaagaaaaaatgttctttatcaatgtagaaagtagttgaggagtgcattccatgacatgatgaaaatagaatagccaacctggtaaatatatggagggagagaaaccctaattagatgttatgattgtggtacaagcatatttacagaaagatttcctttgttcaagaaatgctatggaagtcgaatttaacaggtcaacagaaagctagtattttatttcttgtagtaacctacaaactagaattaattaatagtataaagcttacaaacagtaatgaactagctgcactcaccaaattgttcaggggaaagaaaaatttccatggcagctccatagtaatcagtatagatgatggccacatcggggtgaagcttgcgcaagttttccaattcatctataagaagtttgttgtggtattgcgagaactcattcatccacctaagacaacctatctctggctcataatcttccttcttatcacgggtaccgagctcgaattcgccctatag

SEQ ID NO: 28685 - DNA, 6940 bp, Oryza sativa
  unsure (1)..(6940): unsure at all n locations
atatactccaaactagcatggtggctcgcgcagattacgcggctagtaccattatattttctcttatataatagcatatatattttctcactatattattaaaatatattacaatgacaatataattttaaattttacaataactttacgaaactactcatgcgtaatatttatattgtattttatatacgtgttagttattaattatttttaatatcaaactttagttatttgtaaattatatatattcctatatggactctggacttgtcttttaatatatttttttaattctgaacttttattatttttaattgtatttctatgtggattctaaattcatctttcaaaattctttaatttttaatttcaaatttcagttacttctaaattgtattcctatattgactttaaactcttcttcccatgtttttcttaatttctaattttagttatttgtaaattgtatttttatacggactctacacactacttttcattttattatgtttattctaaattttagttagttttaaattcctatatggactctatactctacttctaatattccttatttttaattcctaatttctattttttttttcttaattgtatttctatatggactctatactctacttctaatattccttattttttaattccaagtttctattattttctaattgtatttccgtatggactctatactctacttctaatattccttatttttaattccaaatttcagttatttcctaattgtatttttatatggattctagtctactcttctaatattccttatttttttaattccgaatttcaactatttctaaattgtatttctatatggactctagtctcctcttctattattccttattttttaattccgaatttcagctatttctaaattgtatttctatataaattcatctttcagtattctttaattttaatttcaaatttcagttacttctaaattgtattcctatattaatttaaactcttcttcccatatttttcttaattttgaattttagttatttagaaattgtatttttatacggactctaaactctacttttaattttattatgtttattctgaattttagttagttttaaattcctatatggactctattctctacttctaacattccttattttttaattctgaattttttttcttaattgtatttctatatggactctatactctacttctaatattccttatttttaattccgaatttctattatttcctaattgtatttctatatgtactctatactctacttctaatattccttttttttattccgaatttcagttattttctaattgtatttctatatggactctagtctcctcttctaatattctttattttttaatttcgaatttcaactatttctaaattgtatttctaatatggactctgattttccatatggactctatactctacttctaatattccttatttttaattctgaatttctattatttcctaattgtatttctatatggactctatactctacttctaatattccttatttttaattcagaatttcagttattttctaattgtatttctatatgtactctagtctcctcttctaatattccttattttttaattccgaatttcaactatttctaaattgtatttctatatggactttgtttttttctttttctccgattaatgcgagaatttctaagccatgagagcgaacgtggaggctcctttttctaatcctttaataatataataggtagatagataatagatagatagatagatagatagatagatagatattgttaatgattgtggtatctctagacacgcacctttctagacaataaagccccaccaactaatagcaaactgctatgactagtgcttagaaaatgagaactgccacgatctcgttccaaacgtcattgtcgaagcctcaaaggttggtggtgcaaggcgaaagccgaaagccgaaagccgaaaggtgttggttgattcaaacataccgtccatgtcgccggcgcagagcatgtcgagcagatcgcggaaccaccccatctccatctcgaggtgcacgacaccgtcgtccgtgggcacccctctctcccggaagaagtccgggccgagcgccgtggcgccgcccaccgcgaagttggccccgctggcgaagtcctccgcggtctgccctccccagtacggccgcaggaacggcagccccattgcttcagctgcggcgcggcgtacccacacgcgcgcgcgcgaattacacgtctcatattagcaaacggatcgagcgatcaatcgatgcagacgaggcctgcaggatggatggatgatgaggcgtaccgatgaagtcgatgatgaggcggccgtcggagcaccggccggtggcgcggtggaagaaggtctcgccgtagggtggccacagctgcgaggtcgttgccggagaggaaagcgacgttgcccgtgtccgccagcgagtccccgaagctgaacacgcgcaggtagcacggcgccgccagcgcctgtgccgccgccgccgccgccgacagcacaactgccaccgccagcactaccgccggcggcgagaggaggcctgctcctcctccggaagtggaggagaccattcttcctacactttcgtttgcttctgctcgacgtcgggcccgaaggcgaagcggccactgggattggctctgcggtgttttttcgcgttggcccaaaaaaggcaaatactccaagaaacgtaagcgtggctcgttaatgttaagtgggctcgagtgacgaatgcccacaggtcagtagggcctctggtcgctgttagcctattacacatgagacggtgacaggtacgctccatcctccactaaatgcactgtgaaatgcgttagtataattcttaagcgatcataacaagtacacattgatccctatatatatcactcatcgctaaaataataattacccgtaaatgcaaatgctcatgtcaagtataggatttgaatcaaggggacttcgttctaccacgagaaagctaaccagttgagttgcgtttacaagtacgtttatttcgtaagtcgtaaggtaacacttttagatacacagattgttgtatatcattactttggaccaaaagatttgatacatccatatattgattttttttcggcgatgtatatttaaccaagcgtaagtgaaaatatttttccccgtcgttcgcattctgccatggtgaaacaacttatcgaacgataatgaggcttgcagcaacaaatcacaaaatggttcaggtgataagactcgaggagatagaaatgggaaaataagtgtagtccaacgacaatgacaatattttttttacttcctctataaaatatactcaaccttgtatgaaataggataatctagtacaattatccatatattcgttgtactagattattttattccttactagcttacgttttttgtgacggagggagtattaagtaaataatcgcttctcttaagagtgttaggtgcaaggagagtaggtagtgaattaatgatgttgcaacataattgacctgattgatatatactgggagttgtgctttttatattatctaatatttgaagtgttttcgntatttcgatttctttaaacaatatcccgcacatgtttgacactgacagtttttttatttaagctatatggcacttctgatgattgtggatacaaataagagtcatggaactcactaaaaattagataaagcgatcggattgcatgatctttatacaatatcgctcataagaaatgcctctacgagaagcgacatcacggccacatcagccacgcagccaaggtgaccaaagaatgtagttgtctccctgtaacccctaaccctttcactatacacagaagaaaaacaatggagctaaattataataatactacacataccctataagaaataataaatcttaaaaatttacgaagaatcaaacgatccacaaataaaaccttgtggtcgtgactaaaaacagagaaggaataacaagagccagccaatcacttgggcaacagccattctgtgtagaacagttctgcagttctgtaatgaggcaaaaataccacaatcgttacatcttttaatcacacgtattgtctatataataaaaaaaatatagttacagaattacaaatcgtagaggaccttgtattcaacagaagaactgagctcagtaatttgcgggcacgaattagtggtggtagcaaatgaaggttgtgtatatgaacctcgtagcagtccaattgcaatggccttgtatgcagcttctgatggatggaagccatcccatgacccaaacttttgtgggtcatcgcaaaccttgtattcaccatatccacatcttgcagttccagatacaccatacggtcctcctccaccacaacaagctgtcaaaggatctttgattcctgaaccgaggttagggaaatgttaaacaagctatactcagaagaaaaaaatgatctttttcttgataatatgcgctttcctccatattaaggcttctagacagtttttctagtgtaaccgactagttagttcagtcttaaactcggtacaagtgatgtcatgttaatttgtaatacacataatgtatctataccatggtaagaatgcaataatttgtaatacacataatatatctataccatgataagaatgcagatatctgaacagaggtctggcgtgggggtgcattacgtgacatgatgaaaataaacttctgaaccttacaaacatatgaaggatacagacagatttgcttcgtttgagaagcactaaggtaatcaaatttaagagaacacatatagagtatttttcttgtaacctaaaaactaaaattagtagtgttaagctttcgaaaagaaatcatagtagaaacagtaatgaattaactgaactcaccaaattgttcaggggaaaggaaaacttccatggcagctccatagtaatcagcatagatgatggccacatcaggatgaagcttgcgtaacttttccaattcatctataagaagtttgttgtggtattgcgagaactcgttcatccacctgaggcaacctgtctctggctcataatcttccttcttaccactcttgaatatcatgaggtaatttggaacacatccaatggggaggttaccaggaacaaccagcgtcttggctccaagcccaatcaattcctgcaaactcaacgctgttgcattacaagccatgtaattttgtattgcttcttgatacagggtctcaaggtacacagaaaagatgtaacataggcacgttactcacggtgattgtagaagaaattttggcaatgacactcggagtgaagctgcgaatctttgtaatggacaccccgctgagaagaggtaggttgtaatcattgcccccaatttctccgaccaggaaaagagattgattcatcatgcctgtgcaacctgtgcaataactagtgtttagaatcagtatgtaaatatgatattatagctgaaaatggaattttaagcatatcacaattgcttatttattatatcatagttaaacatttaaaggatcacaggaagcttactacttgtcatttctactaaaaaccagatttgtagcagcatgatcttccccttggcgtattaattgatttctgatttatgttgtatgccatcaattcaagggcaaagttcatatgtagcagtgacatggtgtccatttataaaatattttttataatttttaatttcaactaatgatgatgtattctttggaaaacaatgtgttatggattcgcggtgtgattttatatatatatatatatatatatatatatatatatatatatatatataaactgcagaaagttttaggactccttttacaatatttcctttttatagaaaatacagtatcagttatggacttaaggtgtttgacaatgacggttatggattttgaaatggaccatctgcctagcagcaatcaacaaaagctgtcaatcttcaagccacaaataaaccccactatttctggtaatgatgaattgcttttcttattttccttgtgctgttattttctttggatgcacatttttttgtgtctaaaccaagtaaccacaggtgacatataatatgtgaaaatgacattagtagtgtatcgtggaaaatacttcgatgcagttatattctttagaaaccatgtcaacgtcctaaagcacaagtaaaaactaaaaaggaatcaaggaatatatattgtataccattgcaccaattctgaaatggcatagaaggtactaggataagttccacaccataaggaaaatgctatagcatacttttcctttttttttttctcttcaactttctagccaactcccaccttccatgtcttctgagagccacaaaaggttgagacagtgccttagtacctgtcagtctgcgtgcttatactctactaatcagtttgtggcatgtttgggatttgcttctccaatctccatgtgtcacattcagaccattctatttatcaccagatgcgcatcatcatcaagacattaacccccaccaaactactagtctactgctacgatttcatatcgctagttgaaaatgtcatcgtcaaaggtgggtagagagagaggagggattatatcaacataccggccaggtcgccggggcagagcagtttcagcagatcacgaaaccacttcatctccatgtcgaggtgcacgatgtcagccatgggcaccccctcttgcccggaagaaagccgggctgagcgccgtggcgccgcccaccgcgaagttggccccgcatgcgaagtcccccgcggtccgcccgctcaagtacgggcgtacgaac

SEQ ID NO: 28686 - DNA, 3534 bp, Oryza sativa
gttcgatcggtcgaccaatcgatgcaggggaggagggggcttaaaatcgccgcgagcagagtaccgatgaaatcgacgacgaggcggccgtcggagaatcttccggtggcgcggtggaagaaggtctcgccgtagggcgggcggagcgccggctcgcgggagtcgttgccgtagatgaaggcgaagttgcccgtgtccgtcagcgagtccccaaagctgaacagccgcgggtagcacggctcctccgtcgccgcctctgccgccgacaggagcaccgccaccgccacaactaccgccgccggcggcggcgagaggaggagtcctcctcccttcctcccggaggtggaggaggaatccattcctctcctctgctcgagatgaacggagaaaaggagagaaagtcgtcgcggcgatgctttgcgttggtccaagtctaacgtggcttttataaacgctgcggtagtcactgacatgtggggtcgcggtgacagaggcccacgggtcagtggggccagtggtcgctctcacgtgtgacaagtgtgctttctaaccttcgagaatgatgagatgtgctcagttaagaggccctctttgaagtacacgtcgaatccattattttttgcacacaaacatatgttctttttagtattacttccgtcccaaaataaatgcattcgtggatatccgtgccccacgtttgaccgtccatcttatttgaaaaatttaaaaatatttagtcacacataaagtaatattcatgttttatcatctaatagcaataaaaatattaatcataaaaaaattttaaataagacgaatggtcaaacgttgaacgtgaatagtacaaaactatatttattttaggacgaaggaagtattaattaaggcaaaggttttggatactctacgtctacgtgacctggtgaaaccggtaaaacgcaacaaggacgtacgaaaattacgtattccgaatggtgaggcacttccgtatgatgaaaaccgtgtgtgagtgaaaatatgttttcgtcatctcgcttctcccatgggcaaacggcccaaagaacaataatacgaagctcagcacgcagaacggctcggaggggcaatccttataaaccaaaattaaaatcttacaactttaatctagcgttgtttctttgaatctttggttttctcatcgtagtttattttacaacattattttaaaaagttcaaaatttgaaatatactcctaacttttaagaataacaaacttagagcatgtcaatggattgtctatactacttctaatataaatattttgcaggttttttcaaaaaaattaacctcccacaatagccctaaacaagctgaaaacatcatccccatcaccataaatgtctctccataagtcgagggagggcctcaccccggatagccatcaccgaccgattcacacgcttaggagtcaaccgtgggagtacaagaaaataggtctagttttgtctgaagtttttttatgtagacacatttttattttgagaagttaaattgggctatctcttagagggaaaggatatttttatcccttaaattccattagagattaaaaaaagatttaaggagattgaattttggcaaaaatgttagtcatgctctttagcataataactcactaggttaaattacttgtaataaaacctattcacatgggttcaaaccgtacacttgacatcacacggatgcttgtatttaggtttattattctttatgtgacatggtgctcgtatttaggttatgatgactttgtcaatccacattcatatataatatgtggactgcttctaagtttaataaattcctggttctcaaaaaaaaatccacattcataatgtgacaaaagtgggggaacacatgttagaagaaacgacaagtatagttcaacgagaaatgtgtttttttatatgagtaatagtttgtcatatactcctatatatgtaagaaaagtataaaatgttgtaaagttgatgttgcaatgatttgacttaattgattgatataatttgctcgtgactgtactatttatccaacacttccaaaattttgaagtgttctaatctttttcatttcttaaaacaacattctcgtgcattctttgagaggatattatttatgggctatgccacttgtcaggattttgtggatacaaacaagagcagtcatactcacccaaaaaggagaaagcaaatttgcatgaccatggtttaattttttcaatctcatatatacacaagaaatatcggcttctcataaaatctctaaagcgttaccacgcagtgcggtgatatcatactaccaacgtctaaacgtgcactcaaatgtacacaaaaatatgaaaaagatttaaggcgtacggagctcaacgatatgtacactactcctaagtactaacacagcaggactagcaggatccttgccaagcaatgtgttcttggaggtagagagttcacgaaagtatatatatgcggtgttgaggcacaaggtaacaagttagcaagtactagcaacaactatggtgttattttgtgtactaatctcctctttgtcttactcgctccgtcccactaaataaaacacttaaatttatcagtctccaaaactaatttttcatatatattttttgtcaaaaaaatttactatgtttataagaataaaatcataatcatatgaaagtaaatttaaatatcaatctagtaatattatttttaacaaataaaattttatttataataaaatagttactgatcaaatatttaaaaagttgaatctttaaaatatgtgtgtgccttattcttcagtgggacgaagggagtattagttttggtcggcagatcgccaccatgagacggaaaaaaagatctgtaccaacaaaaaaatcaactcaaaattatgtatacacggtaaaaaaggacaaattcaaggaccaaacagtacacaaataatacgtcccatcattattggtagttacagaatgcactgtttttcatactcatatccccatgtataaaacattttttttgttatttttgcatataaattatcatgttgcacatcttgatttttttttctttacacattagacacacatgcacatatcatcacatacgcaagaccgcaagaccgcaattacacacccacaaatgcatccactgacacacttttgaaaagaaaaaagaaatagtaacttgttcctgatcttagtatattcttgtagagtgatgcatttttagtgtactttggtgtaccagacatccagcttctaaatttagtttcaggagtttattttgtgagagaggtttacctagctccgctctcagtttaattagatggagctgaaactgtttggctgagttccagcttacgagagatggaggtggagctgaagctatgccaaacaggctagtagtacataaagattctcttctccatcgcaccaaacattgtgaaagagaaaagagcaccattttgagattcgtttatgcactattactattt

SEQ ID NO: 28687 - DNA, 670 bp, Oryza sativa
tcacccaggggatttgacacttgcaagccacattgaattgttccccgacgggttgccgctcaccgagaatattccatcgctggaaatctcctatctaaatttgctttcaacttgagtagatgaacaattattccaagtgggaaccacgaatcgcatatactagtctccacatttgatggctggtgagtggtgtgacttgttaacagcaatagtctctcttttcactcgtcaaattcaaatgagtagtttgtatttccagaaattatagttttaaaactggctaaagcagaacattaggccagtgtcaacaaatgctaaggcaaaaggtgcataatccaatgtttgtccaatgtaacaactcaaaacttgacacaaatagttcctctcgtacaagttttgttctgtttggcattaggccgccggattcttattgtaaagctcaaatcctcggtatcccaacacaaggggtagaaaaaagcataaatcaaatcaagagaagcctcatctacaggtatgagttgctagtctgcaaaatggcctaactacgcatttgcaaatttgatacccttctcaattgaagccttgagctcgcccttaagattctccagtccttccttctcaaagtctgacagctggcccaacccaagaacttcctcaactccattcttcc

SEQ ID NO: 28688 - DNA, 5666 bp, Oryza sativa
tgtcgccgctttggccgcgaccgccgagcgctagccctctcctttgaccgccttaggtcggttcccaaaccgacattgcccccctataaacccaagcttccccctttcctttcctctcccattcgcctccacgccattgccgccgcctcccgtgctctgttcgccgtcgccgttcgtcgttgcgcgtgtcgaaggagccggcacgagcaaggacgcggaaggggacttcgggcgcgccctctccttcctcttccccggcccgagaccggagagattactcccgcgccgtcggcctctcgtcacagcgcccacccgcacggtagtgcatctctccgttcttcctcctcgccccatctcctccccccttagacttgggtagtagcacgagtagactccccgtagctagccggcgccgccccgaccggtgccgtcgctcgccgcgtgctcgccgccatcgccgctcgagctccgtagcacccgcacgtcgccagcctcgctcggcgtagctccgcccaatccgacgctagcatcggattcccatagccgcgtggatgctctcaccgccgggaatcggtccctcatgacctcgtcgacgtttccctcttccctccccgccggttgtcgccgccgcgattcgccgccgtcgaactccctctggcgaatccgagccgttggctcgtctcccctcatcacgaacaaccgcccggtgtgctagcttttgcccgtatcgccgtggttcgctccgccgctcgccgccgccgcccgccgtccattcgcggccgggtcgtcgtctacctcccgccggcccgcatggcagccacgtaggcgccacgtcggcgcccgctcagcctagaccgggtcgagccgaccccagccagtccctccccgtgcgcgcgttccaccgcgagccgtgaggctgcgcgtgggcccgccgcatccgcgtccaccgcgaaccgcgcgcgcacctcgtccctcccccgcccgcgcgcatgagccgcgtactccctccgcacggtgagccgagctgctgacaagcgggtcccacccgggaccgcgcatggtgagcccggtccaccggctctctctctcctccctccagcgcgcgcgcgtcttgggccgccttgggccaccttcttgggccggccggcccgttaagctcggccgagccgccctttctctcgggccgcgccctagccgcccgagggaagtctatattccctccctctccctttttcttttcttttcttttccaaaaaggatttaattaaatccttttcctttagaccaaaaatccaataatcttagaaattcaatatcttcccaaccataaatccgtttgactccgttcaacttccaaaattcctcaaatctcgagatctatctaatggcacgcttagaggtcattaatagggctttattttcaccgtttgttgagttgtcccgttttgcgtgtagtttcggagtccgaagacccgcagtgcgaggatttcgaggatcaagctccagatctcgagcaaggcaagccacctttgaacatcttgagcctatatttgaaatctaattatattgcttgcaaaatattatgcattgataggattgcacttaatctgttgttccgtctgcaaggcagattggcagacctacctaacttgttgcatttgatccttccattgttaattgctataccatgtccccttgtaaccatccagttgcgcctcgatattcgtgcaccctgtgctagtatcgacggtcgccttcaaacttaaaatctgagtaacaacttgggtaaaactggagttttacaaaagacttggaaaacccgacacctgggtcggtgcttgcgaactaaatgaatttccaaaaccgcggaccgggaaacgtaccgggtgtacggtttcccgctctcgcacttaaagaccgattccttggaatttcatccaaacataagtcaagtacgaccacatgggtggaatgggacacccctggctgagtaactagcttatcaggggagccttgatgccgagagacatgtggattcgccggggtggtgtcggggaggacccctgggcttcctggcacagtatggtctgggacctaacctgttgttggtctgggacccctctcgtcggcatatggtaaacctgtgtcggctttggaaatgccttgtcatgaaagcttggaggtctcccgacgtggctgatccccacgggctgggtgatccgggttagtaatgtcatgtgggtaaagtgtaccccctctgcagaggttaacaaactgttcgaacagccgtgcccacggtcatgggcggatgtgaggtgattcctagcgtagtttagtttgactactgcttgtgaaattgctgtgtgaaaagggggttcggtgtttgaaaaatctgcagctgatgggatcagctaggcccggatggccgtttgaaaagttgttggcccgggtggccgtttgaaaagttgttggcccgggtggccgttgaaaaagctgttggccgggtgccaaccttgtttaaattctaaagactgatacattgcacatactccgaccagacgagacgcactgtctcatccgtgtcgtttgagaagcactcacttagttgtttcagaaaagagttcaaataaaattaattgcaaaaacaccagcctttccttgaagcctgcattaaacacttacttcccatggcttgctgagtactcccgtactcacccttgctctatataaataatcccccccagttgctgaagaagatgaagcgaatcctggtgatgaggagttcttccaagagcaagccggctacgatgagttttagggtttcggcctagttcccaagtcgcgcctgtgttgattggtccaagtcctggcttccgctttccttttgtaatgcagttgtgagctcgggatctgtccgcagcccaacatgactgtacatctactctataataaagagacctctgttgctgtgatattctatctccctgtgataccagcactgtttcctgggactggtatcgattaacaggttaatttggagcgtcacgggctagttccggtcgggactagtttggggcgtgacatggcgtggggcgcaaggcgacgtgacgggcgagcggcgacggcgcggcagcggggcagggttaggctaggggacctcgtcgaacacctggcggccgatgaatagtgccgttttccatttacccgatttaagcctatttatttatttaaaattgattctataaaccttaatttttgtaccaatgaagttcactcaatatttgtgttattccaaccaatgggtccacccttgattaattttacccatattttatttttatataatttccttgaatttaattagagttaattcttattccgacacttttcaatttaattgatacaaatatagtcgtaataatattttactcatttctatactcactaaatattattttaaattgtactttaattatttacttagtcaatttactttttagggtttattcctaactaattatccattattcgcgatttataaactctgaaatcaaaattcaataaaataatcgaacaaaattggcatgatgcaactttatttaaaaagtttttgaagatccgtatttttagagtttagattttgtcgtcgaatttttagggtgttacacgataccagcaaatgtcgatagggttttgagcaatcagctatatgtccaatgtagattctgacacttgagtaaataataatataaagataatcatgacacttgagtaaataatgatataaagataatcagctgatgataatgtaatagaacaataatataatccaatagaaaccaatcagtcaataatgatatgatagaataattgcttgatacgaaggttaaattcacaagattaaataatcaatgaaacctttgttgtaatcggctaaaaccaacttgtatgtaatccttgtaagccgatgcaacgtctaaataacttatcggctaaaaccccgatgaaacccttaatggcaatcaaaggcaggttagttttatgattataagcacagcttagtaggtcaaacccattgatgcaacactaaatatgaaaagaagcataaagtctaaacaatcaagcctttgtctgattttcagggtggtagataccttagctaatctagatcgatgaagcaatttaactgataccaacaaaaccctagaaatggtatggcctagacaacgactttgattaactgagatatatgataaatatgtattacaacgacaagattagagtgtcgagaccctagcctcgccgatacaaatagccataacaagccttacccctcatcggtgatcgaagctgaagcagcccaactcgaaacaagagctcgtcgagaaagatgaaaaataaaaagggtggcgatgcgccgaagttgtattgatcgagagataatttatagggaccttgggtgtacatatttatacctataggctgttaacagtcctgatcgaacactaaacacactttcctaaaaataaaaggaaaatgacaagtcctgatcaaacactaaacacactttcctaaagataaaagggaagttattaaatcttgcctaattaatagatagaattaaactgtcatgccatggtcttcactattcctccttgaacttggtttcttttgcataggttcccatcagctgatcgacttctttccttaactgaatccactaaagaatcttactaaattttggcgttaacaaatggccgcttcgtcctctcgccagccaatctacttgtagaagcagtatcaccgttggatctacttgggtggcggaattggcggctgatctgctggcggcccgacggccttcagcgacagcgaccccggcggccctcggcgatgaagaccacaacgacaacccgacggccctcagcgacgatgatcacgacgcgcagcgccgccgcttccccttcttccctccacatagctctgtgggccatgcggcagatgcttgcaggcaaggctctcgtagcaaaagtaagacatgagaagcaaactaaaactatgggccccacctactttttcttccacgacagctagtgttctacatggctagatgagtccacactccatgcaggagcactgtgaatggcctaacttgggtcatgcggactttagttttgtgggcccacccaaaaacgtggcaccaaatcgaatctctcctactcgtatacatggagggcgcgggccaaataacagcacaccgcgctgtgaattagagcaagtttaatagtatcgtccgttgatgggttgcaaatttgtatacgtcagtgatagatggtaccaacagatgttacatacctatgatttgtatgacgtggatgcttgtattgccagcttataggcctctattatacctgctcaagagtcaatagtgttggcccaaacactcacttgcacacacacctctctctttctcacttgatgaaagacacacacaaagaagatgcactgaagagacactagaaaatttttgtcactgcacaccagcgaaccaccacacatgcacttatatttcacccttggcaccccaatcaaatgctgatcacattggttaaatctatactaatataaaaaggagaagttagcagggtaccgagctcgaattcgcc

SEQ ID NO: 28689 - DNA, 682 bp, Oryza sativa
agctcggtaccctgttgcatctgatccttcctttgttaattgttataccatgttcccttgtaaccatctagttgcgcctcgatattcgtgcactctgtgcgagtaccgacggtcgccttcaaacttaaaatctgagtaacttcttgggtaaaacttgggttttacaaaagacttggaaaacccgacacctgggtcggtgcttgcgaactaaatgaatttccaaaaccgcggaccggggaatgtactgggtgtacggtttcccgctcttgtacctaaggaccgtttccttggaatttcatccgaacataagacaagtacgaccacatgggtggaatgggacacccctggctgagtaactagcttatcaggggagccttgatgccgagagacatgtggattcgtcggggtggtgtcggggaggacccctgggcttcctggcacagtatggtctgggacctaacctgttgtcggtctgggacccctctcgtcggcatatggtaaacctgtgtcggctttggaaatgccttgtcatgaaagcttggaggtctcccgacgtggctgatccccacgggctgggtgatccgggttagtaatgtcgtgtgggtaaagtgtaccccctctgtagaggttaacaaactgttcgaacagccgtgcccacggtcatgggcggatgtgaggtgat

SEQ ID NO: 28690 - DNA, 5177 bp, Oryza sativa
ttatcaggggagccttgatgccgagagacatgtggattccccggggtggtgtaggggaggacccctgggcttcctggcacagtatggtctgggacctaacctgttgttggtctgggacccctctagtcggcatatggtaaacctgtgtcggctttggaaatgccttgtcatgaaagcttggaggtctcccgacgtggctgatccccacgggctgggtgatccgggttagtaatgtcgtgtgggtaaagtgtaccccctctgtagaggttaacaaactgttcgaacagccgtgcccacggtcatgggcggatgtgaggtgattcctagcgtagttttgtttgactactgcttgtgaaattgctgttgtggaaaggggttcgatgtttgaaaaatctgcagctgatgggatcagcaggcccgggtggccgtttgaaagttgttggcccgggtggccgtttgaaagctattggccgggtgccaaccttgaatcaattcaaaaagactgatacattgcacatactccgaccggacgagacgcactgtctcatccgtgtcgtttgagaagcactcacttaattgtttacagaaaagagttcaaataaaatcacttgcaaaaaaaaacaacagcccttttctttgaagcctgcgttaaacacttatttcccatggcttgctgagtacttccgtactcacccttgctctatataaataatctccccagttgctgaagaagatgaagcggatcctgctgatgaggagttcttccaggagcaagccggctacgatgagttttagggtttcggcctagttcccaagtcgcgcctgtgttgtttggtccaagtcctggcttccgcttcccttttgtaatgcagttgtgagctcgggatctgtccgcagcccaacatggctgtacctctactctataataaagagacctctgttgctgtgataatctgtcttcctgtgataccagcactgtttcctgggactggtatcgattaacaggttaatttggagcgtcacgggctagttccgatcggtactagttcggggcgtgacacacgtgtacttcaaaattcaaagcgcgtgtttcttcgaaaaaaagaaaacttcaaagagtgtgtgtctcagggtttacgattccgacaggcccttccgtttcgggtactggcggaatttggaatttcgcgaaatccggtggaaaaccagtaaattccgaacaaatttcataaaccaaaatttgaatacaaaatccctaagttgccaacaagttctcgaaaaccggtcggttttagcgaaattccgatcgaaatcatcgaaattttgatcagtaatttgtaatagaggtaatttgctgaaattcttttttttcatgatgtaagttttagtagatacacacaatacatcatttttttgaaaatttatatcctaataagttctatggatatcataatatttgtaagattttattttattttttctttttttatcaatttaaatttaaatctgaataaaatttctcaaaatttactttcgagtctgatcggaacgtcgaaattttacgaaatccgaccggaatcatgagccctggtgtctctctcagcttgtccagatacttccccgcttgtccagtggaggatggagggtagctgtgcctgtgacaactgacaactgacaaccaacaaccacaggccccagtgccccactgctccttgtactcggccccagttgacagtgccgcagtgacaagccaaacagcgacgaaaaaacaactccccgagccgcttgaccgacgcttcgcctttatttgctgctccatctcgaattctggactggagcagagagaaagaatggcttcctctacctccgggagaagaagagagctgcggcggtggtgctggcggccgtggctgtgctgctctccgcgtcacaggcactggcggggccgtgctatccgcgcgtgttcagcttcggggactcgcttacagacaccggcaacatcgctttcctctacggcaacgactcccgcggcccacgctgtggccaccctacggcgagaccttcttccaccgcgccaccggccgcgcctccaacggccgcctcatcatcgacttcattggtacgctactcgcaaccaatccagcccctcctccctgtatttgcttgatccaacacaggagtactactaattacttgagatttggaaatcgcgcgcgttgcgctggccgcagctgacgcgctggggctgccattcgtgcggccgtactggagcgggcggaccgcgggggacttcgcccacggggccaacttcgcggtgggcggcgccacggcgctcagcccggatttctaccgggagagaggcgtgcacgtgcgcgacaccgtgcacctcgacatggagatgaactggttccgcgatctgctcggcctgctctgcccagacgatcttgccggtatatatgttcgtctattgaactctttctccttccacgcaccttgccacctctgacgatgacgctccaaagtaacagtttggtaggaggtgagggtagctagcagtcgcggtctcccgtatccaaatcttctgttgtactatagtggcatcgattctatacacggtagtaattccagtgaggctgtgagggtaaacggtgaccttacttactgtagcagctgttactgcagaagaagatcgcgatgttttgctttcgatccaacggttaatggaatgatggatgcctctaatgcaaacacactacactttgtaggttatccgcattttatcctccactgccgatgatccgtttccagcagccgccagtaggtgaggctttaatgccatgaaggtggtgggagagaccagagactatattttggacttttttttttgtttaggccttgtttagttcctaaattttttttctcaaaaacatcacatcaaatatttgtacacatacatggtgtattaaatatagataaaaataaaaaactaattgcacagtttgcatggaaatcacgagatgaatcttttaagactaattagtccatgattagccataagtgctatagtacccacatgtgctaatgacggattaattgggcttaataaatttgtctcgcggtttccaggcgagttatgaaattagttttttcatttgtgtccgaaaaccccttccgatatccgttcaaacgtccgatgtgacacccaaaaattttcttttcgcgaactaaagcaggtgttaggggttggatggtggtgatattgggcacacttccaagcttaagatttcgctcagaggtaagtttgagctaactactgctataagcccatataaaaataatgttgaagtaaatatatttgcagatattagttataaggttgtctatacttctcttcttctctctatctatccattgctaatgctgggtggatcttgctctatttatgcccatcgccaccggatcctgctgcacgtcactaattctatgcacctattactgactagatcccaccgtccatcaccaacactatggcaacacactctagctaggaagcagatagcggccagaggggtgtgcattctgatggtacgccgcctattgtccgctctagcccagtcgtgtggttgctggttgtgcgcctctcccatcacacctccatccgggaagcatagtaaaaaaaaaacccagaccggtgatcaacccagtgacctcgtcggttcactggttcaccggtcggaccgccgggtcagccggttcaggtgctgaaccggatgtatatagttactatatctttttattagacaagatgagctagctagtaaaatggtaaggctgacaagttctcaacccacatgtcatgggttcaagtcacttcccagtttcccacatatgttttattttgcataaaatgtaaatgggccatagagtaagatgatgggccttacaaggccagctgaactgacaatgaaccactagttcttactagcccggttcaccggttttcaccaaaacctgcccggttcacagggttcttaccggtcaaatgcatgagcggtctttctactagaccaaaccggtgagaggcatggttccggttttttatactaagccgagaagtgaatgccactatactggattggttattctattcgtaaaaataggaaagagataggttggcgaacgcatgggcaaaggaggcttgtgcaccccttacggctgcatgacacatttaaccactggctagtgcatcggtttgatagattgtgatgacttactgttaatggtacggtggtcttgggctcatgtgtgcttgagcaaacaaattcactaatccaaggcaagcgcggagcagccccatggcgtcatgtgtgtgtacgctgcggccaactagtcccaggcaagcaacacggcaaaaagcatataacattaaagataaagttgcatcaaaatatttttcatgataatatattgatacagtccctacatttctttacttgttagggtatttacattgtatcagcatgttgtatcactatctcttatcatacgaaacattaaatatatatatagttgcatcaaaatattttccatgaaaatataataatgtcattttaacatatcaaatcttaatatgtttatatatattagtgacttaagatttgatggtttgtactgcactcattctaggacataatctatttgagaatgaagagaatttcataaatcctaatagaacaattcatggcactagatcatccagtgagagttgtggttaaaccatcatctactattagttcaaaagttcggcatcagtgccgtggatggtagaaacattgtacctcactttttttagtttaccttccttaactttccatgttcattttctgtttaagaagtgggaatattggattgtctggaataaagtcggaaagataaactcttatgtgttgtggttacttagtcaaatgtggttacttagtttatggcacaacaataaattgtgcttccaaagaggagaactgcaccaacaaaaatatggaaagcaattcatcattaccaagaaatagtggaatttatttatggattgaagattggtggcttctggttgtactaaggaatactgtccattccaacatccggggggatattcgatgagaacccgtgagaaaactggatgt

SEQ ID NO: 28691 - DNA, 1692 bp, Oryza sativa
gaacgtttaactaccatataaagcatcaattttgatacttaaaggcccttttcaacaatactacatatttacatgctaattctaaccatgtttatatcacagattgcaacgacatgatgaatcaatctctgttcttagtcggagaaattggtggcaacgattacaaccatcctcttatctgtggggtatccattagaaagattcgcagcttcactccgagtgtcattgccgaaatttcttccacaatcactgtaagtaatatgcctatggacatacatacatacatatatataaggtgcctgggcctcaaggtttgaaatacactaattggctcaattttgttgaatgttttcaacttatggtttttatatacctagatgcaagaatttgattcatacccattactagcaataacacaactcaattcaaggatgggagacaacctttttttttacatgggaaaaaaacatcttgttatttatactttattgatgtcttattctatattttatggaattcctcttttgtagctgtgacacaacttcttatttactccctccatcccaaaaaaagccaacctaggaggggttgtgacccctcgtagtacaaggagtctagacaaccctctgttcagattctttgtactaggaggggttggttttttccgggacggagggagtatgtgtgagaactataaatgtcttgatcatatttgttgtaatatttgtaaatggatcagaatggtccaaagataagactttttggattgttagagatggactcacttcactcgtttgtataactagtcctttttcaccataacaagctaatgtatcacaacacggaacaagtgtatatggctataatgcaatagagttgagtttgtaggaattgatcaggcttggagccaagacgttagttgttcctggtaatctcccaattggatgaattccatactatctcatgatattcaagagtggtaagaaggaagattatgagccagagacaggttgcctcaggtggatgaacgggttctcgcaataccacaacaaactatccccggatgaactggaaaatttacggaagcttcatcctgatgtggccatcatctatgccgattactatggagctgctatgggaatcttcttttcccctgaacaatttggtgagttctgttaattcattactgtatctacactggtggagaagtgctttttggtcccggtttataacccccctttagtcccggttgtccaaccgggactacgaatccgggactaaagatcactatctttagtcccgggtgaaataaccgggactaaagatcgatccttagtctcggttggtaacaccaaccgggactaaagagggaataacagcagtacaggtggtcctctttccttttttttttcttttttattttctctcaaatcaagtgggatgcatatccccaaatcccaaatcaaagtaacatcccaaatctacatcacaaatctttaagttacttatacacataaatcaaatacatcgcaaatcctaaaaaaaattacacaaatcaaattacatcacaagttctacaaaattcatcgcaaatacatcacaagttcacatcgcacataaatcaaatacatcacagaatcatgcaataaatcacaaattctaaaaaaaaaagggtaccgagctcgaattcgc

SEQ ID NO: 28692 - DNA, 867 bp, Oryza sativa
cttcagagttaagcgtgcttggcctggagcaatttgggatgggtgaccgaccgggaagaattcccgggtgcacacgagtgaggacaaagtgtgcagaaataacatgtgttggtctgtgagggcagtctatgacctatgaaagctgccagatgtaagtgggcccggcctgggggaggcgggacgttacaccatcgctgccgccctgtcaccacccgtcccgtcgcgcgcgcgtcccatcgcccgccgctgcgccgcgcaccgtcgccgtcgcgccgcgcgcgtcccgtcgccacgcgcgtcttatcgccgcctcgcgccccgcgctgccgcgccgccgtcgcctcaccccccttcaccggcccctctctctcctctctcacaccctataaaacccccagcccttctcttctcccccacacccattcccctccatcacctccctttttaccccgccgtagtgccgccgcaccgccgccttcgtgctgccgcgccgccattcccgtgccgccgcgccgccgttcccgtgcccccgcaccgccgttctcgtgcgccgtgccgccactcccgcgccgccgtgcgccaccatcgctgccgccgtcgtcgccgctgccgccgccggtgagccgccctccgttcccctcgcgtccaccgccgccaccgctcgggtgggagagagagccgagagagagagggagaggaaaagagaggccggcagagagagagaaaaagaaagagaggaaaataaaaagaaaaaaaaagaaaagaaaaagaaagggagaaaaagaaaaaggaaataaataggaaattagagggagattagggaagtttagaaaatttaaaataattggaattttataggttaattat

SEQ ID NO: 28693 - DNA, 5290 bp, Oryza sativa
gcacatctgtggctctcgccatcattgtgaactgaggtaagttgcgttaaaccctaaccctagcaatgtcacctcaccctctctgcggagatagtagcccatggccaagtcctttcgtacatgaagccactaaggagctgcatcattggcactcttgtcggcgaagtccgcagtcacacggagagcacgagaggaggataggaaggggatgagtctcgggaggagggatggaggcgaggaatcgcggagagatgggggtgacgagtcgtgggatagaggcgagaaaatcctaagcaaagggtaggactgccatttcactccacctgcagtattgggctacgaggccacgacgtgggctgagtagcatccatgtggttctccagattttatggatccagtttgaggccacattgcactgtggatcatgtgtcctttgaagttcctcagcctatttggtagccctagaaatagcaaattcaaggatgtattgctaatccctaaaacctctcctttcacgcaccttgccacctttgatcatgacgctatgaagtaacagtttgtaggaggtgagggtagctagcagtcgcagtctcccggatccaaatttctgttgtacagcggcatcgattctacacggtagtaattccagtgagagcaagtttaatagtaggctatgaaccaactataaacttacttggatgagagagaattttaaaaatgaagaggtttgactcacatgaaagagctagctattcacatacttcacaattgatacattaaatgcacaggtgagagccaaagaataaaaccaaatagagataaccttatagctcatctgctatacatgttaactctaatatgagctataagcttatagttggctctactattaaacttgcactgaggctgtgagagtaaacagtgaccttactgtagcggttgttactgcataagacgatcccagggttttgattttgattcaacagttaatgcaaacacactacacactgtagcttatctgcattctgtcctcgagagtggattttaaactctcgaggggacatcccctcgttgtttgtatgtcacttatatagtcatgaaaaaaattgagaagatgtattaacatgtgatatatcactccacaaacatacaagttaaaattcaacttctacatatcacaacaaaaatacaaatttgactatgaatatacgttagctagctgtagtttatttttttggttgcgagatgtagaagttgattgaacttgtatgtttgtggagtgatatatcacatattaatacatctttttaatgtttttcataaccatttaagtgacatacaaataacgaggggacatcccctcgggagtttagaatagtttcccttttatcctccactgccgacgatccgtttccagcagccgccaataggtgaggttttaatgccatgaaggtgggagagaccacagactattttggccttttgtttggtttaggggttggatggtgatgatattgggcacacttccaaatttaagatttcgctcagaggagtttgagctaactactactagctataaacccatataataataatgttgaagttaacatgtttacatagattagttataaggttgtctccacttctcttctctctctctctccctctttctctcatttatatatttaatgcatttatgcgtgttttgtttgagttggttttcggatctagtttagagaagaggacttacctaagcacctacccgagggtagtttagactggagcgagattgtccaggccataaagtagagataaaaggattaccataggctcattcatcgaaaattatatatacaggaaaacaaaaacgaatttctacttgaagcatgtgtaaagctatttcttgcattagagctaatccttattatttttctttgtctctttcctctatatatatgcttatagctgactatagtctcctattaaatttgctcttagtaactttcttcatcagtatattatcttaaaatgctttttctaaacgtttttttaactttgtaaacatttaactcatttgtatgtgtccttgaataatggtgataaattttaaataaatgtcataaacactaaattgtccatcaaatttataacatttaacttcatatgggcaattgagcacttattcaattctatctatccatggcccatgctgggtggatcttgctttcagcatcagtacgcacgtctttagcatggagcccatgctggcctgtggtaagtacgattatatcttccagggattcccgagaaccggtccttaattgtcatgggcacgacttccaaaatcatgcatgtatccacaacccaccattaaagcatattttagtttaattaaaccataaccatggtggtacatcataatataattaaggactaaattataatgaatcccattgtgagctaattgatctaagcatggctaagcatccctaaaccaatcatccagtcaattataacccaagttatcaatggcataaggtattcaacaggctgagcatgataggcatccatcccacatgacattctaaaacaatgcaatttaatggaaagcaggggattttataaaacaagttcaacatgattaatgttgtatgtatgacttgccttgctcttgagctgacggaacctcgcaaccactacgaaataaactggatcaccagaactgatggaatctaaatgacaaacaaagcacacaagaaatacaagcactaaggctactgaaacagcaaaagaaaccaattttagtggattctatacattttaacaaattcactgcaacttgaataggttaaaacggagctcggattatttagttatgaattttacaatatgagctacgttattactaataaccgaaaaaacttaatcatttgttacatattattgcccgtatataaaatagatcaatggaaatatatctccggtaagcaagcctcacgaattaacaactgaacgagccaatacttcgtgacacgggaccatccaaacggtcaaccgatccggcgaacggaaccggcggcaagtggctgcggctcgcggcagcagcgcagcagcggcggcagtagccggcaagcggtagcggcggggacggctagggcggcggcgctggtggcggctagggcttaggaaaataaaattgaataggagaataggggggtgttacaacttatataggggagtgaaaatagagagaggtggggccggctaggaggcggcaacagggggagaggggggaaaccgactcgggcaaggggaggggcgcgcgtggccgagagggagaggaggggcacggccgagagggagagggggaggaaaaataggaatatgattaggacaatgactttcccaaataggaaaagaaatccggtgccgttttaggaaaagaacggaaacagaaccgcgaacggattcggactcggctcgttatgcaaaactaaaccgtggacgaagaggggagtgaatcaggcacaattcatgaccaaatgcgggagagaaaatttattattaattcaaatcctgtcaattgaaattaacaacattaattccagtgctctgaatattccgctttaaatcctgttaatgattttagagcaaagagaattcgaaaaaaattctgcctgacattttcgattattgaatacattgttaattaagattttctcctggttagccaaagtaatttctatagacaatttattggtgaattagaaactacggaaaagggaaaacgctaggtgtgacatctaggcacctatcattgactagatcccactgcccgtcaccaacactgtggaagaacactctagctaggaagcagatgttagctttggcccaagaaaatcacaaactcacgtaagcaacaaactcacgggagaacacacacgagcagcaaattgggtggacacacacacaacagattccgtcggcgacacacgcctttgctgacttctctgatattgctgatctactaaaactaactgatgattacacggcttatataacctcccgtacatgcacatagctaacagcccggccgggtcgcacgcacgactacaagccactcactcatacaacgatctgcgcatcttacgccaagattcgctcctccgagctgaccgcgagccacgccacaacgtgctccactaatcctgcatgctcctaactaacttgccgctaatcttgttattcacctaacctgtttagttgctagttgtgctgcaacacacgcagctgccactcactagcactgactgattctacatgcaaatatggactaaccactacctacgtgatgcacacatacacatcacttacaagatacatgaacatatcacgttcctctctacatgcaactaatgcaaaacccaaagacatatgcaagtcatgattagttccaacagcagatagcagccagaggggtgcgcattctggctgcataccacccattgttctagatccgtcgtgtggttgccggctgtgcgcggtacgcctctcccatcacaactccatctgggaaatgaatgccagatgggagaggctggcgaacggaataggggcagaggaggcttgtgcagcccctacggctgcatgacacatttaacccttggctagcgcaacggtgcatcgctcgatagattgtgatgcgtcatgggtgtgtacgttgtggccacctagtccaaggcaagcaacgcgacagaaagcatacaaaacattaaataaatagtcgcatcaaaatattttccatgataatatattgatatactccatccatttctttacttgttagggtattgacatggtatcagcatgttgtatcactatctctgatcatatgaaacattaaatatatagttgcatcaaaatattttccatgacaatataataatgtcattttcacatatcaaattttaatatgtttatatatattaatgagctaagatttgtaggtttgactacacgcattctatcctaatagaacaattcatggcactaggtcattcagtgagggttgtgtggatatggatagtagcaacattctatctcacttttttagtttaccttccttaactttccatgttcattgtctgtttgagaaatgggaatattggattgtctagaataaagtcggagatctaaactcttatgaattgtggttacttagtttatggcacaacaataaattgtgcttccaaagaggagaactgcaccaacaaaaatatggaaagcaatt

SEQ ID NO: 28694 - DNA, 3056 bp, Oryza sativa
actatagggcgaattcgagctcggtacccttatgaattgtggttacttagtttatggcacaacaataaattgtgcttccaaagaggagaactgcaccaacaaaaatatggaaagcaatttatcattaccaagaaatagtggaatttatttatgaattgatgattggtggcttctgattgcactaaggaagactgtccatttcaacatccagggggaatattcgaagataacccgtgaaaactggacataagcattttttaatagagataagtataagcatgaaatacattcccaccaaatctactgtttaatgtaaaatttgtcttttggttcccccacatgaagttgagtttggacatgaatatatttcatgtttatacatatctctagtatttttttcattaatttagaaaacttataggttcggttttcacgggttttcatttatttgatggttttcattggatatcccccccccccccaaaatcccccacacccaaacatccataccatgatatatcaattaatcatcatgatacacgataactgatagtgtattttgttaaaattaaattcaataaagaaacattttcagacattttgcttatctcttcattttgcactacaaatccgaatgcattagtttataaatagacatactcatgggatgaaatcagaaattattaaaattatttgataagcacacatcatgccactgctaaatatttggtcagcatgatgtgattgtcatgcgagaaatggttacactcctcgaaggcctacaaaaaaaatctgaaaacaattaatatgcgagtggaaagattatgttgctacaaatctggtttgtaatatgcttaaaaaatgaatatgcagatattgatgaatgtttaactaccatataaagcatcaattttgatacttaaaggcccttttcaacaatactacatatttacatgctaattctaaccatgtttatttcacagattgcaacgacatgatgaatcaatctctcttcttagtcggagaaattggtggcaatgattacaaccatcctcttatgggcggggtatccattagaaagattcgcagcttcactccgagtatcattgccaaaatttcttccacaatcactgtgagtaatatgcctatggacatacatacatatatataaggtgtctgggcttcaaggtttgaaatacacgaattggctccaatttttgaaaattttcaacttcttgtttttatatacctagatgcaagaatttgattcaacccataattagcagtaaaacaactcaaattcatggatgggagagaacctttttaattttgacatggggaaaacatcttgttagtctataatttattgatgtcttattctatattttatggaattcgttctttgtagctgtgacacatcttcttatttatgtgagagctataaatgtcttgatcatatttgctgtaatatttgtaaatggctcagaatggtctaaagataagaatttttggattgttagagatggactcacttcactcgtttgtataactagtcctttttcaccatcacaagctcatgtatcacaacatggaacaagtgtatatggctagtaatccaatagagttgagtttgtaggaattgatcgggctcggagccaagacgttagttgttcctggtaatctcccaattggatgtattccacattatctcatgatattcaagagtggtaagaaggaagattatgagccagagacaggttgcctcaggtggatgaactagttctcgcaataccacaacagacttcttatggatgaactagaaaatttacggaagcttcatcctgatgtggccatcatctatgccgattactatgaagctgctatggaaatcttcctttcccctgaacaatttggtgattttcgttaattcattactgtatctactctgatttcttttgtaaagcttaacatattaattttagtttttagtttacaagaaaaatactctatatgtgtgttctcttaaatttgatttccttatgttgacaatgaatcgcttgatgacaaacactctatatttgttcttgcttcaactatttgtagtagacaacaaagtatctagaggagaggagctgaaaagcaatatataggcatctaaatttgatttccttagcacttctcaaaccaaagcaaatctttatctatatatgcctgtatcttagtcacagcagctaaataggatttctgctccacaaatttattaccaagttggctagtttatttttcagcacctcatggcatgcgctcctatgctaatttttgcattgacaaatcacagttttttattctcgttgatagcttgaataaaaattctctgattgtgtttcagaaattgagaatcctttggtagcttcctgtggtggaggaggaccttatggtgtatctgaaactgcaagatgtggaaatggtgaatacaaggtgtgcgatgacccacaactgtatgggtcatgggatggctttcatccatcagaagcagtctataaggccattgcaactggcctgatatggggttcatacacacaacctccaatcgctaccaccaccatttcgtgcttgcaaattacagagctcagttcttctgttgaatacaaggtcctctatgatttgtaattgtgtgactatattttgttattttcatagaatgtatgtgcggataaaaggttcatgtggaatcgtcgaaataagctggtattgtgctgaaatcgagttaaacttatgccatcgggtcttctaacggattagttctatgacttccatctcaagtgtgccacctcccacctccatgaatcaaagcacttaattttttttctattttccttcataagttgtgttttgtttagttaaattttttccatgtactgttcatcttgtctttagttcttgatggcttagtcaaagactaatcatttatatatctcagtagttcatttgtttgattatctaggttgatataatctaaatatattcgaccatgtatccattatgtatttaacaat

SEQ ID NO: 28695 - DNA, 605 bp, Oryza sativa
ttattaaatggtaggagacgtacccgtcgacagcgatgcacctatggtgacttcgtcaatcttcaggatagattgccggcccagtcttcaaagatgcttataggggtagggtttacgtgcgtactttcataggggtgagtgtgcgtgcattgtgagtatctgtgttgtaccgtgtaattctcaaaaaaaatattaaatggtgaaacaaaatatagttaagactctctgttgatacttagtaattcataatttctaaattaaattaataaaaaaaactccaaaaagtactataataaggctttggcgtgaattagaattagaataaaagaaaaacataatacttgtaaaattagtaacaatagcccatgcaacgcatgggttgttggctagtatttgttaatttcgaatagagattttataacagacttgaataaacgtgttttctccttaagcgtggggtggctataattagtaatgtcgctatccgctccatcgcatcccccacccttgaccgcctcactccaccacgtgcaccttcactccctcctccagtcctccgctctctcctccctcccctccccttccctcccattccatccccaccc

SEQ ID NO: 28696 - DNA, 610 bp, Oryza sativa
tgtgtttagtgtttgatcaggacttgtcattttccttttatttttaggaaagtgtgtttagtgttcgatcaggactgttaacagcctataggtataaatatgtacacccaaggtccctataaattatctctcgatcaatacaacttcggcgcatcgccaccctttttatttttcatctttctcgacgagctcttgtttcgagttgggctgcttcagcttcgatcaccgatgaggggtaaggcttgttatggctatttgtatcggcgaggctagggtctcgacactctaatcttgtcgttgtaatacatatttatcatatatctcagttaatcaaagtcgttgtctaggccataccatttctagggttttgttggtatcagttaaattgcttcatcgatctagattagctaaggtatctaccaccctgaaaatcacacaaaggcttgatttgttagactttatgcttcttttcatatttagtgttgcatcaatgggtttgacctactaagctgtgcttataatcataaactaacctgcctttgattgccattaaggtttcatcggggttttagccgataaggttatttagacgttgcatcggcttacaagg

SEQ ID NO: 28697 - DNA, 1019 bp, Oryza sativa
cttgatttaaccattagtatatcaacgaaaaagccaatatttattgtcttatcttctgaagcaaacgttgtcaatttttgtccaagttataccttagtatatttaagtatctaaagtagagtatagtagatcgatagttacgcttgaaggataggagttgtttcatttgaagtgaaggaaagaaaaggatgtataccagatagcttatgctatggatcagggtattgcttatttgcttatacttcactgaaataacatagtacacgtgcaaatgttgtagaatcgctgtgcttgttatttatatgccctgctgttgcacatagttgtatggtaaatgttggtgcaacataaaactaatgaaaagcaataaaactgatttaagaagcaacacttgatataatctttcctgtttccctattatccattgtagagaaccaacgtaaggactccttttttcaccaatcggccatcatgtatctctgttccaccttactgcactaatgaagcatcatgatggtttcaagtgggagattattccgttatgattctcccaaagcttaatccacataaagacaatcatcgcacaacactagtgcattgcaagggaaggaagcttggattactgggtctatgatattaatgattactagatgttaaatagcattgtctgtgcatggaaaggaattttgatcgatcaaactaacatatttgtatcaggtcttgaatgagatcaaacggctccaggatatgtacgagcatgaggagactagcatcaccataacaggccacagccttggggctgcacttgccaccatcaatgccactgacattgtctccaatggttacaacaagagctggccagtgtctgccttcgtcttcggtagcccaagagtgggcaaccctgattttcagaaagcgttcgacagtgctccaaatttgagattgctccgcattccaaactttcctgagggggttcaaactggccaaaactaggatacagcgatgctggcacagagctg

SEQ ID NO: 28698 - DNA, 3894 bp, Oryza sativa
tcttggtgggtggtgcagaacaaaggtatggtgaaaggcacggatggtcggtggcatttggccgaccatgaggatgatgactgatgcacccaggcatctcctcttgatgcctgattcaaccgacagctcaaaactaagactctgaaaacaggggatactttcatgtgttcgttattgctcgacaatgaagtaatgcatatgtttggaatcattttgtttttaacatttttcagttcattgtgttttacttaatgttatctgtaataagttatcaaaattgcccgctgaaaaatgaattatcagaattgttaagttgtgacgtttctgacaagcaaagcaagtgaaggcagtcttggtatatcattgtgaagatgtagttggaaaatagcacctgaggttggatagaatcagatgcactgagtaatttgctttaaaatgtgttgactccataattgtgcttgatgatcttctcgaacatttcagggggaaggaaccagatttgagttattcgtctacgagtactttatgttcaaatcattgtagaagcacatctctcctgcagttcttaaatctaacgaatcttaagaggctactaaatacactttccatatgcaacttatatttaaatggttctttttcatattagcgcagaaaagggcacatccatctcttaaaatagatgaaaagcatgccaaaaaattaatcgcaaattatgagccaccaaacccactgactcaatgacccaataaagtgcccggtccagttggcaccgtcccaatcactccctttctccatatctgagatctcattctcatcctggcagtcgggaactcgggatcgatggtcaatggatcaccggcgatctacacctctcctcgccagcggctgccgccggttcgttcactttgacgggccaccaccaagtcgcctcctcagattgtaggcggcgccaaggaaggttccaaatcaaaggtgataacctttttcttgtttcttcctgtgttgggtaattcggtttaggtacaataatctgccatttttttatttgttatttacaagactagtatgcttcatctgcatgatatatccaaaaccagtgcttttaatcatatttatttgtaaattaaaaaaggcaaggaaaatgaatcgcatgaaacaaaagaataattgccataggtaacctaccagaaataatatcatccccctctgaaaaatgtaagcattatcttgcataatgctcctagttttagccttatctgaagaataatggaccatgaatacatgttaaatcgattccagctgccagcataatcacatttatattctgccaacttttttcaggccaatatacgcataagcctaaaaaaacagttgtacacaaacattttttctctaggtcccacgaaaaatttcatagatgtttcagagcaactgatacaaatatctagcatcttggggaactacctccattccaaaatataatcatttctatgttttttttctaaatgtgcgtattgaaaaatgcataaaaatgattactatatttgagaatgcaccatgtcaacttaactttgtcggaacaaaattctaacagtttgacaggatagcaccaagagcagagctctcagatcgatcagaaaggtaccctggcgacgatgttctcctgcgacatggcgagccggtggagggagctgcacggcagcggccactgggacggcctgctcgacccgctggacgtcgacctccgccgctgcctcatcacctacggcgagatgatcatggccacgtacgaggcgttcatcggcgagcaccgttccccgaacgccggcatgtgcaggtaccgccacgccgacctgttccggcgcgtcgacgtgtcccatccgggctggtacgcggccacccggtacatctacgccacagccaacgccgacgtgcacggcaaggtgctgctccgtccgctgtgccgggagggacgcgccacggagtgcaactggatggggtacgtcgccgtggccacggacgagggcgccgccgcgctcgggcggcgcgacatcgtggtggcgtggcgcggcacgcagcgcgcgctggagtgggtggccgacctcaagctcgcgcccgcatcggcggccgggatcctcggcccggagggcgccgacgggaccgacccgtcggtgcaccgcggctacctgtcgctgtacacctcgaaggaccaatgctcggagctgaacaagcagagcgccaggatgcaggtgtgcgcgccccgccctgctccctccttgacactcttgtggttgtacggtaccagtactacttcctccgtttcacgatgtaagtcattttatcattttgcatattcataataatgttaatgattctagataaatatatatgtctcgattcattgacatcaatatgaatgtgggaaatactaaaatgacttacattgtgaaacggagggagtagtattttgcatgtagttgacttagtagaactataatcttcgacagttgacagttttccctagtaaattatgttggcatatctgattagtacacagccaccttacgtgaagacaattagtatatgctggtagaaatatcatccaaactaaattcatttagtactggttgacactcggagtgctgccatattttccacggacgtggaagggtgcagagcccatcatcactcttagatgtacttttaaggcactcacaccaaaataacgttacatgtatactccatccgttcaaaaaaaaaacctaaatttattaatgatagaatatcacctgatacaacgaatttgggttgtattagataatatctcatctaagttaggtttctttttacttaaggagtagacactaataggaaagtgagaaaagaaaacggtcctttcgctgcttttcatgttcattccatcctactccctccgtcctataatataagagattttgggtggatgtgatacatcctagtagaatctggacagaccgtgacacatccacccatcacagtttacaactttaggttacatatttaggtttctttgtttcagaaaaggttaatttgagtcaggccctcgtttgaagcaagcagagtttttttttttttttttttttttgaactccagagtccagaaggttttcattcatgtttaggtcatagagtggattgccgttaaacatcatttttcgaaattaagagaagagaaagattgcaacacatcttcataacccttgtcacaaggcaaatacagtgtcagttaaggagggcacatgtattgaaaaggagattagtgaagggacagactgaagttgaaaggtggtgctggcttgctgcaacgtggaagtggaaggccagcgacaggtgtcgagagaggctgcactgcagtcagagttgttggaagaaaagaacgttcatttacattgatggtttcttgaacagctgggcgagtttcttttgacatcacatggaccatcattttgtcattttaaacgattttttcattgctaaatccaacttagaataaaaagttgggatttgatcctatgcgacaaactttgaaaaaagtaagttaccgtgcgagtaggcacttacaaaattcgggtttgcttccccagcaggatatactctatgccaaaaaaatatatatatttttcaaggtttgaatttagcaaaatttgttcaaattcagtcaaactatattcctttttttttcctgttggccttcaaattcagtcaaattttgaaccctgcaggtattgacagagatagcgaggctgatggacaaatacaaggacgaggagaccagcatcaccgtcatcggccacagcctgggcgccaccctggccaccctgaacgccgccgacatcgccgccaactcgtacaaca

SEQ ID NO: 28699 - DNA, 2331 bp, Oryza sativa
cccccgtcaccgccgtggtgttcggcagcccgcgcacgggcgaccgcggcttccgcgacgccttccacaggctccgggacctccggatgctcagcgtccgcaaccggccggaccgcatcccgcactacccgccggtgggctacgccgacgtcggcgtggagctgctgatcgacacgcggctgtcgccgttcctcaggcgccacggcagcgagtcgcagtcgcacgacctcgagtgccacctgcacggcgtcgccgggtggcacggcgaccaccgcgggttcgagctggtggtcgaccggaacgtggcgctggtgaacaagttcgacgactgcctggcggacgagtaccccgtgcccgtgcgatggaaggtgcaccacaacaagagcatggtgaagggtcccgacgggaggtgggtgttgcaagaccacgagcctgatgacgacgacgacgacgacgacgacgattgatcgtaggtttcgatatgtaccatcgccatggggcgtgacaacttttgtcttctctatcttgatttcttctgataatagtggttttggtggtttttgttagttgtgtcatagattaaacttccataagtacaatatattagctacaaatttaatctcacgattctttgtggctccaattcataagacactaacgcatcgtactcctaggaccttacaatcttacaacgtgtttatgccatgtgctaatgtgcaatattcgcaaaggctaaagactcagagcgtgcagagtttaggctgcattcggttgcatgggttcccaacccctctccctcatttttcacgcgcacgctttttaaactgctaaacggtgtgtttttataaaaaagtttctatatgaaagttgcttaaaaaatcatgctggtccattttttttaagaaaaatagttaaaacttaattaatcatgtgttaagcgctgatttgttttgcgtgccggaacaaatacagcctagtgcaggcacaaaagcttgctatggttatcgtcgtcttgtgggtcacatttatctggggcttttaactatttgccactcttacgagtggtgcttaacgatttgccactaggcccacatgccatggacacatgagggcccacatgtcattgacagggtgtgacaaatcgttaattgtcatgtcatatgagtggcaaatagttaaatttccccatttatctctatcaacgattggaaagagaaatatatattgttccctccgttcaaaaattagttttgtattactttggacttctcaaagtcaataagacataactctgaccactttgcccataaatatttggcgttaaaaataggatttaatcaaaccttggaaactttggccatcaatttttacaagaataagtttataaaatctaagttcaggctattatgacattatttttcaaggcaaatctatacataacatttttttaagaaaaaaaagacattttagaaattatggatggtcaattttcacaaatttgaccaaataatcaaatattatcataaatgtttatgtctggacagaataattcttttgcatgaatgcgatactacgaaagtttttgttataacaaagttggccatgtcattttcatatgcctaaaacctatattccaaacgataatcatagttgaaattaaattatgttacaaattctaaaacatcacttgctgtaattggagtaagcatttaatacaataattaagcaccaaactctataaatagtgtgagctatatatatatatgaagaaaaagatccttaactcttcttctaccctaattaattgtacgttttacgcggatctagaagaagaaagaactaccaataaatcccttatattatattacatgtagccttatatgtactatcttaaatgatattagtggtggtggtgattttgccaccctcacctatctaacaagtgggggccaccacctgtaatgtgggtccatcgttgttgaccaacatctatttggtttatatatactatagatttagttctaatcaattcatctaatataattagagcctactataacacacgggtattttgctaatctactgaaaaatagtcaactttggaggattccaccctccaatgaagaggccctttgagtaacactagccttgttgatcatgttgaccctattcatgaatgtgtggtttcttttaaagacatgtgagattccgaggagcattagcttttccttttttgtgtgatagggaattttaaatcgattgggtaattgttatctctcgaggggatatctccttgtttcttacttcctttatttcaggttataagatgtt

SEQ ID NO: 28700 - DNA, 2270 bp, Oryza sativa
atatgaaacatatcactccacaaatatacacgttaaaattcaacttatacaaattgtaccaaatataactgtgaatgtacattaactatttttaattgaatttggtcttgcatgtttgtgaaatgatatatttcatgtcaatcgatgttgatatttttttatgtctatataggtaacatgcaaaaaacgaggggatgtccctaaaggaataaaaattcatctccaatcgattgtacatatgttcatgcccaaagttcattttttttcaactaaattttgagcttagcgaattgagtgttactctatggagtttttcactaattagttagttagtgaacatatatttgtcaacaaatattcgtaagtttataatttgttgacaacaacttcttaatacgaaatgtagcacttgctcaactctaggtacctgtgcaactcgtacagtacgtagtattaggcctatccacctatggaaaccttactaattcagctgttgatcggattcaaccgtgcaaacagaaaagaaagcgaactatggctaagctccaggagatctgtgctctcaagcacagaatctaaatatacgtttcactgaaaacgacacccgcacatgccgttccacccagggagatgaacaaaatgacaatttggaacacctgccaatttcgttagcacaatagaacccgataaatgcttggctaccagggccactcttttcgttaccatttgcatggcctgataaccagaaacaaaatagaaagggctaggaaaaaagagagaatccaaatgcaatgaaccccaaaaggacaagaaatctgtatcatactatctggctgggctgctgctcaacgctgtccttctcagtcgcacatacgaacaacacaggggtctattcatgcaagcgcaacggcattgaactactgtgacttcaggttaagctcatggcttgttcgtgttgaaaggagtcggttaaaaggagccaaggatgtgtctggtactgcatgcgcggcgtacaggaagttgagaataaagcggaaggtgtgtttattcagttagttcagcgtttgccctgtatttatgttggcatgccacggctaggtgctgtctacttccgtgttgattgtgtccttggcaccttgcaattccatccccctgtcacgctacaaaacctcaataatggcgtgtggagctctcttcaacaagaaataccggttgctgctgttgctgccctgcactcccatgttcttttcatttccctccctactgtctctggttctctgctcctccacttcagagcagcacaccggctgctagctagccaaagccactggatcgaacagtcaacagtgtgctagctgctgcctccttggtggtgtgtgtacttctcccatgtcgctcatgcgaggcggtttcggtttctccccggcggttgcggcgctgtactgcgctgctctcgtgggggccggcggcctcgggagccggccggtgctcggctgctactcgcgcatcttcagcttcggcgactcgctgacggacaccggcaactacgtccgactgacggccggcaggaagcccagcagcccctacggcgcgccgccgtacgggaggaccttcttcggccgccccaccggccgggccagcgacggccgcctcgtcattgacttcatcggtgagcgaaccgagctgccctccgtctggtttcagcatgcattcccctgctccgacgtgtcgatctgtccgtgttcccaccatctctgcgttgcttttgcattgtgcagcgtacatccctctgttttcctgccaactactacgtactgtgcgtctgtgcattgtgcaacctgcatgcatgctctgtttggaggatttttttttggaggggcctcaaacacgtactcggtggcctcttgttcagttgtccgtcaataacatccaaacttattattgtcctgaaagacgggtaacatgcgaggcgagtggtgtgagcattagaacgccgacaatagctcattctccctcctgtcaaaaaaaaaacataagagtatcattttttatataggtaggttatatgtatgaaaattatatatgtaaatttgactcaaaaggtcctttcataatactattatactacctccgtctcaaaagactttattacttgctaaaataaaatctttttgagtggaggcagtaatttttatctgctatggtcaaacttgaaagtttatgttaagagatttgctccggtccaacaaaaagtatctcgaggtaccggt

SEQ ID NO: 28701 - DNA, 4430 bp, Oryza sativa
ccttgaggtattttttgttggaccgaaacaaatctcttatgttaaataccatgcttatatataaaaaaatggacaagtttggtgactagtgaggaaatatttttgctgcaataatcgtcatttactaacattttatactttgcttttcgtttacaagctcaagctcttagtcactgatgattgcactggaattcatgccggtgtacgctaacttaatttgtcctggccccaagcagctgtagtattagtgacaagtatgtactacagtgttttgcactttaattaggtctagcggcgaccatggtccaccaaaactccaaaactgtgcgtgcatgtttagcagagtagatgctgattaatttgtgtacaattaatttagaagtagccccttcaccaaaaagtgacagtagttagccaagtaccaggtgctgatctcgccgaattcatgtcaagatcagccactgcacgaagatgtcagctttgactcatcgcacggtgctgcttttcaagttgcaacttgcagatgccccgtcgcttgccaagacattctttcttccctaaagggcaccacaaattaaaccggaatcgcttattaatttcgatcatgtagtgaaatattttgagctgtttcttgagccttgttaactttgcttcggtaatttgtttattatgcgttctgtccaaacttctctagatacgggagtatgtactactccctccgtcttaaaatataatcatttttaatatagtgacaagtcaaacattttaaattttaactattaataacaaaaaaaaagatcaatcatataaaattgatgttactagatttagtattaaacaaactattataatatgtaacactttttatttaaaatatcttacttttatatatattattgatcaaaatagcatctcagagaccatagtacggttcaaaaatgtttatattttgggacggatggagtacgtactactggccgtcagttaaaaaaaaaaaactactgtggtagcagtgctaatgtaagtccttgctgttcgttgcagcgcaagagttcgggctggccaacgtgacggccattcaggtgggtgccgggccggccgacttcccgcacggcgccaacttcgccatcatctcctccacagcgaacaacgcctccttcttcgcccgcaagggcctggacatcacccccttctccctcgacacccagatgttctggttccgcacccacctgcagcagctcacgcagcagctgaacggtgagtacgccatgcatggccggccttctccatcagctacgcgcgtcgttgacacgccagctgatgcattacatgttactggttgattcgtaggcggcggtggcggcggcggcagcatcctgagcgacgcgctggtgtcgctgggcgagatcggcgggaacgactacaacttcgcgttcaacaagggggtgccgcgcgagacggtgcgcgcgttcgtgccggcggtggtggacaagctggcggcggccgtggaggagctgatcgggatgggggcgagggcgttcgtggtgcccgggaacctgccgttcgggtgcgcgccgctgtacctcaaccggttcaggggcgccgccgccagcgagtacgacgcccggacggggtgcctggcctggttcaacaagttcgccgagttccacaaccgggttctcaccgcgcggctcgacgacctccgccggctgcacccggacgtcaccatcgtgtacgccgactggtacggcgccatgacgagcatcttccaggccccaggaaaactaggtgagtgcgtacgtacgcgtcagctctctctctctctctctctccttattttggcattgtgtcgtgtcttgtcttgtgtgctgcaacggcgacgttgcacccgtcggcgttcctcctctctgttggtttgtgtggtgatatatgcatacacgtgacaaacgagcgaggcgagtactgcacaaagcttagcagttatgtatggcccgataagcagcatccaccgctgccatgcaggggccctcctaattcatacttgcgctaaggttcacgtacgaacagaggggtagagccgtagaggtcaagcgaacatggaattcagcggtgtccggttcggacgcgtctggctcatacgcaattatgcatccaaattccaaggtaagctgtaggcacttgggctgaaacacttatttcggtccctattgggctgggaagattttaataggaataagtccattttgactcccttaaaaatgacccgaatctaattcgtgaccctcaaccgtaaaaccaggtaagatgacttctgaactattcaaaccagtgcaatttgactccctaagcaattttagagggcggttttgctgatgtggcgctgacatggtgctgttgacctggtctttgtccacgtggcgcttatgtggcattagaattaaaaaaaatatttataggacccatctatcattcataaaaaaatattgtgggggcccacatgtcatcatctatctttctcttcttccttctccctgagatttctctgccttctctctctccccatttctcttcactttctctcgacgcagtgggcggataggggcaccgtcacgccggggagggcgagggcttcatggatccccgtggcggcggcggcgggggcgtgggacatcgatgtcgatggtggaggcatcgagcgggttgagcggtggctccggcggcgtgcggcgaccccgttggcgttggagagcgagggggtgtcagaggtgtctcgcgacgcggtcggcgtggggaggggcgccggcgcgtcgatctgtctggagccggtcggcggtggggcgtcatggacccccgtggcggcgacggcgagcgtgggacgtcgacggtggaggcatcgagcaggttgagcggtggctccggcggcgtgcggcgaccccgttggcgctggaggaggggcgccggcatgtcgatctgtctggagctggtcgcttggaggggcgtcggcggcgtgcaccgccaaggtcgagggcggcggcgtcatggaccccggcgacagcggcgtcatggcctctcctgtcctcacgcctcttcttcctcctccttccttctctcattctttccccctctcctttctaccactgtggcgacggcggcggtagcagcgagaggctgttgggaggaagaatggaggggggggcgtatgggccgctcgactacctcacgatggaggccgctcccgtggaagccactcgacgctgctgcgatggaagccgccgctcgactgcgctgccgccctattgtcgcttgcccgccgcctccggtccagctcctgccccctgcaaaccagcaaaggggagagaaagagaaagaaagaggatgacatgttagtgggtcccacaatatgtgtgaatggcaaattgggcccacatgttttttttaattctaatgccacgtatgcgccacgtgggacgaagaacagatcaatatcgccatgtcagcaaaaccaccctccaaaaccgctgagagagttaaattacactggttttaatagttcgaggagtcatcttatacggttttgtggttgagggtcagattatattcgggtcatatttaagggagtcaaagtggacttattccattttaatactaggccatagctcatggtcagtcacaggcctgaaaaatgagtttcataactaggctgggcctgtttccaggcctaacagtatacccatttgaagcccagctcatctattcctcggtgttattctttctgatcttccttaaccaatacacacacatcgacacgctgtgttatatgcaggattcacaaacgcgctggggtcttgctgcgggaaccagagcgtgccgtgcggcaaggcagggtgcaccgtgtgcgaggacccatcgacgtacgtctcgtgggacgggacgcacccaacggaggcggtgtacaagctaatcgccgacggggtgctccacggcccgcacgcctcccctgtccctctcgccaagacctgcccgcccacctgaccaaaccgctcctcctccaccggtagaaagaagatcgatccatccattctttgtgctatggttttattacttgctcatggaaacattgtagtacattgtgtaggtgaagttcaattacaggattcgtgtagagaaagagctagtacaaagtttgcatgctatgatccatgattcaatggacgaattgcaaattgcatgcgtttggagaaacacttttttactgatccctgaagaagtgtatggctccttttaagttattcttcccaaacagacatgatttagcgtgagacgtcgttgctacaggctacggctcgttgaggagttccgtttctccttgtgatcacagtgttttcgtgagcgattttccgctccttaatccatgtatgtacataccatca

SEQ ID NO: 28702 - DNA, 1181 bp, Oryza sativa
gcgaattcgagctcggtaccctggtgaaaaaaggagtccttacgttggttctctacaatggataatagggaaacaggaaagattatatcaagtgttgcttcttaaatcagttttattgcttttcattagttttatgttgcaccaacatttaccatacaactatgtgcaacagcagggcatataaataacaagcacagcgattctacaacatttgcacgtgtactatgttatttcagtgaagtataagcaaataagcaataccctgatccatagcataagctatctggtatacatccttttctttccttcacttcaaatgaaacaactcctatccttcaagcgtaactatcgatctactatactctactttagatacttaaatatactaaggtataacttggacaaaaattgacaacgtttgcttcagaagataagacaataaatattggctttttcgttgatatactaatggttaaatcaagaatgacatgaattacctgatatcttgcactctgcttattgtactgagattctggatcggcactcgtgtacacagacagccaccccccatgcacacaagggtcatcagcactgcctggccgtactatttctgaagcaggtaccaaggaaatatcaaggtcatccatccattctaccatccgtattgttccacgccatgccaccaccacatcccgtctcccaagcacttctttaccttcatctgtggccaccgcaacaaaccccatccaatttgactgcttgctccatgcagccttcgaccatgactttatcatgaatgcatcaggcaaactgacagtacacattgcatatatgaactttgtaatgacatacagatttgggtttgatacatccaccctgctgaggaagtccttgcgactgaagaggcaagacccagcgtaccttgatcttctctctctgtttaaccccgtgtaggctgcctgagaaagctcaccatagttgatgatgttattgcggagatcaacgtcaagaggatcaagtaaccccttccagtaactcacaccattgagctctctccatcttctggcgatatttccaagccctcttagggagctcatctttgccgtatatggttggtctgtgatgcttggtacttacaagccacaaaagcttgcaacttcatattccactgggcgtctggg

SEQ ID NO: 28703 - DNA, 2339 bp, Oryza sativa
  unsure (1)..(2339): unsure at all n locations
aagtataagcaaataagcaataccctgatccatagcataagctatctggtatacatccttttctttccttcacttcaaatgaaacaactcctatccttcaagcgtaactatcgatctactatactctactttagatacttaaatatactaaggtataacttggacaaaaattgacaacgtttgcttcagaagataagacaataaatattggctttttcgttgatatactaatggttaaatcaagaatgacatgaattacctgatatcttgcactctgcttattgtactgagattctggatcggcactcgtgtacacagacagccaccccccatgcacacaagggtcatcagcactgcctggccgtactatttctgaagcaggtaccaaggaaatatcaaggtcatccatccattctaccatccgtattgttccacgccatgccaccaccacatcccgtctcccaagcacttctttaccttcatctgtggccaccgcaacaaaccccatccaatttgactgcttgctccatgcagccttcgaccatgactttatcatgaatgcatcaggcaaactgacagtacacattgcatatatgaactttgtaatgacanncagatttgggtttgatacatccaccctgctgagnaagtccttncnactnaaaagtcaagacctccgccaaaagggggggcgcccggggggttttaaacccccccttttggaattccttctctnntntgtttaaccccgtctagtcnncccagatgatctaagcaccgccnnnatgttantncgnagatcaacgtcaagatgatgaagtnnccccttccagtaactnacaccattgagctctctccatcttctggcatatttccaagctcttagaagctcatctttcgggggggtttgaaaatttaaatttggnggtttggttcctgttgatgcttggtacttacaagccacaaaagcttgcaacttcatattccactgggcgtctgggtatatatgtgtgtgtgtgtgtgtgtgtgtgtgtatgattctaggttgctatcctctccatcaaatctgcagttccataagcatgtagaagatgagctccctgtcattctcttccctaccaatcaaccgcccaacttggcaaccatccatcctggatttcaaagcatgaagaaacttgcacggatcaaataatccgcctagagaagaggtgaacaactccatcatattcataaagaaatgcctcctgacactacccagcacaccaaatctttgtgtgcctctgaagagagggggtggggttcaccagttgcaaccagaaatgagcagcatcttctgtaaaagatttttctccaataaatggcagaagtttatacgcgtactgtttggtatttgaagtattctccaataaaagcatccattagtaccatgtttactaaccaaagcatttcatattaaaacctttagttccaatgattactaaccatatgtataatcgtaatcttgactatatccttaatagaataatatagaccatgaccatacagccaaaagttctgtttgtgaagagccatctacagagttatgatgtatgtaaccacatttttcactgttattggcaacatcatccaggaaaggcacatttgtaaaggagtattttgcaacactcatcaccagaattaggcaaggaaaaccaatatgagcttagcagccactccattgcacctttctgaatatgggtctagctgcctagctggtcaaggtcctacgtgcaacaaggtaaagccacaaataaagctcagatctctacctatcacttccaaagtacaatattttaatacatttagcagctacctttaagtcttggcctaacaaatttcaacagatgtaccagtgcctgaaaaataaagctaatgctactttcagttcacattgcattgtttagctaatatccaaacagggccacaataatttttcattttgatctaaactgagttttgctgttctatttaagatatagaagtttatctttctcaaagtagatgacttagtaccaaagaaataatacaattataattgataatactatagaatgacagacattataaaagaaaagttatgacttagtaccaaagaaataatacaattataattgataatactatagaatgacagacattataaaagaaaagtttatatgattatagtgtaacggactgaactgtaccatgctgatgtattatggtgactctcaaactggtgtatggaaacttgtatgtagcttctcctgatacatcaatcattcttctatgcacaacgaagcatcagaacagtctcaact

SEQ ID NO: 28704 - DNA, 1850 bp, Oryza sativa
ctagctggtcaaggtcctacgtgcaacaaggtaaagccacaaataaagctcagatctctacctatcacttccaaagtacaatattttaatacatttagcagctacctttaagtcttggcctaacaaatttcaacagatgtaccagtgcctgaaaaataaagctaatgctactttcagttcacattgcattgtttagctaatatccaaacagggccacaataatttttcattttgatctaaactgagttttgctgttctatttaagatatagaagtttatctttctcaaagtagatgacttagtaccaaagaaataatacaattataattgataatactatagaatgacagacattataaaagaaaagttatgacttagtaccaaagaaataatacaattataattgataatactatagaatgacagacattataaaagaaaagtttatatgattatagtgtaacggactgaactgtaccatgctgatgtattatggtgactctcaaactggtgtatggaaacttgtatgtagcttctcctgatacatcaatcattcttctatgcacaacgaagcatcagaacagtctcaactatcgtgcagtgaaactgttattcagattattaaactgagcctaacatatcatgaccgatgtcctgttttatttatagaaccatggctgagtccagctgtttcagcttgaaggttatggcatgtttttttctgtgccaaaacagcatggcaatagatttgtgtttcataccagccactgaacctgtaaagatctatttcctgaagaaatataatctaaaatgcctgaccagaaaaacatgatgaatgagaatgaggtacatcagaagatatatcaccagaaatccccacaagagcataccccatcctcaaaccggtgaaaccgacggttatccctgagaattacaatccttcctgtacacttactgagatacttaactgcattgtggcaatcatcacaaactcgtaggttcttcataactcgtattggtacaccttctggaacaatcagaagccccaaacctattgctagcctttcactatgatacctcattgttgcctgcttctcatccttgtccacatccttaaccactgcacttgtatctgctacataaccagctgcctccatcttctcaccaactttctccagcacattgtaaatttcgttgcttcttggatgtctcctgcaatttgacacaaaggtatgtacctcccctgcagcttccagccagcttagtccagtctctttacgtacacctgcatcacgcattgctttcctcgcaagtgctgcatccatatgccttcctgcagctgcatacgtgcttgacaagacatatgtgcaccagagcttcgtgaccctgtctcaaacaacctctttgcagcaattgctgcagcgtcagcatccttaaacatgcgacatgccataaggagtgcaccccagacatactcaggtggctccatgggcattgactcaataaggcctagtgcttcacttatacgtcctacacggccaagtaggtcaaccattgcagcataatgctcagcctgcggctcaattctgtactctttcatgagggaaaaatatctctttccctcatcaacaagaccagcatggctacaagcagtgatcaaagacaggaacgtgatggagttgggacgaaatccagcattttgcatatccataaaccgttgaaatgctgcagtagtatgaccatgctgagcagatgcattgagccccgcattccaaattccaaggtttctctcaggtgcttcaccaaacacctggtatgcacactccacaaggccacattttgagtaaaga

SEQ ID NO: 28705 - DNA, 922 bp, Oryza sativa
gcgaattcgagctcggtaccctttcttgtagtaacctacaaactagaattaattaatagtataaagcttacaaacagtaatgaactagctgcactcaccaaattgttcaggggaaagaaaaatttccatggcagctccatagtaatcagtatagatgatggccacatcggggtgaagcttgcgcaagttttccaattcatctataagaagtttgttgtggtattgcgagaactcattcatccacctaagacaacctatctctggctcataatcttccttcttatcactctcaaattgcatgaggtatgttggaatacatccaattgggaggttaccaggaacaactagtgtcttggctccaagtccgatcaattcctgcgaactcaactttattgcattacaagctatataatattatattgcttcgtgaaacaggagctcaaggtatataaaaagatgcaggcacattactcacggtgattgtagaagaaattttggcaataacactaggagtgaagctgcgaatcttttcaatgggcacgccgctcataagaggatagttgtaatcattgcctccgatttctccgaccaaaaagagagattgattcatcatgcccttgcaacctgtgccataaacatcgtttagtaatagctgaaagggaactttaactatcaaaattgctgctttatatggtagttaaactaaactatcttcacctactacttctagcatgttcgtttattatcctattataaactagacagatttgtagcaaacccacaatcattgacctggcatatttattttttttattttattctatgcaaccaattcaagggttaagcaattattcacgtggaaatcatatcatgttgaccaaatatttggcagtggcatggtggggtaccgagctcgaattcg

SEQ ID NO: 28706 - DNA, 2560 bp, Oryza sativa
acgtggaatttaacatttttgcacacaaaagatttggtcagttcttaaagtaaagatttgaatgtgatatgcagcactctatttaccgggggccatctgccggttacctcttccgattatcgcttccacacaagtatagtaaccggccgatgcctaaatttgtgtatgcgagtagtgagcaatttcttgttttcaaaaatgctgtcacaacatgattggtgttttttcaattgatgaaataaattctgatctttgcttaaaaaaactacatctacttattacttggttcactcaacataaagcaaactaaaaatcctacaactgatctaagacagtactaattatagccactcacgctgaaggagaaaaaaatgttctgttataaaatctctattcgaaattaacaaatactagccgacaacccgtgcaaattgttactaattttgtaagtataacgtttttctttgtattctaattttaattcacaccaaagccttattataattttttggagttttttattaatttaatttagaaattatgaattactaagtatcaagagagagtcttaattatattgtttttcaccatttaataattttgaaatcgacaacaaatcaatagtgagaatagtgagttgtgttctaaatgtaccattagaaatgcaaaatagtgtagcctatgacaataactagagaacacacgaaccaaaacccagaagtatgcatgaaacattcccgagaaaggcaaaaggaaggaagaggcgacatcacggcggcaacagccatctagacaaggtgaacaaagaactaatttacatatcttctagtaaccactaagccttgtgctacaatatataagttagaacattacgccacatacttataagaaacaaagaaaaaagaaatctcaaaagtttaggaagacgaaaaagaactataaataaaacctcatgacaaaaaaaaaagaggggataaaaatgagtcgacctgcaggcatgcaagttagtaacagttgggatgtaaaacagtactgtgggtctataatgagacaacaataccacaatattcctttacatattttaatcacatattgggtataataataacaaaatataattacagaattacaagtcgtacatggccttgtgttcaacagaggaaccaaggccaattatctgcggacaagaattagtgatgcttacaattggaggttgagtgtatgaaccctgtagcaggccaattgcaatgcccttgtatgcagcttctgatgggatggaagccatcccacgatgcatattttgctgggtcatcacacactttgtattcgccatatccacagcgtacagatgcagatacaccataaggtcctcttccaccacagcaagcgaccaaaggatcctcaattcctgaaccgcagtttattaggaagtgttaaacaagctaccgacaagaaaagttgttctttatcaatatagaaagtagtgcaggagtgcattccataacatgatgaaaataaaatagccaacctggtaaatatatggagtgagagaaacccaatttagatgttgtgattgtggtacaagcatatttacaaaaagatttcatttgttcgagattgccatagaagtcaaatttaagaggccaacagaaagttttttttttcttgtagttacctacaaactataattaatagtataaagcttacaaacagtaatgaaatagcttcactgaccaaatcgttcaggggaaaggaaaacttccatggcagctccatagtaatcggcatagatgatggtcacatcaagatgaagcttgcgcaagttttccaattcatctacaagaagtttgttgtggtattgcgagaactcattcatccacctaaggcaacctatctttggctcataatcttccttcttatcactctcaaattgcatgaggtacattggaatacatccaattgggatgttaccgggaacaactagtgtcttggccccaagtccaatcaattcctacgaactcagctttgtttcattacaagctttgtaatattgtattgttttgtgaaacaggaactgaaggtatataaaatgatgcaacataggcatattactcacggtgattatggaagaaattttggcaatgacactaggagtgaagttgcgaatcttttcaatggacatgccgctcataagaggaaggttgtaatcattgcctccgatttctccaaccaagaaaagagattgattcatcatgcccttgcaacctgtgcgataaacatcgtttagaatccgtatgtatggataataatagttgaaagggacctttaactatcaaaattgttgctttatatggtagagaaactatcttcacctactacttccagcatgtccgtttattatcctattataaactagacagattttgttcatttgtagcaacacaatcatgaatcattgacctgacatatttgttttttttttcaattttgttctatgcaaccaacctaagggtaaaacaattgatcacgtggaaatatataatgttaccaaatatttggc

SEQ ID NO: 28707 - DNA, 28643 bp, Oryza sativa
aagcttattagccatggcttcatcaccaagtctgccattggtgacgtgtgccctgctgctgctgctggccggggcatgccaagctcacccttactggccactggagttggcgtactaccgcgacaagtgcccccaggccgaggccgtcgtcaaggccgtcgtcggggaggccgtccgccagaaccccggcaatggcgccgccgtcatccgcatgctcttccacgactgctttgtcgaggtgcgtacgttagcttcttcctcttctccggcgagatcgattgatcgacttgagctatgtgtacttagatgtgcatggtgttttgttgttagggttgtgatgcttcgatcctcctggacccgacgccgttcaacccgacgccagagaagctgagcgcgccgaacaacccgtccatgcggggcttcgacctcatcgacgcgatcaagcacgccgtggaggcggcgtgcccgggcgtcgtctcgtgcgccgacatcatcgccttcgcggcgcgcgacgccacctacttcctcagcggcgggaaggtctacttcgacatgccgtcgggccgccgcgacgggaccttctccaacgactccggcccgatcgacttcctcccgccgccgacgtccaacctcagcgacctcgtctccagcttcgccgtcaagggcctctccgtggaggacatggtggtgctctcgggcgcccacaccgtcggccgctcccactgctccttcttcgtccccgaccgcctcaacgcctccgtcttctccgacatcgacggcggcttcgcctggttcctcaggtcgcagtgcccgctcgacgcgacgcccggcggcaacgatcccacggtgatgctggacttcgtgacgcccaacacgctggacaaccagtactacaagaacgtgctcgaccacaaggtgctcttcacctctgacgcggcgctcctgacgtcgccggagacggcgaagatggtggtggacaacgccgtcatccccgggtggtgggaggacaggttcaaggcggccatggtgaagttggcgagcatccaggtgaagaccgggtaccaggggcagatcaggaagaactgcagggtcatcaactactgattaatctacaagtttagctgcgtgattcaattacctggtgaagtacgtgctcaacgatgacgacgtacacggtttgatagtttcacaccctccttgatcaagtcgcaagcgtacgtgttgatgatgttatgattggatgtgacttttgcttcacatttatgttctccctcttttgttaccattccttaattcctcatttgtgaaccccaaggtttacatgctatggatttctttgttttgacctaattgtgtaataaggtcatatgtacttggaataattgtaagttaagttttttgcaacaagtgcccgctatatattgatgtttatctgaaatttgaaaagagaaaaatctaggatggctcgagatacccatggatgtaatgatatagatgtgtgagtgcatgactttcatttattctcttattcaaactagatgggtggcccgcacaattgcgcggctagcacccaaacaaaatcatatatctttcagtatgattttacttaaaatttattaaatagctatacccgtattcctaattatgtagttttaaaagtcacactagctgctaccccttacttctatcatatccttctttatttgcttgcttgggggtccccttaaattttccccaactatttctattcattcttcttgaaacgtttcaaaattggatcttatagtttttgaagttcattatctcgttgggtttcgtttttatatatctggaagtcccgtcaaacgctgccattatactcctctacggtccgtccactgtcttttctcttttgtcattgggattttacaaatcgaatataattatcgtttgagttcatttttcactttctataagtcccgccaaaccgtcagcggcttttccattgtactttatgactcgtccgctgtctaccttctttattgtcatttgtcattgagattttaaaatcgaacatgattatcattgggttttttttttttactttttagaagttccgaacctttaaaaattggaccttgtagtttttagaatttattatcttattggcttttatttcttataatttttagaagtcacgtcaaacaatgccactatactcctctacgacccatccgccgtctactctttattgccattgggattctaaaaatcaaatataactatcattggaattcattttttattttctagaagtcccgccaaccgtcagcagctctgcaactatactcctatacaccccacccgctgcttctcctttttattgtcattgagattttaaaaatcaaatatgattatcaataaggtttattttttttactttctagaagtcccggcaaccgccttgcccgtttgcttcacggcttgcctgtcgtccctccttttaatcatcattaggattctatctgttgttttactaatagtttttatatgtcgtatcaaccgccaccactctactcttttataggcttgttatttaatttatctcatcgtgtgttttagatagtctttttttttcaatagtctttatttttatcaccaattttagttgtttataaattgtattcctaattgaaatcttttttctttttctaatttcagaatttaattttttaaacttttatttaataccgtatagtattcttttaatatttttattttttatttttgaattttggtcgtttcaaaattgtatttctacttgaactctcttttagtttttctaatttttgatattttttatttttttattctgaattttaattaatttcgtattggattgttatatggattcttcattcaatattgcttatttttaattccgaatttcagttaattttaaattgtattcctacttgaactcttttttttctttttgctaatttcggattttatttttatttttattccgaatagtaactaatctcgtattgggttcttatatggactcttctctcaatattcctttttctaattccgaatttcagttatttttaaattatattcctactaggactctctcgttttattttctaattttggattttattttatttttattttgaattttgattaatctcgtattgggttcttatatggacacttctttcaatattgcttatttttaattccgaatttcagctatttttaattgtatttctacttcgactctctttttctttttctccgattaatgtggaaatttctagccctcacagcgaacgtggcgacttctttcaaagctgttttaataatataatagatagatagattattataacacacaattcatatagttgtatgttaggggaaagccgatcatgcatacacactctttttatgtatatcaactaaatactcataaaaaatagtaaaatagatcaatatatcatatatcgcttcacaaacatgcttgtttaaatttgacctacacaacaaacagaaacaaacataacaaaaaatgatgataattaagaaattgtgtactatttacggttgagatttgttatttttgtttctacttatatgtgtcgaattttaacttgaatatttgtagatagtgaaatatcatattttgatctattttaccatttttcaacaaaattttgatggctttgcagttggcatctatgaaatgggtatatgtcatcatatccttttaaaagaaaaacagcttactagaactaccatatatagggtcaattggctggctacttaccgtcaacccaagtactccctctgtattttttactgtattttttaaatgtgttactgtttacttttaagcatacgaccattcatcttattaatttactatgtaaataaagatgaatggttattatttcttctattattatttaacttttttgtgatatgttcatctagtaaaggtactttaagtatggcatatagttttgtatatttacattgagtaaaagaatggtacggtcaaatatatatatatatatatattaaaagtcaatgatattctatatttgaaaacaaagggagtagttatttcattttgcgactatcttaaaaattatcgagagtttttttggttgtaaaactttaaaatataactatagtataactacattacaactcatatatataactacaatataactagatgcatatataatttatatgtaactagaataaaacatgtatggcgcgattgcagtgcactccctccacaaactgaaggccgcgaggtcaaatcccaacaattgtgcttaccaatttattttttctcatccttgctagcacgaatcttagagcaaatatgacggtctaaaagtcgaaagtttccctaaaaatccgtcgaaagtaatctagcaattccgtttcattttcacttccttgaggaaatatctataccgcttgaaggaaagcaagtttaatttgttagcactaattaaagcagtaataccttaagcctcttcaagaactaaagaacacttcaaattattttttagcacagtattattgtagccatagggagtacgtacaagcatatctaacaaacttacggtgtcggtgaaattaagtttgacgctgtaaacccaaaaactccactaagctttactaatttgttgattaccttatataaacaaatgctcgagcactataaaaaattgatttttcatggcatcaccctattatttttattgatggactaatgaaataaatgcttgtaaaaatgtattggcggattctgggtcacaagccgtcagcgaaaaactcacttaggaggtcccactaaaaaaaatagctctatttttttgggcgaacctcatgagagcccaacgaaaattggtttttattggcagtatctaagagcaccactcgcgaaatcttttctgcggtattcaaaagtcccaccgccaaccaaaccctcgctcccttggctccctcgatcacctcatctacctccttccatgcccctctgcctctctcactcccttcatctgacacttcctccatcgtcaccgagatgcgttgcactactgtcgcgaaccgctaccgcatcagccaacgaggaggccaaggccgctagatttggtgaccccgacctcctcgctggtgaatccagttggcccgagcggatgacgcccgagaggatgacaaggagttacatgacgacacagggaaggttactgttggtgtgattcatgaccgccagatctagcggcggcaataacaagggttgcttttcgacgacaccagctgtcctcagcgatggctctgcgaccccgactcttggttgtgatggtaactaggtttgtggctctgagatggtggtggcgatgacaaccaacgctcggtgatggcatctacgacgtcgatcttgagcaaacgtccatatctaggcggaggttgacaagggacgacgacaacacgagctccttcttgttaggattcgcggcctcatcaatggtgttgtgggccagcggctcgatcgtcatggatagggtgaaccccaaggagaccgagatgcagcatggcgatgactactccctcttgatctacacgtggaagtcataatgacagtgaccttgttccgcttggtaacattattcaacattgtacttgtgcaatttgagcctcgagggatcaaattgatcttggattacagtagtagcaaaatgccaagtgaagtccctgcggcaacgcatctccgggtaccgccgcgggttgcacatgacgtactaaaagtgtgacggtgcgatttgatgtcaagacacctttccacgttaccaacaaaacaactactcaaagcggatagcaataggaaataattttaaattagttaacatactctatgtattaatggatgtaatgggagaggttaatgctgccaagtggcagctagcttgtttcgttggttgagttggaggtatttggctaccgggcacgaatagctagtttgataacaaaagaattgctctagcattactagtttgagcctttaatttgatgcatccctctaatgaaaagtcgttttcaagatttctgttgctgcttaattaattagatatatagttgcttatacttttgtcctgtggccagtcctaacggtgcttacattttcgtctaaagttgttcatattactatattttgtgcaccgtcgtcctgtcgtccatgatggtggcatgtgccaatttgccaaactgcagctagtgagagccgtgtttcttttttgcattgtgaactgttagtttgagtcttctatccttgttgcagaacatgagccaattgtatcatatccttatcttcccactatatatataggtgtttataatgtagttgtactactacgcgattggaaagaagcattgtagatattctagtcccatcatattgtgggcacccttactccttcctgagccactgatgtagctttttgttttttcctttggcactctatgtgtatttctcaatcttatccttgaaatctcccttatacttctacaatgacatttgatagattttattatgaaaaaaaatacctttcccttcccgtcgttaacatacggtgttggaagtcctaaacttaaaaactatgtattaattagtggtgaggttttctcctatcttaggatagttgtatttgtatacctcctcatacagaagatacctctaaataaagggagttaccaaaactaatctaatccgattagaataatattgaaaactcatcttttatatatgatcttaactttcccctttttgtgggggagtaggtatatcccttctggggcagatataaacacctcctaacttaactaacactgtgaggtatgtatagctatatactccctccatttcaaaatgtttgacatcgttgactttttagtacgtatttgatcattcatcttattcaaaaaatttaagtaattatttattcttttcatatcatttgattcacaaattttttatgtacacatatagttttacatatttcacaaatttttttaataagacgaacggtcaaatatgtgctaaaaagccaacggtgtcaaatattttgaaacgaagggagtatcttaagtactaaaaaatctctctattgccaattgtgaatttatcttctaatgatgtcaagcggtttagtttaattttccacctttcaaatgtaggaattatatatagttttctaagaataggaggaaacctcacaaatgataggatgggtgattttatttgactagagtacaatgagcttttaggtgatatatctctatctgtatatataccaatttttatccagcatttgtcaattatgcatttaacgtggcaagggtaactatatttatggcgtcatatttttcacaaaaaatagtgggcatgtatttatattgtaagttcctaaattacatatgtaattttagcgtatttacaatgtaagtccaaaatttacatatgtaagtctcaaaattacatatgtaagtcccaaatttacatatgtaatcagtatgtaattatagtgtaagtacaatataattagtatgaataatttatccaccagtgatatagtttaatctctaagtgaaagcaaatactataacaaatcttgaagataatcgactgcaaaatattagcaaaacatggatggtcgtatgagatgtgactataaaactaacaaatttgtggcgacacaaatatagcaattctgaattaaaatgcaggcttgaacgaagcttccgccatgcacagattctcgatatgctgccaaaaaaatgttgacttacatataaaaataaagtagcaacaccattgtactccctcctttatactccctccgtttcgttttatttgataccgttgactttttagcacatgtttgaccactcgtcttattaaaaaaatttaaataattattaattcttttcctatcatttgattcattgttaaatatacttttatgcatacgtatagctttacatatttcacaaaagtttttgaataaagcgaacagtcaaatatgagctaaaaagtcaacggtgtcaaataaaacgaaacggagggagtatatatatgatgttaaaaaaaagagggagtatatattggtggactggatgatgaagctatttcaatcaatctaatacaatgaactttttagtttgatatgcgcaccagctagttggtagatttttcctttttttagcagttgcttgaacaagagctagtgctgttattaatcagtaataaaacctgctgtatttgttaattactaagagctagtcaaggttttcactccttctacatattctgaaaagaatttgttaatttctgcccacttgccgagagaacttttcatcacgtaaccctgacctatcataattaatccagctgcaactagggatgaaaacggatcggaaacggacggaaactagttttatcatactcgttttcatattttttttggaatcagaatcggaatcgaaaactcggatacggaaatgaaatcgaatattatcgaatacagatacggagcgaatacgagacggaacaaatgcggtagcgaatatttaccggcatataaaaaacccctcaaattgagtttcttgataaatgaagagatatcgcttattattttagttcaacatctctaacatttatatcgtcaattttgtagacggtcccacaactgtatgtgaaaatcgattttcatggctgttcctctaagagatccatatgcaaatatgattatcattttctattcccaagaccgtttattagatgtataacttacttaccagtgtataaattggagatgttatttattttacttcacgtcttcgaaacttgtaatatttgtattatactttaaatacttttaaatacaaatgttataaactacaaagtggtagatcccattgtgctctacaattttgatatggaacacatctccatcagatgtcgtttgaattgtagatctgagattttgtaaaaattaatatggtatattataatgaatatttagacccttaaatgacctcaaataataaaatagtcaataataaagttatagatctcatcgagctctacaatgttgatataaagtttgtcttcatctgattccatatgaaaaagttatacatatatacgtatatacatgttctttctaaaatttgctcaatgtgtacggatatccggaaaaaaatccggatagtttccgaccgttttccgattccgacggatagtactcttaatgtattcgttttcgtttccgagaaaaaacatccgaattcgtttccgaatctgaaaatttccggataattccgaccgaaactatctgaatccgaaaaatggtccggacggacggaacctatccgaaccaggttcatccctagctgcaacgcataatcaactgcttaagagacattgtctgacactagctagtacctgccgtgcataagtatacgcgcatatgctttatttcaataatgcttgctgagtactccctccgttttttcttcggggactatactttttatatggcgttattaaatttggtatttgtccatttgatatacaacgatgttgatatttagatatgatagtttgttatttgtcttattcaaataaaggattaagtccgatttacccctcaactaacgtgatacaaggatttaccccttgaactgtaatatcaaacatttgatgctcctaaaataattgattaagtttgtgaattatttttatttactgaagtaagtatataattaattatatattagtgaaagataaattcactacttcaattgtcaacccgttgtgcgatgattttgtcaaccccatgcaattatatcatagaggatttaactagaatattatgtgttagcttgtccttgattgctatctatcttatattcgaaggaagttatcgatctttttgtttgacctcgtcgttcaataaatatattggtttttaatagagatgttaatttgatccgttgtgcaaaatgcatggatgtgcaactagctagaggtaaaaaaaatatcagtgaaaaggaggaggaagaagaactacggtgacccatccggttattgctctgtacaagctagctactttttataaccatactctatacaatcttgtgtatggagctagctaaatactagataatttaaggccatttgtaggttgattgatccgccacgcaagctttgctacctaaccatttcaatgaaatagtaataattaaactcacatcttaactgcagagcacaaaaggtgtttgggagagacttagtttgacttgcattccctgactagctagctagctcgctcgctctggaaagcatgcttatgtccatcactacgctttttgtccagttaattgcccgttataagctcggattagaggaacgattccgaatagcacgtggtttagcgagccaaccaacgtcgcgggtcaaaccgcagagttgtacacacttgtgctgcaacaaacaaacgtacgcgcatattgcgcggtctcctgccaccaccttaccctttgccaacatgcatccgctccaagattaaaaaagcttgcgatccagaagctatctatcaaccgaacgctcccctgatctcatcttacctggaggctggagctcatcttcacctataaatactcgtgcacatcagcatcacttcatcacctcaaccatcgcaatccatcaagcaaatctcactagctagctagctatctcagctcactctctcagtagccactgatcagaagaagagcaagagaagccaattaagctagctagctaagctggttaattgccatgggtagtggtaataagctcgctgccaccgtggtcgtcgtcaccttcgcggtgctcatggcggcggtgacgacgacgtgccaagcagcttacgggccacccaaccctgcttcgtgcgggctcaaggtcggttactactacgccaagtgcccgcatgccgaggaaatcgtcaagaacgtcgtcggcgccgccatcctccacaaccccggcgtcggcgctggcctcatccgcatgctcttccatgactgcttcgttgaggtacattcctatatatatatatatatatatatatatatatatatatatatatatatatatatgcatgtgtactatacttgttttattttatattataatttatagaaaaattcgacaatttgtaaagcacgaaagtactaaccatcgaatatattttaataatgtatttgttttatattaaaaatagtactacatttttctataaatttgataaacttttaagaatatttaatttataaaatcaaaacgaattataatagtatgaaacgggcggagtggtatacaattaaggcttcgacatttcgaactgaaattttcgaaatttcggtcatttcgtaccctctgatatgatattattttgcatgaaatttttatttatttttattttttcttgaattctgataatatttgtttaaatttgactacattttgtttcgaattttggaccgaaaacgggattgaacccacatataattacgagtttctcagctttgtggccgtggatgcatgacacgtttacaccgccaatgccgaaaatgtgcagggatgtgatgcgtccgtgctgctcgacccgacgccggcgaacccgcagccggagaagctcagcccgcccaacatgcccagcctccgcggttacgaggtgatcgacgccgccaaggcggccgtcgaggcggcctgcccgggcgtcgtctcctgcgccgacatcgtcgccttcgccgcgcgcgacgccttcttcttcctcagcaacagcagggtcgcgttccagatgcccgcggggcgcctcgacgggcgctactccaacgcgtcgcgcgccctcgacttcctcccgccgcccaagttcaacctcggccagctcgtcgccaacttcgccaccaaggggctcggcatggaggacatggtggtgctctccggcgcccacaccgtcggcgactcccactgctcgtccttcgtccccgaccgcctcgccgtcccctccgacatggagcccccgctcgccgccatgctgaggacgcagtgcccggcgaagccgagctcaggcaacgaccccacggtggtgcaggacgtcgtgacgcccaacaagctggacaaccagtactacaagaacgtgctcgcgcacagggtgctcttcacctccgacgcgtcgctcctggcgtcgccggcgacggcgaagatggtggtggacaatgccaacatccccgggtggtgggaggataggttcacgaaggccatggtgaagatggccagcatcgaggtgaagaccggcggcaatggcgagatcaggaggaactgccgggctgtcaatcactagctcatacaaatttacgagcatgcatgtttaattaatttattcatgcatatctatgttctatcgttaactgctgcatcttgtctgtttattctttcttttccactgatttcatttcaagtcaaatgaggcttatgtaccattatattgtatcatgtttgaatataataaaataactttcttacggacactacggagataccacaaggatcacacttgttattaatgttaggagaaattctgactgatatgtaaacttttccattaattgttaaagggacagcattagctttgacaacaaattaaactaactaataaaatgggagcacttatatttatggtgccacattttattttttaaaaaaataatcaaatcgtttttacactttaaattacctacactcacgttataataacaatataaagttaaaaacttacactgtaatttataatatatatacattagagtttttctaatatacaatgtataattaagagaattcatgattaggattaaaagtgatttattatatatttggaagagaagatacaagagatataagcatagttacatatcggagagagcgcaatcacatagagaaaaagtgactgaaattatgtgaaaatgtggcatcatagttttaacaaacccgattaaaaagtttagggatgaaagatagtgtgttttcccaatatttcccaattcccatccacatatttaatctaagtaaggccatagaaggcactgaaatatttcattatacatcaatataaacaatagagtaaattctctttatactcttgaaaactcatccaatccctttcaacctcctgaaatttaaatcccttttgtacctttgaaatttcaatttgatcctttccatgcccctgccggtacattttccttcatttcacttttaagtttggttgaaaatatcttttatacccttgatgatttagatttgaatataagcttgaaaaacgattgaaaattttgtttgagtgcacaatatgtgcattttatgaaactaatgacactaaataattagtgcaaaaaaatttgacataaattttgaaagtaaaacaaatttaataaattaaaacttttatttgaaatttcaataggacaatggattttttttatcaagagcattcataaaaatatatggtgagcattggtagtcctatctttgtatgaatgctcctaaataaaataaatacatatttttttatttcattatctaaaaataattttgtcataaataatatatcgcacaacaaactcataactattatagtctcatgtgtcaatcttttacattttcaataatgtaattcataaatttgtatgttcatccaaagggtaacatggtcatttttatagacattagacggtcaactgacgagaggggtatggaagggatcaaaatcaaattttaagggcatataaggaagtaagtaaaattcagtggcataaaagggattagctaaaattgcagggatatacaggggattttctctaaacaataagggcaatgtatttccctttcaatttatcagactaattgcaggtttgtagtttgtacagtctattatatgtacaatctactatctttgttcttaaatagatggcatatcccagattgtatgccatcaaacatcaaaattttaagtttttttatgaaataaaaatattataaatcaatacatgaaaataatactagtaggtttataatataaagcactttcatacagctgccttcaataaatattataaacatattagttattaaaaatattgataagatgtgtgtattaaagattgtcacgaataatttaaatgtcaagtacaaaatgagaatgaggtattggctagtttattgtgggataagagtcaaactttggaccataccaactcgatcaccaagtcaacaaataatcaattagaatgttagaagattgttttgaggaaatcaataatagtctataactaacatattcgagacttcaattttcaactcatgcttataatgctattttttttgactgaaagtactgccagggctttgcccagcagtttaaattttataaatcataaatatgtacaaagttacaaaggacaaacaaaacagctaaactataaagtttgtatccaatcaaaaagaaattgcttgagtgggtctttcattctgcacatatgcagaagaacttctttgacaaatatagatttccatgattgaggcgatggcttcacattctgaaaaattagcccatttctttgcttccaaagatgccatgctgccatgaaaaatacctcaaggaaacccttttgagcaaatctgattctcgccaaaacaatcatctgaaaaaattccagattacaattctaggaaatgcctagctactgccaacaagccacactgaaagggcatgtaaaaaagagatgaagcctagtctctctttgatgtgtattacacaaggcacatgtgagatcgtcatcctcttttgcacaatgtctcatgtcaagcatatcccttgtgttaagtctatcacaaaacaaaagccatgcaaacacctttatcttcatgacacatttggttttccacagccaaatcatgggtctaggaggatgcaacgaggagtaattaagcttataaaatattttcgctgtgtacatatctgttccccaaataaagctccaaacatcacctcttccaggctgaagttgcagataattcaatttataatgctaatttgtcaatcccttgcacatactccgaaattatagtttgctaaatatccggcattgacttgtcattatcagccgttataacctaaaactatatcgcagggagttcgatttattttattcttgaacatgctaattgttagaactaatcatgcgtagtttttcagtagaagtcaagttacacgctaagtcatacatacaagaataaatggaaataggggtaaaacaaaataacttcaagcaaattgtacggtaagccagctagttcctcccaccgaggaacttgtggttttgggaggactcagctttgactttgacccattcatgtgtagactaagaaattaaactaaaatgctacttcttccatcctagaataagtttattttttgttgctcccatctgtcctaaaataagtttattttttaataattgttgcatctgagtttttgaaagttggggataaatgcattcgaagtagataaagtgaggaataaacacatcaggatttgataaagtgggggtattttaatctttttttattgggatgtgtgagatggtgaaaattaaatttattctgggatggagggagtcctcaatatatgaggataggggaattttaattttgattcctcgaggaaatgtgattagccatgatcccgatcttctgaaagatattgataaaccgattgtggtggacttgacgttgataatctaaaggctcctagtataagcgaatactaagaatacaaacaaggaagtaggagaagaaatctaaaaatactacaaacaatccaaaataacagcaaaattacaagtggcggaataatctaaacaaaagccaactctatatgatgatggctatgtgtgtgtgtgtgaactaagccatggggagtgtgctctttacactcacacactccctatggtttagctcatgacacaaatgcaatctccaagacccaaaattaactaggactcgatgaagtatatgggcatatggcttgttttgactattccaaacatcttagcacaaaatctgacatgagacaaaaaaccatatgaaggagggcttcttaagctttccaataagtacttatgggtttccaaggaatctcctgtatcatcagagtcagaaggaccaaacccacgaataggaatttgcttgcacgtgatggttcgtggctcctcttctacatttggccgttttatcttctccattgtcttctcctttgttactaaggacaatcaaatcatcaaaagtaataaatagtatgtcattcttagaaacatttgtatcaaagcatagaaacccattcaccttatggctaaattgaagtgcatgggcacgacttactggactttgcattgttggttcatcttgttgaacttgttgaggagattgtatgtgaatttccacaagagcgatgtcattatcattacatctatttgcataaaccatatatagttaagtagttatgaaaaattctcaaattataaataacattcatgtacatatacaactccacaaaaatttcaaggttaaatacaaaacacacataaaggggggaaaaggataaatccaagcatataaatagtaccgatttcttagtgtgtagttcgattttaaacattaagtgataaaggtttgccaaatgttttttatacaaaaaaaactataaccaattacatgcatttgagatataaattatcaagagggaacattattcacttgaggtatcaaagtccattctgatgtggataggcatgattttagttagtagattcaaacatacaaagccaattatgtttttttttaaatagacactccattgtcgtagtttaggggacatggctgttaagaataaaataattaagctcatcctatatctataccttatataagattacaacccactaaatcctaaagcttaacatgcaaacataccacgtcatcatccactagcaattaatacatcttaacatgcaaacattctaatatacaatttattacattcaagagcgcaacatgcaagcatatcaaatcatcctcatcatatttcaacatgtccatccaatcctatatttcctcctcttcattcagttaatttgatttggatttatgttttattaaataaaggaactcaaattgaatagttcttgattcattggttcgcccatcgtaatatgtgctctaatgtctgttggttttttttttaccgtgttacaaatgttttctatattagttcccctattggactatgtgattattatcccttacattacttctactaatcttagaaagttggaccccaaaaagcatttttctacctctagttttttattatataaatacatcctaattcatgctgcactaacataaaaaccaattattctaatacaccgtatgccttagttgtttaattcaatcttcaaaatcttgtagcaacgcgcggggtatcaactagtataaataaagtctatccccaccacctatagttaaagttatttttcactcaccttgttgtgccacatcacctaaatttgagttagccatctgatttagcctatgtgctctagataatattgattaagcaatcaaacagcccatgacccatcccaactttcctcctcctagtactgaatcgtcactccatcgtctcacataataaccatcacaattgatagggaatctgaggcaacgcatgttaatcagttttagctttcgatcttcatcaaaacattctggtaagcctgctaataaggtaaccaaacatttcttttattacaaatccttataaaatatcagacatggtgagataccaatcataccattcatcattaaatcatggtaaccaagtgttgttttcttcacttgataatcataacaactcaatgcaagcataattgatttagaatttaagaagatctgaaacttttacacattaaaggcaaattttgataaacatgatatgctactcaagtgaggcaccatgtcaagaatgatgtatcactgccagtctgccacactcacaattataaaaaactatgattaagcttaaggctttacatcctctttcactatatgatatggaatataagggcatcatatctgcgatgagtttattaccttcaaagtgaaccatgtaattgtactacttagtaataataaacctattttagtaatgagttccattctgacaaccatttcgtagcattttgattcttttagttggcacatctgagcctgcagaatgaatgaagtacaaaaagtacacatttaggaataaactggattactttgataagttggcaacttgggagtagtattacttgtacttttctctgtacagttttttctctgatggaaatagatgggagtacacaatttcttatggctattgtacttctcacctcaggataaaaaaaaacccttatatttctggacaaattaaggagacataatcccctatatttctggacggagggagtatctaatactacctccgttttaggttataagactttctagcattgtcaacattcatatagatgttaatgaatctaggcacacatatatgtatagattcattaacatatatatgaatataggtaatgctataaagtcttataatatgaaacggaggaagtacttaattaatcatgtgctaatgagtcgctccattttatgtgcttagggattagttcccaaccatgggtgccgagcaaagcctaagtgtcatttctaaaagacggttgtgtgtgaataatattcattgcaaggaatggattttactaactttagatgcctcctttaccactatatgcatgatggattcatctggactttttaaggggataaagttaaataaactatatgatattatatatgactagcattttacccgtgcgttgcaacaggaagaaattcatcttctctcgtgtaatcgggattctatgataatgccacgctgctaaattccataccgagtcgaggtctaagatgattcaacagaagtagattggattgggcataaggctgacatggcatttgatgacttcatccatctcatgcgcaactcgtcgctaggtggggctcgattcgataggtaacaaacctaattactattaactgcaagcatatgcatatattttgaatcaagcaatgatatatcttgtgtgagtagtttgggcaaagtcaggggggtcttgtatagaactgttagtctgctcagcttaattggaaacagaagattgcgatgccgtttcgatccggataggaaaagacatagaaacacagctgcggtgggcttgcacgaagcaaaacgtgcggcatgtgttggactggtgctaagagatgaggtatccataatataacgtccgaaattaaacaagtgactttcagtttcactaactcacaagcattacgaagatatacaccaaagcttttagaacaatgggtatggtgtatgagtatatataataaaaccatctgtgagcatgaaagaattacttagtttattactgaatcaaacagttggtgtcgtagtgaaagggagggagcagtctgcagcatggccaccactgaagaccacctgcggcaaacattgaggcctacatcagcggctttggcaatggtgtcattgaatcatgggccagcttgggcattgcgacggtaattttcctagacattcgtgggtatcagcggcgaggcctgagatgctggcatcgacaaaacacgacaacaatacgacgtggtggaaacaggtgaaggctaggagcgagtgatgatgtggtcttcgacgacggttggtggcggcccggaggagatcggtagtggccactaattgggaaggggagggagcacgggaagaaaggtgggaggtggaagagattaggagagggagtgcgtgcatgaatcaggggatgtgatcaagggaccgtgattaggggatccagatcgctctctcttaaaagggtgacctcgatacaaactcggtgacgacagacgaaaaatcatacggaagccttacgtatgttttaagtaggtatagatgtcatgtatcctatagatacagatctactactacgatatgtatttaatattttaatatgtgaccaaatgttatatttttgggacatgttttgatatatccaactgatatgcaactgatctatgcaatcatttaaagtatgatataatgatatatattaccgatatacaatatgtgcatatatcaatacaattaataacttatatgatctatacaagcatttaatatatgagatactactgtatcttacagatatgcaatatatgcatatatcaatgcaattaataacttataagatctatgcaagcatttaatgtatgagatactacttctccctccgtcccaaattagatggcatgtatttttcccctgttgtctcaaaacataaggcacattttcaattgttgcagcttctacccggtaatgccctctcatttacatgcatatgtgaataaatgctgatagagggcgagctgtgcatgcagccggaacgtgggcccgcaccgtgtggccgtttggattgacttatcagcttcgtaacagagcgcttcaatctctatacgagatttgcatgcttagttagttgatttgaatgcccgttcacatggatcctgctaaataggggtaaaaatagataaaactaaactgcatgcaaagtctttggtcttagcaaaataaatttcacaccctctaatttgggacggagggactactagcaaagatggatctgataccaacatgctttacatgatcatgaaagttgaaaggctgcaactttggtactccctctgtcccagattggagggcgagtattttttttccccgttgtctcaaaacataaggcgcattttcaaattttacaccttctacccgataatgccctttcatttacatgcatatgtgattaaatgccgctagagggcgagctggtgcatgtagccggaacgtgggccacaccgtgctgccgtttggattgacttatcaacagagtgcttcaatctatacaagatttgcatgcttggttagttgacttgattgcccgttcgaatggatcctattaaatagaggtaaaaatggataaaaccaaagcatgcaaagtccttggtcttagcaaaataaatttcacgccctctaatttgggacgaagggagtatatcttatagatatagtatatatcaatacaattaataacttctatgcaagcatttaatgtatgagatagtgttatatcttacaggtatgcaatatatgtatatatcaatgcaattaataatttctacacaagaatttaatgtataagatattgttatatcttacagatatacaatataatgtatgagatgcaatatcttacagatatgcaatatatgtatatatcgacgtaattaataacttctacgcaagcatttaatgtataagatattgttatatcttacaaatatgcaatataatgtatgagatgttatatcttacagatatgcaatatatgtatatatcgacgcaattaataacttctacgcaagcatctaatgtataagatactgttatatctaataaatatgcaatataatgtatgagatattattatatgttacatatatgcaatatatgtgtatatatcaatgcaattaatgacctatagatagtagcattcaatttccactatagacctcccctatttaaaacccaagcatcctaatcaaaccactcaccaccactatcaacacaactcttgcatcaccatctgagagaaaccagggagatacacacaagcaatagccatggcgagacaacaactcctaggtttgttcttggtcctcgccattatggtggcggtcgtgtggggcgaccctagcggcggctgcgaccaagaccggcaggacatgatccgggagtgcaagaagtacgaggggtggccggcggagcccaaaatcgagccgtcagaggcgtgctgcgccgtgtggcaaagggccaacatcccctgcctgtgcgccggcgtcaccaaggagaaggagaaggtgtggtgcatggagaaggtcgtctatgtcgccaagttctgcaagaagccgttccagcctggctaccagtgcggaagtaagtgaaacagatctgtagattttatcctattatttctacttgtatatatgtacatgtattggactatatgcctgatattgcttttgtatggttttgcaggctacactgttccatcgagcctagggcaataaatagtacgttgttactgatttttatttttccttgtgacagaagaagtacttctgggattagttttcatgtctcgtgacatgcacaatgtataacttctgtgatttgtgtggactgcaaaattgggaaaaactgagaattaataaaaacagaaacttcttctaattatattatctagttcgtgtatttactttcacttgtaaagtatagtagcaggccccggtccagtaatttatccaccatgcgattttgctgccagcatattctactgatgattaactaaaccatcttaagaataatcgaagtcagttattcgagaggcattgtttggctttaatccatcgctattagagagacatatggttcaatcatatgaatatatgcagcggtgtacatatatatatctttacttatacaactactagccattagccacaataggctacgtactcagcacttggtaccacgcctaaatcaaccaaatgagcaggcctcaattaaaccaacgttaagcaacacatcccaattccccgaaaacctgggtcgagcaaacattgtcaggccgcgccatctggtggtcaacaaactaaccaacacacacataaacaccggtgatcaattctcggtacaatgacaccaaagatatattatctaaaaaaaaatgacaccaaagatatatattacatccttcgtcttatattataagtcgtttgaattttttcttagtcaaatttctttaagtgcaatcgagtatataaaagattatactaatattttcaatacaaaataaacatattatcaaaaaatattttcaatgttaaatgtaatgaagctaatattgtgttgtagatgttgctactttttttataaacttaatcaaacataaagaactttgactaagaaaaaagtcaaacgccttataatataaaacggagggagtacaattaatcattactcatattaacaacatttagctataaccaaattactcatcacatacacgatcttatggatctctgtggtgagaacggacaacatgggaggggagagggatgatgatatataagtgatcgaccaaggtattgttgtgtatgctatgtatgtactatttccagaatacatctggatgttgacgtcattaaaatgaaatgtgatactgtcatagaaaatttgtttaataaaatggtcacagatggagatttcaagtgaaaccgcgtttatattataacaaaataacgttaaaagttttttttaagctcatgcagaacatctcattccatatgtatgtttactgaataagtacttctacggtggtctatactgatataattctacaaccggtattataattagtataaataatctaagtcattgatttatgagtttactaccaacagtaaaaaggtaatctacttctattacatgaggtggtagtttaaatagatataattcatttgataagaaaatatgagagttctagattaattctactatagtagggaccactgtcttaccatttccctaaattgcctatgatatgcctttgatggttgggcaaaccattttgttgttgtgactactgtgatgaactatatcatcccacacaaacatcattgatggttttctgaaagctagcctcatcattgtagcgcaacctttgagtgaggatataagagtaactatatggtggaaacactaacttagatgaaaaccggtgtaaactccaaacgaaaaatcatctaaattcactaaaagatgcctaaaggtagacaagaatatattacacgacaaatgtaaatatcttatccaaactcgctttcgtctgtgagatataaaaataaaaaaaatttgaaaaacgaagttaaatttggacatggattttttacatggttgtgtaacattaacttacctacatgtataatttattttgtgaatttagacgaaatttccattagggcttacacaaatgttcagcaaagttgagttttcactatatatttacccactgtatacctctgtcatgaaagcatgtgatttacaacaaaaggttattcaacacttttaaaatattttgattgcggtttcttttaaaaatttgaaaagaggagagatacagattgagacgcaaatcatatatttataaatttatcttaaaaaattatctgaaaataatatgttacaatgttcacggtccaataagaatttcttttttatgcatagaagtatacgcgtgtttatataagtgtttgcatatgtactatgttttaataataataataataataataataataataataatataaaatgttttcgtaagcttgaaagaaggcatttgggtgttatgcatgccggccggcccgtacgtacctgcacaatatattatgccaactactcacatcaagggtcaaagtggtgagttgtattcaaacaagcggtaatcccacgcgcattgttcgctcccctgcctgcctcccaacatgcgctccaaaaccttaaacaaattcgcactccagaagataaccagcgcgcgctgatctcgtcgtcttccttgcattggcgccgctcaactcatctccaactataaatacgcacacacaataacaccatctcacccatcggtcgagtctctcgcagctttaatctccttcaaagccaattcaattaatcagctcgatcatatcacattactgagagagggtgcaagctagctagcaacaagctgccatggctaataagctcgctgctctgctcgtctccttcgcgatgctcatggcggcggccgccggcttctacaccccgccaagcccttccacgtgcggactcaaggtcggttactaccacgacaagtgcccgcacgccgaggccatcgtcaggggcgccgtcggcgccgccatcctccgcgaccccggcgtcggcgccggcctcatccgcatgctcttccacgactgcttcgtcgaggtaaaatcatactccatccgtttttaaatatttgacgcaattgattttttaacacatatttgatcattcgtctcattaaaaacttttgtgaaatatataaaactatatatatatatatatatatatgtatatttaacaatgaatcaaattacaggaaatgaattaataattacttaaattttttaaataagataaacagttaaacatatttaaaaaatttaacggcgttaaatatttagaaactagaaagggagggagtatatataatggtgtcacgttaagtatgccaagtgtggccagtcacatgtcggaatgttactgtcatggctgcattgacacggtcttatgacttgagttgacgacatgaacgcgtgcagggatgtgatgcgtccgtgctgctcgacccgacgccggccaacccgcagccggagaagctcgccccgcccaacaaccccagcctccgcggcttcgaggtcatcgacgccgccaaaaccgccgtcgaggcggcatgcccgggcgtcgtctcctgcgccgacatcgtcgccttcgccgcgcgcgacgcctccttcttcctcagcaacagcagggtgtcgttcgacatgccgtcgggccgcctcgacgggcgctactccaacgcgtcgcgcaccctcgacttcctcccgccgcccaagttcaacctcggtcagctcgtcgccaacttcgccgccaaggggctcagcgtcgaggacatggtggtgctcgccggctcccacaccgtcggccgctcgcactgctcgtccttcgtccccgaccgcctcgccgtgccctacgacatcgacccgtcgttcgccgccacgctgaggggtcaatgcccggcgagcccgagctcaggcaacgatcccacggtggtgcaggacgttctagacgccgaacaagctggacaaccagtactacaagaacgtgctcgctcacaagggtctcttctcctccgacgtgtcgctcttatcgtcgccggccacgatgaacatggtggtgatcaacgccaacatccccgggtggtggcaggacaggttccataaggcaatggtgaagttgtccgccgtccaggtaaagaccgccggcaatggcgaggtcaggaggaactgccgggttgtgaattactagttgagagcctcagacaatcatgagcgtccaaagcgttcaccattccaagcctatctttgctctctgttaacagctgatatgctgatgcatcttgtttgtttcattccttcattattattgattttcatgtattgagtctgttgtatgagtgtagtgtgtttcaacatgaaagttaataaagtaaccatttgggaagttacatttacaactccatgtttgcttgcaggagggtgagattactgaaatttcagaatttttgaaccgaaattgcaatctctggtctcaatttccttattattatttaattaacccctctagtatttagagaggatttatttcacacctattatggtatataattattttccctcaatcccctctgatgactctcttttgggaattaatcaaagaatgtctgggttgaacttgcacaaccaggtacgcagactggggaacctgagctaaaagatgagccttggaatccttaggacccaatagcagtgaaaggaaggaatcaaggtacaccaacagtagcaaagttcccaaccacaccaacgagctgccaatagaagtgctttctgatacttagttattttgatcggcaatttcattgcgctatcttgacccaaaattaaatctttttactgtgggtactgggtagatgaactattgtataataggtggtagagtggagatattagctgtgttttggttgcaacaaaattgtgaagaatgttcagtattatgtttttattcctgttttagcaactttggctcatctaataaggtagtaaattaagtgataaaattatgccaacttccagagagctattaatatgtcctagtatttttttttatatttttccttgagctttttagtgctaagcatagttgtatgaattcacaaattcaattttatgaatgaaatcatgcatgtatgcaagaaaatccaaatacaagccaaaaacaattctagcatagaatatcaaacacctagtacttctcactacatcatttgtataactttccattacgtcattcatataactttattcctagtttatcatacgaaaattgaatttaatgtgtatttgaaatttacttaataacctgatctatttgtctaaaaaattttattataggatcatgtggctagtttacgtagtctataaagtttcgacatatttataagggacaattgatcatttgaccctattctaaagcttaactatcaattcaacctactattttaagtttgcttgtttgaccttgtgttgatgcgaattgaatttaatgtgtatttgaaatttacttaataaccttatctatttgtctaaaaaattttattataggatcatgtggctagtttacgtagtctataaagtttcgacatatttataagggacaattgatcatttgaccctattctaaagcttaactatcaattcaacctactattttaagtttgcttgtttgaccttgtgttgatgcgaaaaacaaacactggcctgagagatctgcttaactccagtgcaggtctaaaggttggtgagatgtaggcgtgccagtcagtttgatcctacaactgacaagatatgtaaacagtagatcaaacagccgatcggctgacaagccgatgtagtagttccagccgatgccaatgccagccgatagcaatagggttttgagctatcggctatatgtccaatgtatataatgatatgaaggcaatcggctgatgataatataatatagcaatataatccagtataaaccaattggctaacaatatgatagaataagcactgatccgaaggttaaagcatacatcggctgaaggtccgatgtcataaaatccaaacgattagataaatcaatgaaacctttgtcgtaatcggctaaatccaatacgtatgcaatccttgtaagccgatgcaacgtccagataactcatcggctgaaacctcgatgaagcttattggcaatcaagaagcaggctagagattatggttctaagcacgacttagtagatcaaacttaactgatgcaacactaagtatg

SEQ ID NO: 28708 - DNA, 11103 bp, Oryza sativa
atgtcataaaatccaaacgattagataaatcaatgaaacctttgtcgtaatcggctaaatccaatacgtatgcaatccttgtaagccgatgcaacgtccagataactcatcggctgaaacctcgatgaagcttattggcaatcaagaagcaggctagagattatggttctaagcacgacttagtagatcaaacttaactgatgcaacactaagtatgaaaagaagcataatatctagacaatcaagccgttgactgagttttcagggtggtagatgtctaagctaatctaatctagcaacacgatttagccgataccggcggaaaccctaaaacaagaaatagccgatagaactaaattgatatgctaagactagattaacagagacatatgataaataggtaggcaaatatacagtccaaaccagagcaatccaagaggtcgaatgtcctgatgcagccttgaacgacgccaacgtaaacgatacaattgtctgggccggcggaacgtaggacttatcccttcaccggagatcgaaagccgacgcagccccgcgtcaggtgccaaattctgccggatgataaataaaaacctcagtaaagagggtggcgatgcaccgagagtagttgtattgatcgatatattgatagattacaatgaccccgggtgtacatatttatacccatagggagatactagtccttatcggacaagaaagaaactaaagataaaaggaaaagataaagtccttattataggacactaaacacactttcctaaagataaaaggaaactaacaaactattcctaattaataggtaacttgccatgctgcattctctttgaactcggtctcttctggataagcttcccttagtagatcaaattccttaaccgaatatagtaagaatccgacaactgacgacttgataactctcatcggctaatctcaggacttcgaagccgatgctgactctaagccgatgattactccgggcttaccaaatttcactgttaaatgaaaaaaaaaatatgtatttacaagcccaaataactaaaatgtccatataacgacatttgccccttgtaaagaggtaaaattttctagtttaatttaaatttgaccatatcctcctttccaaaatatagttacttctaacattaaaattctgtgtcacaatgtgcaatttctcctcctactctcttatttcaatcaatcacaactatctactatttaattttttaacatacttcctcatctgaaccaatcataactatcccacacttaatttccccctctacataacctccgtaaaaaatccataagttattttaggacgaatgaagtatttgacaaagtcatttgtgatggtattttgttcacgagagtaggtgcttatgggacttccatttatttcttattcagtgctgattttttcataccaacattcacagaattaatgaaacattctcaaaatgtattttaacaattttaataatctatgtttccataatataatttctcagtacgttaaaggtaaagatcccatttcagggtgtgttcttgtggcaaaaccatatttttgcaatgtgttcaagcaaggcctcaatttttaatgtgatccttgtagttttacctttgaactacccaatcgaattttcctagctcagctatatattgtggcctttgtggagaaaggtcaagcttcagagtttggacttaccaaatcagcaacgtacgtaccaaccgatttatagcttgttaattgcgttgaggaagccagtataatagtcactgacactttgacaacttcaattcaactcgatttcttttctattttctgatttttcaacgacaacgactccccctactttgcaatgatatatagcgtagttgattgaggggagttaaggtagactattcggcattgacttgtccttgatcggtagctagaatataattgggattagatatcggcgctttcacttatatgtatgtgcagatatttgatcaaaaccaaccccattgacaatgcatacgcaaaatgcagcatgctccaaaacttgtcatgtcaacgccgtcgactaagctagaagaaacttttatcaaggtatataaatgtgtatgacagcacacataatatcgagccgatccatattattggacagaaactgtccactagacctaaacaatcatggtaatgctttgtccatgctaattgctgtgcactagctgtgcgttggctttttttatgttaattattttcgtttgaaaaggctagttgcttgacttgctcgtacatatttttttcgtatataaatgtcaagttacattttacttagaaaataatttggattagatggaactagggttaaaccaagtttaagaaaattgtagagtaagcggtcggttgtatagtgcactaattaagtagctgtgagaatgagatcaactcagaatttcatggaaaatttttctacatcttgctaaatggcataggcccaaataccactctcttggatagttggattttctttcccattaactcgcactaagactcttccatataccactattcacacttttatcattccatgtggcatcacttttgcaatccaacccctccccccccaaaaaaaacaaaaattgatgtagaggatgaggcaaaaagaccaaaatatccttgagaccaattgtaattaaggtgcatggtggcgtctatgttgtttcctccctggcgatggcatcgttgccaccttctttgagccagtgcccagcagggaacaccaccgacttcaactacaatccctatttgacacacgccatcatggcttgaggcccacgtccacgggcgtaaatcattgatattattcagctaccactcaagcggaactcgctgactcgcgaaagtgtgaaatcattgtcatgattaatatttgtgatgagcaattggctttacaaaatgatttaatcaacgaattggtttgaaaagatgtgtggatgttggtgtgagtgcgtgtgactaatgtgggtcaggttgtaatatctgtgcccaggaacggttgttttgtctgattgtgtgcaggtgacttgaggtcagccttggtcaatggtgaggaccgggactatgctcatggagaagcagaagtctagtacggtcaggataccatgtgagaaggtaactagagttcggattcttggaggtcaacttcagtcaacggtggggatcgggactaaactcagggaggagttgagatccagacggtcaaggataccgggtgacgaagttggatacgagatggcatacggtggatggacatcgtgtgggagagatcttcgcaacgggtttcacgaggtgtgcgtgcaacgtcggtgttcgcagaagaaaattgtggagtattatatggttgctacagtacttgaggtactgtagcggtgttactgtattgtgcatatatgtgtacactgtggcgtgtatgcgtgtatgtggatgcatgtacacgtgcatgtggctgcatgcatgtgtgttgatctgataggttggctcgaggctgtggcaagccgagtcggctcaggagaacaggaggacgtgtcgctgctgtgacggcgaggagagtccgacttgtctgtggccggtgtggctgcaggttttgggaaattgtaaaaggtatggaaattgtgtattgagtcctagtggaactagaagttctactcctactttaagtaggaggttttttggtataaatagagagggagcgtgaggcttcccggtatcgctttgagagcaattgagttgatagtttagttagggtttcgagtttaatcgagatttttgtaaggagtgctgttgttgcactttgtaaacacatagagaagcaataaagttgtcatttactttgagagttcttcgatttgtgtttcttcgggttcaggcggcaggaaggcggtctaatcggcggcgtgcgagcggttcgaccggcggcaacaggactacgtcgagatttccatcgatttgagggtaacttttatttccgctaaaagtttttgggtttttggttttccttaccattcacccccctctggtaggcttagtttcttgtgttcgatcctacagaaagttactgcttcattccccttctccatctccatatttgagcagaagtgaggggagaagtctccaacaattattagcccttagagagccgctactcctacttcagctctctgactcggctcagccaacctcgctaccaccggtggtgaagtggaggtcttccatgtcaacccgccatggcatcaccaaggttgtgcctatcaacgaggaggcacatgcatcatcggtatcccttgtgcttgggcagaggtgcttcgtcgacaatgacttatttgagcactctgtgatgatgcgatgtgatccactttctctcgaaggagcaatcgatccagaccaagggtttcctgcactgctcacccgtggcagtgggcacccatatattcgtcctccaccacattctttcgctcctacctcccccatcctgatttcttctcctgtgcatactctgacatcgagaggatgtggcagtgacgccaccatgtaccatacagctagacccaagggcatttagctcgatctttttgcctcatcctccatgtagaacaggggaagaattgtaaaagtaatgccacgtagatgattaaagggtaaatattctccatacagaagagttttagtggggaccaggtgtcaaaggaaacgaaagtccaagaaagtggtggtaattttttttcgagaaaaagtggtagtatttgggtacataacatttcagaagatggtaaataggaaattgtcccgaatttcatagagcacaatctctaccaaacccattataataatccaacatctcttcagaataattgaagtgtcaagcttgcaggtcacaataaatatgcgtttgagagacttaattggtttgactttcgtccctagacagcttaagaaaaataatccgtgttgatgcttcaaccatatgcaggtcgcatttgtgtttacgtacaacaaggtgccgctcgctccacacttacaacacacacggttccgagctgtccatgatcaagcacggtacccgtcaatttagcattccatttcattcagcacaaaacaacactttcactttgcagaaaccatctttgtcggtccaccaaaaatagtcccgatggcaataaaaaccgggactaaaaatattcccggttcaaaaggttagagctacttttttatctttagtcccggtaactaaagattatttttagtcccggttaaaaaaacggcaggcggtgtcaaacccctcctttatctttagtcccggttggtaacatctatttatagtccgggttattaaacaaccgggaaaagagattggcatgcgcggagaggacgaggcgtgcgcgcaagatcaaggaggaggacacgcatggatcagttaataagttatatctccttctactcccttacctttatctcctcttcctctcctctcctcactcaccacatctcttcctcttcctcctctggatccgccccctcccctctcctccccacttctcaggcggcctcgggcggcggcggcctcgcgcggcggatccaggaggggaggcggccgggcggcggcagtggcctcgcgcggagggccccgcccgacggaggcaggcggtggagaccagtgcggctgcacatattttttttttcttttttccttctctgtgttgaatgtgtgattcgatctgtgttgagaatgaactatgttgttgtgaatgattttgagaatgaactatgttgttgtgaatgatttgggatgaactatgttgttgtgaatgatttcagacgatgggcgtgagctatataaaatagaaaaaaaaacttagtcccgattggtgttaccaaagatatcgatctttagtcccagattcgtagtcccggttagaaaatcaggactaaagagggttatcaaccaggagtacaaaccatttctacaccagtgtttataaattttcaaactttcaaaaccttcatatcaaacctatatttaaaatggtaaaatctgatatatcatctctcaaaaacgatcacgctcgcgttcgccaaaaaaaaacgatcacgctcacgaaaacaatcaacttggcaaattcaccttaacgaaatccttgtaaaaaaatattaataatgatgtcggtccaaccggagtgttttcgtaagcctgaaaggaagcatttgaatagtttccatgcatgtatcgcctacctgcccatttaatttgatcatttttgccaacgaacacatcacaggtcaaactgctgcgttgtagtacgctatctaacaaacagaaatccaacgcgcattccgcgttcgcctgcctcccaacatgcatgcattgctctccaaactaaacaaacttgcaatccagaagccaattaaccttctccatctataaatacgcgtacacaagaacaccacttcatcacctcctcacaaagctagctagctccattgttcgatctcatctcccttagctagctactcgatcttaacagtgagcttccattactgagaagctttgtgcattcttagctactaccatggctaggctggctgctctgctcgtctccttagcgatgctcatggcggcggtgacggcagcccgggtagaaagagcgggcgccggcttctacacaccgccaagcccttccacctgcggcctcaagatcggctactaccacgacaagtgcccgcacgccgaggccatcgtcaagggcgtcgtcgccgccgccctccaccgcgaccccggcgtcggcgccggcctcatccgcatgctcttccacgactgcttcgtcgaggtacgtacgtacgtacattcatgtgtacgatatgattgctcgtttctgatcatctttgtggccgcgtgcatgacacttgacacgtctacatcgccattgccgacatgtgggtgcagggatgtgatgcctccgtgctgctcgacccgacgccggccaacccgcagccggagaagctcgccccgccaaacaaccccagcctccgcggcttcgaggtcatcgacgccgccaaggacgccgtcgaggcggcgtgcccgggcgtcgtctcctgcgccgacatcgtcgccttcgccgcgcgcgacgcctccttcttcctcagcgacagcagggtgtccttcgacattccgtcgggacgcctcgacgggcgctactccaacgcgtcgcgcgccctcgacttcctcccgccgccgaccttcaacctcggtcagctcgtcgccaacttcgccgccaaggggctcagcgtcgaggacatggtggtgctctccggcgcccacaccatcggcctctcacactgctcgtccttcgtctccgaccgcctcgccgtcgcctccgacatcgacccgtcgttcgccgctgtcctacgagcccaatgcccggcgagcccgagctcgagcaacgacccgacggtggtgcaggacgtggtgacgcccaacaagctggacaaccagtactacaagaacgtgctcgcgcacagggcgctcttcacctccgacgcgtcgctcctggcgtcgccggcgacggcaaagatggtggtggacaacgccaacatccccgggtggtgggaggacaggttcaagacggccatggtgaagatggccgccgtcgaggtgaagaccggcagcaacggcgaaatcaggagacactgccgggctgtcaattaaccaagttatcaacgttttcatgcttttatatctatatatatgctccttatcagttacatcttgttgttggattccttatacattgatttcgtgtcaaatgtcaaatgtgactttgcgagacgcctgtactatgattgtatcatgtttagttaaaaaaataataatgtttaccaagcaattacatatattgattacttcaaaaaaataacacatatattaatatttctgctctagagtgtcaatttcaacaactatatactccctacatgtatgacatcgttgactttttttatcaatgtttgaccatacgtcttatttaaattttttgtgtaaatataaaaatatttatgtcatggttgaaaaacatttgatgataaattaagtcataataaaataaataataattacataaagtttttgaataagacgaacgttagtcaaaaaaaaatcaacgatgttatacattataatacggagggagcacttctgctagatcaactagattggatgccctcaacattggagcagaatgttctgacgacagcactagattgcagaggaacaatatactacctccgtcccaaaataagtgcagccgtagatatccgtgtccaacgtttgaccgttcgtcttatttgaaaaatttgtgaaaaaaataaaaaaaaaattagtcacacataaagtactattcatgttttatcatctaataacaataaaaatactaatcataaaaaattttcaaataagacgaacgatcaaacgttgaacgtgaatagtgcaaaactgcacttatacactaataaccctactaaaccctgataacaaatataaacctttgtgcaaaagggtagatcaaattcccttaaggggatgtcccttgtttcttccatgccattcaaataattatttttttaagaagaaattgacaacatagatcaatgttgttctaaatttcctcaacaaacgatgttgttctaaatacaaggtgaaatacaatgttgttttttttttatttttttagtttttatttgcgagtttaaacttcggtatctgtcaagtgatatatatcacatattggtctatgttgcccttttttaagaaaaaaaattataactcttttaatggtacgcaagaaacaagggacatcaccttaagaaacaaaatgactttactcgccaacttactacttaacaccaccgcagttcaccgacattgaactgtggagcgagcgcggccgcgggagcgggagtggaaacagatgcttcctagctgtggtggctaatgccaagaaggccaccaccaaacccgaaattagggtaatcgtaccttgtcgccggagcgttgtgggcaatgctgggatggtgatcactaatggaagcttgagcttgagcttcagacggtgccggtgccgccatgtagctctacggccaatcgatagggaagctgggaatggcatgccgcccttcgtaggagtaacgcctaaatgcggggttgtggtgtacagaggagtaattctggttcatcatgctcgcaccgcagtagctgctgctgccactgctcccgtctgactatgtttcttgaggccatggaatggcgcctcctccaggtggaatgacgaaggtgggcaccggcggcgttgcttgtggcggtagatgcaagaacgccaacgccgtagtcaagtatgggacatccagcggtagtgtggcggccatggcttgttgcatctgcattgagtagtctgtgttgaaatttaagggtagatgatcatcgaggagtgtgagctatgtgtccatgaagacatctccttggggatggaggtgcgatggttcttctggcaacggtggcattggcaacgccggtgatctcttctcgagaaggaggtcagcattattctggttggcatttgtagattcctatggaggattgttgcctttcttcttcttcttcttcttcttcttcccctttctctccttgccgcccttcttaacaccggtggagtttttgttctgctcctccgccgatgtattaccttcattgctgccggaatcaggactaggtgctttcctcttcactgccttctcgttgttcttgccgcagttctgcttcttctgtattgtccatagggctggacgaaagcccgtgcctcgttagctcacttggcttgtgcctaactcggctcggctcggctcgactcgatatggttttgtaatgagccgagctgacattttagctcgttacacataacgagccagctcgagccggctcgcgagctgctcacgagcttaacgagctagacaaatagggagtaaaatcagactttagaaaatagcaggccataaccagtggcccatcgcccatcttggtggcatgcccagacggccagaccaaaatatagaatataaaaaaccctagaccggtcaatgcctcatcgattcctctgctctcccatcagtcgtatcctctcttcttcccgatccagatccaaagcgccgcatcgagccgccgcccgtgcgccactccctccaacccacccacgacaccgtcgagtctcccattccggcggcaagcatcgcgctccattccctccatctcgtggcgctgtgttccactccctccatcctacaacgtcgttacttgttccagcgaccagtgtcgaacttgctcgctcgatgcccatggtccatggagtagggagagcaggtagtgcttgtgccgcatgcacacgctgccacgcatccatgtatgtatgcatggatggatggaattatgttgcttgatactatgaatgtgagtttgtgaagaagtctattgcccaatttcttgtttgaatgggggacagccacatccatacgaaggatttttttttatggggcaattgtgttcttgcccttactttctatatcaattgtgattttacccctgtttttttagggtttgtggttttgcccctacttttttgaaatgaagtaaccgtctgcccttggtttcgacggtagttaggtgggcctgtaatttccgaattaaacgaaggaagaaaatggtattgtattttgtgaatgaccatagtacccttgtttcacttagggtcaaccacttgctggaagaccgatttccccaatccaaaaccgtagagcggcggcggcggcgatgcgcgagcacggactaccggcagcgccagcgcgcggcagggaggcgcggcggccccgtgggccagcttccgcggggccagcgcgcggcggagagaagcggggtcctcgcgcgcgggcagggaggcgcgacggcctcgtgcacgcgcagggaggcgcggcggcggccccgcggccagcgcgcagggagg

SEQ ID NO: 28709 - DNA, 16868 bp, Oryza sativa
  unsure (1)..(16868): unsure at all n locations
cggcgatactcctggattgtgctcgatgagtccgtggagacgcatgcagtgtgtttggctgcttgcacagtcctgctatgaattaaacaagttaggcctgcatggttgagggggctgctcctaatttcacttgtaatataaatgttgtcctgatcccgtttgtgatgaaattgcaagtgtcaaaattttgccaaaatatttgttctagttcggctccgatttaaattatttcacaaaatctcagttcaaaataattgtaagtttcatatacaaaataggggtaaaagcactactccctccgttccataatataaggcgcaactatttttttcagatgtttcataatataacgcgtgcatgcatgtatgcaattaattagtacctcttctccattaaattattgttttttaaaatccttcaccctaaagatctctaattgtattgggtgcatgcattttatttattaaggtaatacaaattaggaggtgataataattgtttcttggtgtttggattaagggtagttgtgccttatattttggaatgtagggagtagtaagcaagggtatgtatgtattttcatgtccgacttaacaccgttaaactgtccatccaaaccgggggtaaaactttccttcatttcaaaaaagcaggggcaaaaacacaaaccctaaaaaacaagggggtaaaatcacaattgaacttgaaagtagaggtaagaatgcaatagccccttattttattgtgatatgtgaatatatgatgttataagcattttttttctttgttgttgttttcgaattttatgaattttgtgttgtttttggatttttatgataatatgatttagacagaagagatgttccattgagctcatcatgtttaaagtgctgattgctaaacaaatgttttcagaatatgttcttccctgtctgctatctctgaagtgatgaaatggttgtattagcttacgagctaaacgagctagctcgagccaactcgagctagctggctcgttaacctaccgagccagagcgagccgagccgagccaagctagctcgatatccatccctaattgtccgtagcacccactcatccaactacaatgatcaaacaaagagatgttatatggtctctatcccactgtataaggtgtggtcgtacttggaatgggcgacgataaaactattcttttgacataatttagctttatcatcatattaatgatttgtagcaacaaaatagaaatcgaattcatatatcaatctaatgatattaatgttatcaaataaaatttaacttagtattagattagttgttagtcaaatatttctatttatagagttcaatcttaaaataagtgtgtgtctccttctgtggaacagaggaggcaataaaataggagagtattaaattgacatcttttcatgccaaactatttaattaaacaattgctattgaaacattgttcacaaatttatatactgtcaaaccgcgtgttctcaaaaccaatttgacatttttaaatgtacagactatttgacatttttaaatgtacagactatttttaatatattgtttgggtttgacatattagtaacagaacaaaaacttagaccggccaatttatgaaataaacaatcattttttgtggaattcaaatattttaaaatatctaaaactagacagtgattctactattgtagagtctttggtaaaacacatctctacatctagtcaccaatgagatggagatgtacttgatagtgtggtgataagaggtatgtgattttaaccataagttcatgtatatgttcaatacttaacacgctcacaatttctttttaaaatatttggaggaacgtctctccctccaaatctcgtttttatctatacaccaaaggaatccaatagacgagggtgatcaccaaccttatgggtgtttttgttctggacctcttccaaggatgcaacgctctcgtaactcgtacagtgtccagtcggtcggcttgttgtcatggttggcatagtacacgagcgtcctgacacgggcgaccacctcttcatcttcatcttcttctccggcgccggcggtgtagatgatcccgatagagccggtggccttctagctcccattgggaatccggaccggccgcgtgccaacgttgtacttcttctccctcttggtgaagaagaaccacctgccgtcgccccactccctgtactttgctgcacaattaattttcattaggaccaaagttagtttagaacaagcgaccggcaaattaactcagatcaacccagaagcaaagacatatacacacgtacctatgagaaatctggatagtccatgttatgctgctgctccatgtccgtgagatgatcggggcccatgttgtggatatagtactatgtgagatgatcggggcgttgctcgaggagattgatgaagatgggtagcaacggtggcaggccggcgatcttgtggcggaggaagtgaaggacgaggtcatcgtccgtgggctggaagtggaaagccaggggcagcttcagcgccaacttgttctgagcagagaactccatagtatctacgcatgccgacggaaagctccgatcatctgaatgaatcgggaaagattcttggatctgaagctacgaaactgactctgttccttcttcctgttgtttttatgtgtgtatagaggcagggcttgggaacgtaatggcgatagactttgagaagaaaatttggaagtagagacgcgaactgcagctgcgttgggaaaagccgcttctttttctctttgggaggagacacgttgcgggctttgcagcccaacccaaaaggctaaaatgctggcctttcaccgaaagtgagcccaaaaaaaaaatgcagcagcgaaacaatgccgactcccatcggtgcgcaccgcgcgcccccggttacctccgcaccgccgccgcgctcgccgccgtcgtccagagcctctcgacgagccccggccccggccgcggcccgggtcccagaccctccacgcgcagctactcgagtccggcctccgccccaccgacgacctcttcgttaagctcctcctcctccacctccgatgcggctcccaccacaacgcgcgcgcggtgttcgacggaatgccggcgccgacccacgccgcgcacaactacctcgccgcggggtactcccgcctgggcctccccgaggaggcgctcgggatcgtgaggcggctggcgaggtgcacggggaggctgaacgtgttcgtgctgtcgatggcgctcaagctgtccgcggcgctggcgctgccccgcgcggtgagggaggtccacgcccgcgtggtgaggtcggtcgtcgagtccgatgacgtcctcttcgcggcgctggtggacgcctacgtgaagaacgcgtcgcttcggtacgcgcggcgggtgttcgacgtaatgccggtgcggaccgtggtgtcctcgacggcgttgatcgtcgggtgtatgaacgaagggctgtacgaggacgctgaagagatattcaacacgatggacgagaaggacgtcgtggtgtacaacgccatggtcgaaggctacagcaagacggaggagacggcagagagctcgatggaggtgttcaagtcgatgcatcgggcgaggttccggccgaccgtgtcgacgttcgtgagcgttctcggcgcgtgctcgctcctgtcctcaccggagatcggcgagcaggtgcactgccaggtgatcaagagcagcctctcctccgacatcaaggccgggagcgcgctgctcgacatgtactccaagtgcggccgtgtcgacgacggccggaggatcttcgaccggatggcggagcggaacgtcatcacatggacctcgatgatcgacgggtacggcaagaacggcctctccgacgaggctctccagctgttcgagcagatgctgcggcggcacgacgacgccatccggccgaaccacgccacgttcctgagcgccctgtcggcgtgcgcgcgcgccgggctgctgtcccggggccaggaggtgttccagagcatggagcgcgagcacgcgctgaggccgcggatggagcactacgcgtgcatggtggacctgctcggcaggttcggcagcgtccgccgcgcccacgacttcatcagggggatgccggcgaggcccagctccgacgtgtgggcggcgctgctcggggcggccacgctgcacggggacgtggagacggccggcctcgccgcgagggaggtgttcgagctcagccgcgccgccgggaggcaaaggcccggcgcctacatggcgatgtcgaacacgctcgcggcggccgggaaatgggacggcgtgcgtcaggtccgggagatgatgcggcggcgaggggtactgaaagacgctgcctgcagctgggttggctccgagtgaaagttctccatccttttggatggtgtaatcatgtacattagctaaaacattctataaattttattgtctagtcttcttcctgcaagcaagcaatggcctgctcgtatgtaatattttgagcaggtcgtattcattgtttttgtcgcaaatttctaccgtttcagatgccatagatgcagaatttagctagaactttggtatattgaaattttgactggtaaaagatctcatctctataatgcatttatgcacacaaccaaaaggccggggagtatacaagcatcagacgcgggaatctactgacttcatatctaatacaccagggaataaaatatacaggcactaagaattttacagcatgtcgtagtatcttatgaccgcaattaagctactctgaagaaacgaactgaactccgcctgcatggaacttgcaagcacagtcatcatagacctctgataatttctaccgacagcagtctcctgttactaatctggaaattttgagcaggcggagcaagtcctgggatgtcgcggatgttcttgttatgtgggttgacaatctgttaaaaaaataaaatattgtgattaattgttattcaagttcaatcgtggcatagtaacaacagttagtggtatgatgcctaagaattgcaaaaacgaaatagaagtttgaactcaattggccaaaacaaaagtgccagatatgtcatttgtgtaagcagttggacaagtagcattaacaactaatcataactcggtttatagttaaaaaaatgtttcagagcattgtttcactcctaaagtagtgaaggacaaataagcaatatgctataagaatttttcatcaccaatgaaatttagttgtgtgtttgattggataatccactcataatcctcaggagatggaagtacatagaaaaaacctgaagaacataccttaacaacaataattgcaatcacaccacaaacaatcagaaaaagcaatgccataatgcatttgtcagttgcaacctgcaaggatttcaaatttcaggtactgctggacatgcaaaagcacaagcgcacgcagagggaagagagagggatgggggtacctgacggccaatctctttcaccagctggctagccttctttaacgaaaagtgaacagtatccagctcattgccaattctcttcatttgttctgtctgtaaagcaaaagagatttgttgtactagattgcatactaaacacacaagtataccagattgccaaaacaggcatgtcacaggaaaatcttgtatagtatgtaatgtagaaaaacttacttgctgtgatagcgctgaagcagtttgtgttccagtttcaatagtttgtgccacaacctacaagaaagatgtcctgtaaatttgacatgaaagaacattgacaagagtgagtgtagttcgtaaagcaaccatttttgaacggtcaatagcttgatcagtctgagtcatttgttctcttccagcatccatcagttgttggtttgtcatagctgcaagtttagacaggtgattacataagaactaacagagatatctagctttccatagtgtcattgtcagcgtgataagatcaatgagccagcaaaacccagtaataagatttttagtcttgaaataaattcttttagctcctcttcagtttttgagaaacttgtatcttgcaacctaccaggcaaaattaatcatcgtgaagcgaaaaggtatttatgaattatataacactattgccttcaaatcaaacaagataaataccatgcttcatttgcatttccatatagtggatgctgtaatgttacttaaccaaacagctcaaccatgttcgaaactaattgttttctctactttgttgttcaaaagaaaatctataatatagtctacttgtcattatagtatcaaaagttaagaaatcgatccatcacaatactttgtaatttcatatactctcaacatgattgcaagctctgcatcttatgctcagcaatcataaggcaattattacatttaagaagattattagcatggcattaaccacatttgaaaaagattcacatgattattttcacctgatgctatttggatgttgtcctcggcagcaggttcactacttccagcgcccatatcaaagagctcaaccctcttattattattacctaggctactttgatatctgcaacagatagtttgtgttagcattactagaagtaacaaaagacattacagaagaatattgcaggaggtacggatgttataaacaagagcattttttttcagtttaagaaactgggtttcctcccaatggaattggttatatataatacaacagagactaaactagaggttctgtgaaacatatttattcatcaagagaacttgctgacttacgtcttcctcaaggtgacataggaattcaactctttgatctgtacagttcataagaaacttttacatgagtatgcacagatgggctacaacaaatagcatatcaaagggaggtaccaaccatatattgctttctgtcatttagctgcttgtggacctcaggagggttgtttgactcctcatctttcaatatacgatcaaactctttgatcaaactggaaaggacgttttaaaaacagaatcagtgtatattcaacaaagcggaaactctcgtaaatccaacagattacatcttgttgtctgtttaattgtgaattaaaaataataatattaacaccgtatatcaacaaattatggtctagagggtcatacattatggaaagacttccatgctttcatttaggaataaaagaaagctgaaaggaggagcctatgaataggaaaataacaacagtataggcatcaaaaagaaaacaacaatttcgggatagcagactgaagaacgctcagcttaacctaccgcttgcactccttcatttttgctgtgagatcctccagctgtttagcttgcctacttgaatctttaatcttgtccatcttttgaaatccatttctgcaaaaagaaaaaaaataataggaaaattaaaattccctgcaagatcaagttagcaattaataaggcaggtagtacagaaatatttcaaatgtgaccaatatagattcaaacatatgtcgctatggtccaatgttatcaagagtacaattgactttggaccaactcgtactgtgcaattgttaggcatgctcataaggtcaatacgttagtgcttgaaacttgtcccttgggaaacttgtaactgtttcattggaattaaatacactcaaaataagaatggtttcatcaagaaaatatcatgtcccactgaatgcactaaagtttgttgtttcaagttccgacggtactcttatattttaaatctttagctgccatggcctcccagatgtgaatttgaatttgttgattttaagcatattgatttttggaatgtttgaccgcgcaacctataaagtgccatattaaaaaggatggagtgccctcaagattctgaaaagcagtaaggtagtatctatgtggtcacccaccttgcggaaatcatgtggcctaacaggccacttctgcagcctaactaccaactattcagttacaagttgagtactcattccttatacagccttatagagcccttttttttctttttttgaaaaaaaaagaatactgaattatacatcaggctgtcaaaaatatatgtttgtcggatactcaagcagtccaaaaagttcaatttgcaaggcgcgcatgttatcagacaatttggtatctaaatgttccgaaaacaagtcgaagtatactatcattatccaaattcatttagttaaaatcgttgaaatcgcaccggagcaaacaatctgacgatcgcttgggacagattaggcatccagttggctcaaaacaggagggagtaaagaagatagaaacaacgattgaaccagcgtgggttggcctcagcgcagagttgtgtgtgcgcatattaatagtactactagtaagtactgaacagaagagaagagtaacagtaacagtaacaggggagggagagatgtggctcactggagggcgcggaagatgtcctggacctcgccgtcgatctgctcgagctccgggctcatgggcacgtcgctcgccatggccaaaggcttcctccctcctccgagaccgccgcccccaaaccctactatagtagaactctactccagcggtgaagcaccaaccacgtagcnnnnnnnnnnnnnnnnnnnngccgcggaggggaggaaggagaagccgaacagggattggggattgggaggagaggaggagcctagggcttggctccgagtggtggcgtggcgtattagctggggtttagaatagaatccaatctgccgcaacacacaaagccaagaaacgagaggaaaggggacgggaaaaaaaaaactgaaagaaagaaagaaagcgacgcgctcaagcagcttacggttgacagcgaggactctcaagtcagataacgttgttaaacaacaagaaggtcgcaatctatcagagtgtcaggcccaactacctgctgtgctggctgcttattcttcttctgctgctgcgccaatggcatttttaggcccccattgaatcaaataaaaaaccatataaattatagaggattttatcctataagaaataatcctatagattcctttgaaacaaaggattaaaggattgttcctatgaaatgaatcttactaaagcaattttgaaggaaaataagcatgaggtttcaccatgttttcctcttcatgtgtctaagattccttcctgcgtttttcctgtgtgctaatcaaacaatagtttggagactttattgtgttttaaaatccatagtaatccaataaatatgacattttatttctatgttttttctactcctatgtttttttccaatcctgcgatttaagtgggcccttaatttttctttctttcttctactaattactccgttcctaccgttccattatatgtggtaatattttgagacggagaaaataatcttcttccgtacgaagggttttcacaaacttgcattttaggattttgcctgtctgaaacgtactaaatgactttttagccttgaatagtcagcataattaatatttttggtaacaacaacaatatcccaaatctcaaccttaccctttattttggataatgctcaaccttacccttgaaaacacaagctaaatccattaggcatggaagaaaaagaaaagaaacggttgaggcctttcacagcgctccacggtggatcggtgctacaccctgccacgcatgagtttcgctgaggtggagggggagaccgcacccacgctttgtacctcgtccccacacatagcgacgcagtacctgcccttcgacgcgagcacgcgcggctaggaggaggcgacggcgtgtgcggcggagtgggaggaggcgcggcgagaggagggcgaggcggagagacgagaggaatggctggaatcgtcgaatggatagggtcgaccctcgctctaggaggggtaggtgaggaaaatttctttgcccctcccgtgacctcgcgcattgttgggtaacgcccactgtgggcttggtactcttcatcagtgtctctatgcacataatatatgggtgcttgctctgtggggtgagtatctttgagctgtgactttgggctatgggtatgggccccatagcttgtagtgctattgccctgatatgttagggctattttggaacgtaagaatctaaaattactgaaataggaaaaaaattgtatatcttggtccattgaatcctgcggcagataaaaccataaaattactcaaaatagtagtagatgtttggaatttttgaaagaatttgaaaaaaaatgaggccagacctcatgctagaaatcctctaagggcccctttgatttgtaggaaaaatgtaggaattttggaggatttcaatcctatggaaaaaaatcctatgaaggcctttgagacaaaggattgaatcatatccaatcctttaaaattcctatggaatgggtaatcctatgcacattttggaggaaagttagcaagaggtctaaccttttggaacatttcctctgagtctatctctctcatctgattcctgcgtttttcctgtggtccaatcaaacggccattcctgtgtttttcctgtgttttgcaatcctctgttttacaattgtattcctgtcagaatcctgtgtttttcctattcctctgttttttcattcctacgattcaaaggggccctaaaatatgaagggtttttcctatcctaaggccccctttgaatcgcaggattgagaaaacgtagtaatatgaaaaacataggattttgataggaatgtaagtgtaaaacagaggattgcaaaacgcaggaaaaacacaggaatgaccgtttgattgaaccacaggaaaaacacatgaattggatgagagagatagactcaaaggaaagttagcaagaggttgaaactcttgctaaatttcctccaaaatctctataagattgtccattccataggaatttcaaaggattggataggattcaatcctttgtttcaaatggctttatagaaaattttcctatagaattaaaatcctctaaaattcctatgtttttcctccaaatcaaaggggccctaagaagttcttttgaatcaatcctacaagccaatatatcatatgtaagctggaaaaaaatctcaagaaaaaaaaggaaaggagggatagagtcgggtgtaatgggccatatcttatttttgggctcataaaagaacagtctcaccattgggcctccaatgataaacctcttctatccgttcgattccgttccgtcccggcggcagaaccgctgccactccgtcatgtttgagccggtgagggtgaaacactaaggagatgtttggatgctatactaattttaccactattgaccatacttttatgccatacttacctaagttgtggcttacaaatagtgacccgcaccttagctaacaaaataggattgtgccacactttgttgagttgatgacatatggagccataatggatgagaaggaatcttgccacaagtgtgactatgaacgaaacaatagactaacttggtaaaacttgcctaacatgaggtgcggcaacctctggagtaaaccaaacaacccctaaggtttttttttctttttgaggatgaagcagttaagtttagacgtggttatgtatgttatctatttgatagccgtcatctggtttatttctttgactataaaattcagttgtaaccccaatgatcctattaaatttgaattgttgcagttttgcatttctgctttatggccattcgacaatgaacctatgattttgaggagcttttctccgtttcagtacagccatctgaagggtgtccttgttacaggatacaaaggggccatagagcaacctgaatttcttgcacatatcgcggagctattaactgttgatacagtcgaagcaccgtggaatgatatctttggatacgtcatacgaatcaagcatcagcttagagcaccattttcgtcaaattgcagctagttaccttcatgaaaggctttcacctgcaacaaagctttgtgttgttaatttcttattgtgtttcttaatttcttcttcattggtgcacctgctatgctggacacatggcttcgacaggcttggtgtttctttgggtttttgcccagtcaaaaaaatgactctggataataccactggttagtcttgaacattttgtgggattctaatgatgaacattttgtactccgacactaaactctacaagaaggttacttgatggcaacttaattttgtttttatatttaagctattgttcatagacaaggagactctagagaatgcttttatgctcaaattgtagcatgtttacctgtctataggccagcttgaatttcttgttcgtatcgctgaaattaaaaacacccctgggctggagttatcaactgttgatacacttcaagcaatgtggaatgatgcctttggatataataaatcaaatattagctcagtgcatcaccatgctcgtcaagtcgcagcttaccttcgcaaaagacttgcacctacaataaaacttgtaatcaaatccactttctccgagaccttggatagaggaaaaccagaatgtccacagctaaagtcattctcaacccaagacgctaggcatagtttccataaactccatatcatcaagaaactagtactagaaactaatcttccaatgcaaacgccactattttatacttaaatttaatgctacttatctcacatgatgtcttggatgttatgtataaaccatgtcttattcaagacatggtttccttctctttcctcatttattcacttgctacgtcattttttattctatgtggcaacttatttaatactatggacaccatcctagtcattgggttaggaatgacctaactgcctcctcctcctgctgctgaggcaatggcccttaattttgtactacctccatcctagtttagttgtcactttgactttttctttgtaacatttgactattcgttttatttgaaaaattagtgcaaatataaaaattgataagttatacttagagtattattgataacaaagcaaatcacaaacaaaataaataataatttcatatatttttaataagagaaatgatcaaaagttaaaaaaaaactcaaagtgacaagtattttggaacggaggtagtatctgacaatgaattacctgattatttgctgatttactcaaccatggagtttcacttaatgcctgatgatatttgctttgtttgttctttgagatgtgtattgttgcattggccatataatacttgtccaatttgaactattgcaaattataataactaaaaattgtgtacaagtttaaaaatgtatacccatataattaattttaattctagcaattaatattaaactcgctaaaaccagaagttgacagttgacgctttatgttcaacttatttatataaatgttcctcttctaaatttgtacaaaagatgtactagatatgataaaatagcaataaattacagaaaatagcttaagaattatctaagctaattaattattacgtgttaaatactcaatatacacaacagttatgtcgcgcaaacaccatgcgtcttaaaaacctacatgtatttatccaaataattaacattctgatattacatataaaatataggtcatagttacgtaaatgcgtgacttaacaggctagttttcttgtgcagtttacttgatggccacttattttgttttttttaattaggctgattatttcaaaagaatgttttaagttgaaattgagtaacgagagagctatgtctcgctatgcagacctcggttgtcagccataatcacgaatagcgtcataaaaaaggaatgattagctgcaatgtcaccctcaggaaagaactttatctatctcctgttctgaaagaaatatgaaagtggagcctttttacaatgaaagcactaattttcactatttatgatcatacaagtgtttcagctagctgaggtaagtcaagggtcaatatatatatatatatatatatatatataaattttcattcggtccgtgtccccgaatcttggcaactaatggtacacacgtacgcaggcataatcaaatatagcgttcatgtgagtggccatgtgaagttatagtttggcatcaacttcttcagatgtttaacatgtatcttgtgagcctttcatacatcttcacgataaatcttcaactttgttagttatagaaaatagacaataacagactagctgattattaagcacatgaaggctgttgttaattagcagagttgtaatctgaaatcaactcctagcagtctgaaaaagatgaactgcgtgtcacactactagaaaaagttttttggcagcggccaaaaccgattttttcaggcggaggggaggcccgcctgtagcccaacgattgatgattttcgcagtcggggcaatggcaatggccccgcctgctaaaatgcgttgaaaaagcaaaaaaaaatcgcgggcgctgccgccacgcgccttgttgccgccgccctcccctggccggagccgcgccgggcgtcgtcgtcgtcgccgccgccccacgccgttgtcaccgccaccgcccccggtggcctcctccctccctcctccggccagatctgggagggaggggggaggggagccgccgccaccgcccctgccgacctgcccctccctcctccggccagatctgggagggaggtgggaggggagccgccgcagccgagccgtcgtcgccgccgccgccggtagagggagggaggggagggggcgcccagacgcatgttgaggggaggggaaagtgtttgaggaagagagagagctgagtgagggaaataagtgatggggaggggtggaggagaagataagacttataaatttttggggtaggtaccattttcgcagatgcggtttgagtggtccgcctgcgaaaatgattttcgcaggcgtcgcttaagtggtccgacagcaaacttcatcctgatttatatttttgtaggcggtcatttgactttaagggttatgtctgtctgtggaaatcagacatctacgttgagaaaaatatattttatagtagtgtcaggctgtcagcaacccatgaaatggttaacaaaaggctaagtaatgcgactcgacctaccagaccccaaagtaggttcgtaactcatcagtatactagttagcatctccacgagtatacttgattagcataagataaacaaacctgactgaaatcgagagtcttattaaaaagtactgactgaaatcaacttgtatttttgctcctgctctttataccaacagcgtcacacctcacacgcaaatttacacaaaatttgacaatcgaaggccaattcgaatactcctatctctgaccaaacgcacatcttaaatttggtcacaacagacaactacaactcctttatatatatacaagtccaatgcaaaagatccatgtagttaagctgcgtaagtagagtgctcattccgtctcataatacaagagattgcactgtttaaccactcgttttatttaaaaaattttagaattattatttatttttttacttactttattatccaaagtattttaagcacaattttttgttttttatatttgcataattttttttaaataagacgagcgatcaaagagtacaaataaaaaatcaaaatcccttaaatcatgggacggagggagcatatgttaagctggtaatgatctgatcaaaaaaatctatgcgtcgtcaaaattgatcgaatcgagagttcgtttgcaaaggcgacaggaagatacacacgctttgatgcatgcatgtccgtgtaaagatggtgttcttttttttttttatgacacgacacggacaagtgacgtggcgatcccttgtccccaccgatgggggaaaacaagcagctgcatccaccgttttggaccggctggggccggccaagtcgatccggcgtggcccatccatccgtccgagtcatcccgcaaaatccatcccccaacaagtggcagatggtgtgcatgcatcttcactcacacactctctacaaatgtctacatcgtcgatcaacttaaagtgaaacaaaattaccggagcatttatatgtgcttaattatggcatgtgctcggaagataaggttaggaatttcttcttcaatacataaagtggggtagctaattagcacatatttaattaagaatagttacgaaatgaatcaatacgattttaaattacttttctaacttctttttcttttacaaaacacactgtttagtttcctacaatcacacgatccagcagccacagagccagacatcatggagattatcccaaagacccacgcacgattcgccacgtcgacggtgaccccacctgtcagagacaccggcgccccccgctagattccttcctcaaacgtcccgtcgcggcggcatcgcataccacggggaccacgcgcaccccctactgtagtctgtaccctacgccatcccaggaatccgcgccctgggccccaccaccctccccccgctgacgaggtggggcccaccgccaccgcgctcttctagtagcccaaagctcctcccccgctgctgcttcttccacgcgctcacgcggctcccgttttcgcggctgcgttttctcgctttcgccgcagctcctcccttcgtcgtccgtacgacgccggccggccgatgcgccgccggtccaggggcgccgcggggtggtgctgttgtcggtagggagggagtgggggtgggtgg

SEQ ID NO: 28710 - DNA, 12744 bp, Oryza sativa
cggtacatgatggagttcggggcgcgccccacggagaggaacctgctgcggtcggcgcagttcctgcgcagggagctccccatccgcatcgcccgccgcgcgctcgacctcgactccctccccttcggcctctccaccaagcccgccatcctcaaggtgaccacccccctcctctcttttctttccccaccagagaggatgagaggaggatgaggagtgctccaccgctttgcgtttctctctagatttgggccaaccagtgcctcgacttttcgggaagattttttttttttgctctccttttggagaaatccgatttgggactgggattttctatgaagttcttttttttcccatttgctaaaagtagtagtactagctttctagtaggagtattggttaatctactgggatgtttatttgcgaccatttttaaaaataaaaactgttctgttaggatttagtgatatgttcttccaactcgattgttaaaattttaataaattatcaccccgctccattcctctttttggtgagttttttttggaggaggaacgggagagatggccagtgttgagacggcctcatttgttggggaataacaaattaaattggtccttctaaattatagtagtatctgttttttttacggaaaaccaaattttatctgttgtgttgctttcgtttaattacgcagatttttgtgagtggtgaccgtcaattctcgactaacactgtagagtagtttaaatgtcacactctttcatatcattcgcttgaaataacatcaccgaaatcttcttgttcaatcccagccagcttttcaaattttgctaaattttccatttgtttggtcgtttcagttcttcggaagtagtgtagcacagctgtgttttaggactagaggaatttgttaggttccttctcgccaacttgcttaaatcgctagtgtctttttttaaaagacgcattgactcctcgaaattatcagctcggccaatctaaaggccctgaacttgtcaaattgtaaattttctaggaggatttgcaaagttgagtcattatgttcttgccagggaaagatccatttgcaggactaacttttggtctttctccactgtgaaggtgagagattggtatttggactcattccgcgacttacggtgcttcccggaggtgaggaaccgggatgatgagcttgcattcaccgagatgatcaagatgattcgagtgcggcacaacaatgtggtgcccaccatggcgttgggtgtgcggcagctgaagaaagacctgggtggcacaaaggcctttccccctggcattgatgagatccatcagttcctcgaccgcttctacatgtcaaggattgggatccgcatgctgataggttagcagattccgcatgaagtatttattaaatgatgatggaaatggaatctatctactaatataatggccttacttttaggccattgatattccttggcccttgcctgctggataaaactggctaaaagccttgtcagcacttaacaatctggaaaatatagtttttctttgcacatgaatattttatttattttggtataacatgttggctatattagagcagcaatagctgtaatgtccaatcaggatgtctttttcctcagaatgtggtgattagaggatactcaatcatatcgttctagcttcttgtccagaaactaaagttaccacagagcagctatcaaccatttacggttacatgtcaataagaataatccttttttactttatttatgaatggaagaaattgtttttctttttttgatgtgaaagtgatgctaacataacaaataagtgacaattgctactgcacttttttttactgagttgtactaacttgcttgatttcagggcagcatgttgctttgcatgagcctgatccagaacctggtgttattggactcataagcaaaagattatcccccatgctggtggctcaacatgctactgaagatgcacgtgctatttgcatgagggaatatggatcagcccctgatgtgaacatatatggagacccagatttcacatttccgtaaatccctgatttaaatacttgctacatgtttttgtttaatttgatttaatagcacttcattgttagttcttctttgctattagaaatatttgttggccacctagtttctgttgtcatttaaatcttccatgacttctacgcaattgtcaactaagctgctctgcttactagtccatgcacaaatcacattttttggccttatttctgtttgtcagaaaccactctagctgaacaacctctatactgaattttaatcagaatatggctgaaggacaggaagtattaaaacagttgtcctgaactgctttgccttcttgatttcagatatgttaaactacatctacaactgatgatgtttgaattggtgaagaattccctccgtgcagtacaggaacgatatatgaactctgataagcatgcgcctcctgttagaatcatagtcgctgatggagcagaggacgtaacaatcaaggtatgactccttccccaagaattatgctgactttgaagtgttttctggactcaaatcatgctagcagatatcagttttcgcaatttttattgatgtgtaaacaatacacagtagtgattagaaattctgagctatttttaaatatggttttgagtttatttaaatagtatggtggtcactttggtcttgcagtttctgtttaaagaaagactggtgttgcaatagcatagcaagttctgctgcattttctaaagtgatcgttattctgtgctgatagtaataaggtcattactgttacagaaaattgggtcagtttttatgtgaaagcatcacccatttctccctttatttttcatgttcttctctctttcctagtttctccgcgtatgatagctttgttgtgactttttatatagatagttcttatgtatatgagattacaaaaagatattacgggtttatctatctttgatagtttaattatttgcagttacccaatgtatttattataggtacgcctatttcagttagaacctttttggtgcagattagtgatgaaggtggtggaatacccagaagtggtctctcgagaattttcacatatctctacagcacagcagaaaacccacctgatctggatggccgtaacgaaggagtgaccatggccgggtacggctatgggatcccgattagccgtctttatgctcgatattttggcggggacctgcagatcatttctatggaaggatatggtatgtccacagttcactttctatgtcctgtgaattgaagctcttcttttttatatggtaaagaagagtaatggccaaaagcccaaaacccttgggatttggaggctttcatctaccatgcgttctctctctataatcttcataaactgctgtgagaacttaccactcatgaaacatgatgcagatgttatactatcatcataattttgcataaacaagacagtttcatcatctaattgactgtcattacctcttttgtgtaggaaccgatgcttacctccacctatcacggctaggagattcggaggagcccttgcattaggagatctggaggaggaaaccctttgcctcagttctgataccactgctgtaattaggatgctattgcttttaccattgctgtgctggtatgcaaatacatagttcccaaggccagccagctctatgtgcttccagtttgctggagcgtgatcataattcagatttcagaatcccctctggttcacattgccattagaactcgttatccctcgccctcggtggctgcctgaaaaatgtgatgtacagttgtccgttttcggagttctgcatggggagtatcttttttttcagagttctgcttctgcgatttgggtaagcaaggatattgttagaaaaaaggaatttcttgttttgctcagataaaaaaaaatcgggggctgctagctcccaagtaaagtaacagcctgacatcttcggaccttaccttcctatcgcggcagccggtagccatgtgttcggcagtgaatgtttctactacggcaaattttgctacaggacatcgcgactttgtggttttagctgtaggacactgcacgtagtcacttttagaaaaagacactcaaaatgtggttatttgccaagggacaaaatgtggttatattttgtttatgcaataaaatattaatttctggttcaatagaagagataaacagtgtaaaaggtcaaaaatgccctcgggcccacttgtcatattcttcccccaccccaaacctccctccttgcctcctttacccccaccggcgacaacatccttaccccacccacggccacgagcaacgagctcggcactgggatgggcggccaacttggcgcagggggaggcggcgtgcgccgacagcgcccacggcggcggcctcgccgtagctttgccacgaatcgaactcacggggtcgagatgaagaagcggaagaggcgcggcagtggcacctccgccgactttgaccggagcgtcttcctcatcctgctcgccaccgccgccgtcggacagcgctaaccagtgaccccgagcagcctccgccaccgcttgtcgccgtcccaccgccccaagctgcgtccgccccccggcgctgtccaacgccctcctcagcgccgcccaccgccgccgcatcacgcgacgccctcgtcggcaccgcccgtccccgcgcgccaccgcccacgcccgtcaccatcccgccgcccgccgctgctgcatcacgcgacgccctcgtcggcgccgcccgtccccgcgcgccgccgtcttccgcgtgtgcctgcgcgccgccgccgcccacgcccgtcgccatcccgccgcatcacacgacgcccttgtcggcgccgtccgtccccgcgcgcccccgcccacgcctgtccccacgcgccgccgtcttccgcgtgtgcccgcgcgccgccgcccatcgcccacgcgccgccgcccacgcccgtccccacgcgccgctgcaacgcctcagtagcgacctcgctgttaaaggaggaagagaaagagagaagagggcaatttggtcatgccacttaaaaaagtaggcccctttctcgcttagtcagcacaaaaatattaatttaatgaatggagtgtcccctggcaaataaccacattttgagagtgtctttccccaaaagtgactccatccggtgttccacagctaaaaccaaaaagtccccatgccctgtagcaaaatttgccctactacttatcgttatctgtactcacgctttcaagctagtattaagagcaggtacaatagcagattattagccagctataaacatattttaatgagataaaagatgagagagaagagtaacaggctacagatttatagccagctgcaccgcggactccaagaggcaatgtgtgtataacaggtgggaccatgtattaatagtatagtaagcaactattgtatgaattggctatagatgaattggagctagtagtgggctatactattaaacttgctctaagggggtgtttaggtgcatgggtgtaaagttttggcgtgtcacatcgaatatacggatacacatttgaagtattaaatatagactaataacaaaacaaattacaggttccgtctgtaaactacgagacaaatttactaatcctaattaatccgacattagcaaatgtttactgtaacaacacattgtcaaatcatgtagcaattaggtttaaaagattcgtctcgcaatttatacgcaatttgtgtgattagtttttttcatttatatttaatactctatgaatgtgttcaaacatttgatgtgacatggtgaaaaattttgccagaggatctaaacatgccctaaacaaaaattatataggaaagttgtttaaaacaatcatattaattcatttctagaggtctttttatctgaagttacttaaccatgtgtcaatctgtcgctctattttatgtgtacgaagggttagtttccaatccatactgaagaacacagttatggatgcatttttagtcaaagcatatgtatcctttgttggcacactgacaacatgcatgcgctctaaaataccagcgtaggtcaagagttacacatggactctatccaatagcattatcacggttttatgtccaaccattattctagtagaatacatatattcaacacgaactatctccttagatcgtctataaaaaccgcctattcataattgtaactgtactcaaatttgatgaataaatttccactacatatctctcatgtaatacaatgaatttactataattaagttttatcacttatttattgtcggtagcacaatgtcaaagttttcggttactgatcattcaaacagtacaacagttgtattaatgttacactattcaaatctcccgccatgagtcaagtagtggatgagtaaatgacaacgtcaagcctgaacaacaaagagtattccttcttcgccagcaacattttacaagtattttcgttctacaacaacagatatactgagcctgggtacgcaaccacttgattagcacggaagccggccctgtcactgaagccgccaagttaccttgacacaactcatataggtgaagatcagtaaaacactagaacatagcagtgggcctgtttagaagaatttaagattctaaaagtaattggttggtaaccagtttttaagaatttaaaaaagctgagtttcccagcttctgactactagtttattttatggattctacaactacaccaataaaaaagtcacaacaaagctatcatacacgaagaaactaggagagagagaagaacatgaaacataaagggagaaatgggtgatgatttcacataaaaactacagcttctagaagttaaacggtttagtgagcatctaattatagaagaagctgcggtaactagaaactcccccggacagaccctgtgtctttgcgtagccgtgcccttatcgatttcttagtggggaagagttgatatgatccattcatcttccatcggacggcctacatcgactacagtacaggctcacctgtctccgactccgattccttctccgcggcggacagcgccggcgcaccaataaaaagaggccccacccggctggacgacgccttccggttttcccctcccccgcctgtctccggcgccggcgaaaccctaaccccggcagccacggcttgccacccgaggcaatgggggatcgcgcggcggcggcggcggaggcgaagacgtcggtgtggtgggacatcgacaggtgcggggttcccccgggctgccgcgacccgcaccgcgtcgcccacggcgtcatcgctgcgctcgccgccgcggggtgcgcgggccccgtctcgatcttcgcctacggcgacgccgcccgcgttgccccgacagtcctggccgccctctcctccaccggcatctccctcaaccacgtccccgccggtatgaatgctctctttccgtcaaatatagcagcatctgcacttgctcactgcgcgctactggtgtgaaatccgcatcatatttagaaggctattgatttttccacctccaataatttgcaggagctaaggatggaaccgacaagaagatgctcgtcgacatgctcttctgggcattcgacaacccgccgccgggcaattacttgcttatttcgggcgatcaggacttctccgacctgcttcacaggctcaggatgaagcgatacggtatcttgctggcgcagccctcaaatgtgtcatctcgagtgcttgctgcggcggcgaggactgtctggtcttgggaaaaacttgtggctggagagtctctgttggtagagtccacacatacgcatggattgccggattgcaatcctaaattaaatagcttggatgtatcgaagtgctcgcagaataagagcttggatgcgtcgaagtgttcgcagaataagagcttggatggatcgaagtgctcgcagagtaagagcttggatggatcgaagtgctcgaatagtaaagttcatgctgtgtgtggtaacggtgacagtaatgtgaaggcatgtgatcggtataaggtgaagcctcttcaaaagtatgtaaagaagactaatgcagtatcgagttccacaaataaccaaggtcaagtagtcgtggtcgatggattttctgatgattctgcaggaagcactggtagtgagcaagataagagttctgtttcgtcatcgtcatcaagttctgaatcattggaggtcgatctcccaagtctgctaggaactcctcctttggctgacctcccaagtctgctaggaactcctcctttggcacagtcatcagctcaggagcctgtggtgtctactagttctcaacaagttggaccattgaacatgacaggtaagaaacctagcacatcagtcaaatttgtaccaagaaagggaactgttgatcttggtctcagtaaacatcatcaccaaatgtttatgcaatcacaatcgtctgaagtaaagagtaagcttcattctgagtatgatatagctgaaaagaatgcaaagaagggtaaccaaagcaagtcaaatccaattcaaaggtatgtaaagaagacaaatattacatctagtcctgctagcaatcagcttgattcagatggaatgcctgagtgttccacggggaacactccaagtaaattgaatcagttgcctgtcttaccaccaccaaactctgaatcactggaggaaacaaaggtggatcactcgagatcgctaggtatttttaccttgccccagtcatcatctcaagcaccagtgctgtctactcatttgcataaagtggaagaaccacatgaactgattgttggcaagcagccctcttgcacatcaactgagctcgcatcaagagatggaaccaatgattctcgtgttagtattggacattatcattcaacctctatgcaatcccaatcttctctggcacaacatacgcttcattgtaactataatatgggtgataaggttggcaaggcaaaggcaagaaatcagcataaggtgacacagcgtcaacaatatataaagaaggcaaatattgtatctagttctgcacacaatgaaatagatttggttaaaggattttctggtaattctaaaggaagcatcttgagcaatccaagtaaatctgtgttaacatcgtcaatttctgaatctctggaggaggcaaaagcgaattgttcaactccgctgaaaaatcctcccttctccctgtcatcagttaataaacctgtcacacctactgatttgcagcacctgggatcagagttcatctttggtagtaatcatagcttatcaactgaatgcatgccaaaagatgggattttttattttggtgacattaatggtcagaatagtccagcatgtcagcaagcccattcttctcttttgccagaaatacataaatcaattcctcctagtgcagctggccattctaactcagtaaattcagatgttggcagctcatacccaacatcaactgggtttaatggtgttccttctgctcaaatacaaacatcgccaagcggcttaacctttcaaaacatgcttgatatttgctctgatttcagtagattgactatttctgagtgccctccaggaacaagtgagaaaaggccaccttttcaaggtattccttctaactatactgcttttggtatgccaaatacttctggacatcttagagttcctcatgagatcggatccactttccatcctggttctgtcgtcagcttccatccgagtcactctagtgctcgtcagtgtgcccgatctccttcctgcaacatgcaaaacactggcgatcatggagagacggaaggctctccaccaagttcttctgagcctgaagttactataagaaatatattacatgctttgcacatactgaaggctgagaagatattcccaacggaatcaaatattgcagactgtatacgttacagcgagatgaatatatcaggttttgatgttaagaaggctcttgagcttgccattcgacatcaagccgttatcatgaagaagttagtaaatgacatgccattgtttgttgcgaaagatgaaagcatttggaaatgcgtcaatgtgacaaatagcaatgcaaagcattcgaaggagacactagatgcggttcataagtacatatcatccactgatggttggtcagcaatgaagaattctcagtcaaggtgaggctttttaaaatccattcattcttttttgtgttgatcatttcatcttctgttctttgacacgccattacatgttctccctttattggtaggtaccaagctgcgactattttaaagaaatcgtgcttgcagcaacatgcccttggtgatgtcctccagattttgcaaattataattgtaaggaagaaatggcttttgcctcattcttcaggttggcagccgttgtccataaacacaacagtagttgatgcaactgctgtcgctgttggagaagctagatcttgattatgttctctgctgatgttggagggatgttttggtgcgctggtgaatggcgactacaaaatatcttcagcatctgcgttggtctgaaggttatctgaatgccgcaataatagtcaatctaaattctacggtaagcagttgggcggcaccagaagctgtcaagactttactagtcccttatgggaagattatgccccagatcaatggactgtgaagatgctggttttgcagcaattcagctatcaaattggttctatgtcatcagcaagatacacagtacaagagagagcttgtctctcttcctagttgtgtaggattaactcctagttgtatagaatttcctcctagttgtatagaagtgcctgggggcttagaagacgattggaaaaggcttatctgttactacgtggttgcagaactacattactgccctgatcttcagtgatgtggcagcccttggattagcaaaactccagtggttctattcccaggaactggtgccctcttagcttgatggtaagcatctgaaacgcacccagagcagctgcaaagactgcgaccgcaaagaagccagatcggtaacttgggtggatgtttcagttctcatcttgctttcacttctcttttgatgagtcctgtcatgtggtactaggtgttgggtgtgcaacttgtcatatggtgttgcaactgttcaaatgtacttcaccttttttttcgtcagtttctcgcataaataatgtcagtatccggggctttgtttggtgctttttgtgttctgatcgatgcaactctctgtaactgtactcctttctgtctgtagcaatcactattctctctacacatcacatcatcatcatatcataattcacagaggcatttcaagatgttccattccatgtgcagtgcagcactaactgatgaggaccaggcaactaattaaattttgcacaaaacagaaaagctttttgatgattctgataactcaattatttattcatactactaattcttatgtgacagaagcagagaatgtgagggagactgatgaatatttagcgacctgaatcagaatcacacaaggaataatcataataatacccctactgtcccaacccctcctgctaatcctatctgcaaaacaaacaccttcatcttccttccctgtcaggctaagcgacaatgtactatgaggtgctgacgtcactgcgtcgccggcggcgtggacttgagctcctccagcgccgtcctcacctggtcctgcagcaggtcgatgcgccggaggtacacctccagctccaggatccgctgctgcctccacctctcccctttcatcgggatccccggcgccggcggctccagcgacggcggcgccatcccggcggtgagcatggcgcgcaccatctccttgaacagcggcgccaggatgccgccctacgcgttcgccgccgacgacgccgccggcgaggcgggatccacgccgtggacgtgcgcggtggcggtgaccgccgcgccctgcgggaagaagtgcgggagcgcgtcctccgccttgacgggcgccggcgcgggagccggtgggtaaggctgcggcggctcggatgcgtctgcggcggtggcggtggcggcggcggcggcggccgtgcgcctgcggcggccgcggcgctgctgcgctcttgtggaggaaggggacctgacctccccgttggccggggcaggaacggcgacggcggcggcggcgttcgggagcgcgtcgtcgtcggagtcggcgtcgcggccgtgcttgtcggaggtggggcgccagatgccgcgggcgatctcgaagatggcctgctcgtgcggcgagcggaaggagaaggactggccggtggcgcggaggcggtcgacgcagttgcggtacttgcgcttgaggcggcggagcttctcgacgagcctggctcttggagaagtcgagctggaggcgccgccgcatgtcctcgtagaacgggtccgtgtcgtactggtgcgacgcgaacgccgtcccgcgctgcgccgtgaactccgcgaacgctcgcaggatcacgatctggtccttctccgtccacagccgctggaacagcggccgtcgctccccgcccgaccccgaccccgcgccaccgtcggcggccggacccgcc

SEQ ID NO: 28711 - DNA, 15346 bp, Oryza sativa
  unsure (1)..(15346): unsure at all n locations
tttgggttgttccgtgctttcacgtgaccaagaaagacgcacccaagggggggaaaaatcgtaggcacctggtcatgttctcatcggaatgatctccaccctccacgtcacatagcacaaatcttggagcaaacttccctaaaattaggtgtttgtttagggttttcaaaaacttggttttgatttgttctgctgtgggctcaatcaaaactatgatgttcagccaaaacaaaattttggttcatatccatattcgtagtattaagatgtattgtgtttgtttcttagtgatacagagagtagtacctactatttaaaatttttatgaaatgcacaaatttttcaggattttcacatgaacaagttcaattccttcattctaaaggatgccttatcttatactattacactcacacaaatttaaacttttatgagaacactatcttttcaactctatattttctatattgagaccaaaccaattctagaacctccaaaatgacttggcattatcaaaatatttgatagatcatcgaccatgaagcctcaaaaagacttcaaccttgtcaccaaaacctttttacagtcccatcctagatcctaaatatatctatgtccttgttcactcattggctccccagggcatatgggctttatttttaccaacaaacgctatacatataaaattatgttgtattcatataaaaaggtattggagaaacaatctattaactaaattggtatttcaattactcaaactagaaaggaaataagtcaaccgtcatttgcctatgttgacacatcgatgtgggaggccatgtgcgaggcaacatcttttgggcatcaatgtaaggtggtgtatcaacattgtaagcaaggagcggtgatatgagattagcggcgccgatttcgcaaagtgttgttagtgacttcggcgtgcacgtgagtgagatagcattggcagttggatacttagtcaacaactatgatttgagggctgagtcaccgaggcgcagtaggagataaaagtttgtgattgtggagaaggagtagagatgccaacgacggtaatagtatgttgatatagaaggattggataaaaggactaaagagaggaagatgcaagtagcggcaccgaatcttatataccgaattcaaggttggaaatcaggcatatgattggaccacgtggcatcttgagaatttgggttcagctcctctaaaaatatgccacgtgtcccatcgtcaccctcatccacctcttcttctcccctcccctcctatccggtgccttgcccactcccccgacgcttgcacgcactgctgcctcctccctcctcgggttctcctcactgcttgcttgtcattgtttctccgttccctcctctcatttctctgtaccaccatcgattattccttcctatctctagcgttgtcccaaaacccccctccctctgcccatgtcgccttcctcaccccctgtcctcctcacccttgtaatcgcccccatgctccccacccgcgcccaccaaggaggtctaccccatgccaccaacccattctccaaagccgagcccaaccgatgctcctccagcggcggttgtaacgacgccgagcgcagtttgtactgctcccgcttgggagaggacgagactgggagctgcactgcgaggacggtggtagggagcaccaagatcggaatgatgggaaggagaaagagaacaaaaggaggagagggagaggagcagccgcgttcacaccttctacccaagctcctcctcctcctccttgccaccattggcatccgccccgccgcaccggtcgtagatgcacggccacctcccgaacaccgtatctccggtgccgctgctccgtgctgtgagcctctacagtgaggcttgggcgggcaagggattcctccataccatctgcttccaccagtgccgatccaccaccagatccatacgctaccacctgtccacctcgacatggaggcattgtagtttatttgaagcagtcgcatgtagcaaggcatggcactggacatatttatataagataataacaaatatggatattaggacctccaaaccaattctcgaatctccaaaatgacttggcattatcaaatatttgatagatcaatcccgaagcctttaaaaagactgcaaccttgccaccaaaacccatttttagtcccatcctagatactacctctgtccctaaatatttgacgccgttgactttttagcacatgtttgaccgttcgtcttattcaaaaacttttgtgaaatatctacccctatatgtatatataaaagatatttaacaatgaatcaaatgataggaaaagaattaataattacttaattttttttgaataagacgaacggtcaaacatgtttaaaaaagtcaacggcgtcaaatatttagggacgtagggagtatatccttgttcactcattgggccctgaggacatatgggcttttatttttacaacaaactctatatgtacatataaagtttgttgtaaaaattcagtactaaccatataaaaaggtattggagaaacaatatattaactaagttgacatttcaattactcaaactagaaaggaaataagtcaaaagccctttgcctatgttgacacatcaatatgggaggccatgtgcgaggcaacatcttttgggggcatcaatgtaaggtaatgtatcaatattgtaagcaaggagtggtgctatgaaattagcaacgtcgattttgaaaaggtgttgttagcagcttcggtgtggatgtgggtgagatggtattggcagttggataatgagtcaacggttataatttgggggcagagtcaccgaggcacggtaggagacaaaagtttacgatgatggcgaaggagtagagatacccgatgatggtaatagtatgtagatatagaaggattagataaaaggactagggagagggagctgagagtagcggcactcaatagtgcagtgaagttggggtgtagtggactagtttgtgaattttttctatataaactattctttggtcttatagtgagtaacttacaaaactcaaaactagttaacggaaacgttgattgctctgcctgtccttgaccattctgctagaagctctgcgacaaataaatttcgcaaatctaaggtgctagtaggtgaatgtgtagcggaaagtttgaatatatggacctgtttggtacggctctaacagttgaatctagagtggagttgtggagttgagttgaaaccgtttggttaggctccaactctataagagatgaattggagttggagctatgtcaaacaagtcctatgtttgatgcaaattttatgttttgggaaaacaaagatataattaacatgtttcaaatttgcacagagcatgcattttctttggttataataagttgcatttcactgttgcagactagcagatagtagaaaacaaatgcgcaaaagcatacatttcactgtttcaaaaggttcctttcaggtctggtgcatcggcatcagtctctcggtgcataacacgccttgccatgctaagtgtcgagcaaccatatattaggcatgcattgccaatccaattcccacaattaagtgttcttaactcacaaactaaccacacttttttaccggagattatgatacagcagagtagccgatcgaagtttcgaaccaatgcccacagttcatcactattcccttctccatgaacacacgacctgcagcagcaagccagcacacacgttgctgccccaactccaactctgcaacaagaaacaactcacgctgtcactcacgcacgcatatcttccaaacaaagcaagcgaaaacctgcagccctctcttcacctccgcatgacatgcccaagcaagcaagcgtttgctcaccacaaaaaaatgagatggccgatcgagcaatgcagagcacgccccgatctagtaatcttagtcccagcttaaagcatgcaaaaagcccttgagatttcgatcggtatccacatcaccccaggacaagagtgcaagcaaaccaaccccagaaaaaccccaaaattaatccttccaagcaaccctctcaattactccccggacatcacctctaatccaaatagagtaatataattaaccccgcaaatatatattctcatgcaccaagcaaccacacgtacacctatataaatcatcacactcccagcattcaatctactcacacacacacgcaccaagaaagccaagaaccgatcagctttggtgttcgatcgatcaagacgaggcggcggcggggctgatcgagatggcggcgccgccggcgaggtcggtgagcgtggcggacagggcgctgcgaggggtggcggacctgatcaagctgctgccgagcggcacggtgttcctcttccagtttctcagcccgctcgtcaccaacaacggccactgcgccgncgcctacagcagggtcctcagcgccgccctcctcgcgctctgcggcgccttatgcgccttctcctccttcaccgacagctacgtcggctccgacggccgcgtctactacggcgtcgtcaccgccagggggctccgcacgttcgccgccgacccggacgccgccgcgcgggacctgtccgggtacaggctccgcgccggggacttagtccacgccgcgctctcgctcctcgttttcgccaccatcgccctcctcgacgccgacaccgtggcgtgcctctacccggcgctcgaggtcagcgagcgcaccatgatggccgtgctcccacccgtcgtcggcggcgtcgccagctacgccttcatggtgttccccaacaaccgccatggcatcggctaccagcccacccgcgccaccgaggacttcgagcacaagcactagatcgtcgtcgacgacgacgactaaattattaattaatttgggtgttttaattaattgatttcgaattcatcaaatcttaatttaaacattttatgtgtgtgcgtgcgtgcgtgcgtgcgtgtgttttgcaatgtcagggtttggtcctttggatttggagactcgagtcaaagtgtgaagtggctctgtgtacatgtgtgttcgattgtttttcatgtaatttgatactaggagctaccgctgaacataataaagtctacaattgtactgtttttttttaaaaaaaaattcactgtgcttcaacagaaaatttcgtatttgcttgtaaattgtggcaactcgatcgtgaggtttgcttctactcaacagcctgaaattctaatagctctcatctgtcgccgtcgattcgtgaccactgccgacccatctcgacctaattacgtactctatttagcacacatgactcttgtctttgtgttcatctttctcgctctacttatatatacatatacatatacataaacatatacatattttgttctgcttttgtagttttgtgcatgatattatttcgttcgtgttcgttgctgccacgccacaaccattccgatgtattgccgatacataataacaatcttttcaaaacctgagacatctcaaaaccttaatggcttgtttggcaacttgagggaaggggattgggagtttatacgagggaattgacggtgagattaagatgggaatttgatttttcatcccagtctcttgtttggtagaggtggtggaaattgataggaagtttagttggagattaagtcattaatgaaaacggatggctgagatttgtttagacgaagtaaaggaggaattccctcccaattaccaccccctacccaggtattgaaaaggagggagttcattctcaattccctatccccatcccaccaaaattcacatatctcccaaccaaacaaaacagttaatagcctcatccctctaaactcccaatcccttctaaaaacttcccccaaccaaacgggctgtaaatccttttcacacattcggaatatgacaacccagtttccaattcgaagtttttaaaaaatcttctcaaacaaactcaaacatattgggttgttacgttgggccccggcccacagaaaaagcccagtaggcggggcccagctccagcccacaatacctcgccactaaaccctctttcccctctaaaaccctccttctttctcctcccccttccgccgcgccattcgcctcccgcgaaaaccctagccgccgccgccgccgccgctggccaaaatgtccacgccaccggcgggcggcggcggcttcccggccaccgaccaaggcaagaccaagtcgaagaagaagagcaagaagcatcaggaggacacctcctcctccctggccgtcgccgcggcgtccgtggatgaggcggcggaggccaaggccgacggctacctgatcaagccgcagtcggtggcgccgccgctggacacgtcggcgtggccgctcctcctcaagaactacgaccgcctcaacgtccgcaccggccactacaccccgctccccgccggccactccccgctcaagcggcccatcgccgagtacctccgctacggcgtcatcaacctcgacaagccgtcgaacccttcctcgcacgaggtcgtcgcctggatcaagcgcctcctccgcgtcgagaagaccggccacagcggcacccttgaccccaaggtcaccggcaacctcatcgtttgcgtcgaccgcgccacccgcctcgtcaagtcccagcagggcgccggcaaggagtacgtctgcgtcgcgcgcttccacgccgccgtgcccgacaccgcccgcgtcgcgcgcgcgctcgaggcgctcacgggcgccgtcttccagcggcccccgctcatctccgccgtcaagcggcagctccgggtccgcaccatctacgagagcaagctcctcgagcacgacgccgaccgccacctcgccgtgttctggatctcctgcgaggccggcacctacgtgcggacgctctgcgttcacctcggcctgctgctcggcgtcggcgcgcatatgcaggagctccgccgtgtccggtcggggatcctcggcgagaccgacaacatggtgacgatgcacgatgtcatgcacgcgaggtgggcgatggacaacttcaacgatgagtcctacctgcggcgcatcgtcatgccgctgaaggtcctgctcactagctacaagaggcttgttgtgaaggattctgctgtgaatgctatatgctatggtgcgaagctcatgatccttgggttgcttcgattcgagaatgagattaaagtaggggagaaggtggttctcatgacaaccaagggggaagcgattgcgatcggcattgcggagatgaccacggctgttatggcgacttgtgaccatggagcggttgccaagattaagagggtggtgatggatagggacacatacccgaggaagtgggggcttgggcctgtggcgcttaagaagaaaaagatggttgctgaagggcttcttgacaagcatgggaagccaaatgaaaagacaccaagtgagtggcttcgcaatgccgtgcttccagctggtggtgatgcaatgattgccggcattgctgcagcacctgagccagagaagccaaaggtgaaagaggaggcagatgtggctgaagagaccaaggagaagaaaaagaagaagcataaggactgggcaggtgacaatgctgatgaggggaggaagaggaaggttggagatgatgatctctctgcttctgtgagtgcgaagaagattaaggttgaggaagaggctgatgcagtggaaggggaaaagagtgagaagaagaagaagaaaaagaaggacaaggctgaatcggcatatgccgatggagaggtgaaggctgagttgtctgatggggagaagggtggcagtgagaagaagaaaaagaagaagaagagcaaggaaggagaagctggggatgatgaagctgagaaaagtgagaagaaaaaggagaagaaaaagaagaatcgggatgcagaggtgacacaatagttggagagtgtaattttagccagatcgttgacattgtaggttgcagattggaggtgtctacactgacctctggcttgttgttcacttgcaaacaataatcattctagaggcctagtttagcatttttatatcactatccgtttactgctttggacatgaaatgcaaattaactaggccagcctttttatattgccccactcatgatggcctatttgtgttgctgttccagttatcacttagatgtgatgaattttgctccattgaagttattggtcttttgatttggtacatgctgctgcctcatttatgaaattacttgccttggtgatgaaataacattcatcttgatcttttgtagctatcaaaatgctagttttggtcagtggtgttgtcagttgtgtgacttacttggatggtgtatgatatctatcttggaaatgtgacaactttaaaatgcagctttgttgatattaattttggtctattgtgttgttccagttatcacttagatgtgatgaattttgctccattacagttttggtcttcaaatttggcgtatgctgctgccttgtttatgaaattacttgccatggtgatgaacagtattcatcttgatcttttaatagctatgaaaatgctagttttggttaggtgtgattcgacttgtggtattactcaggatggtgaatgatagtatctatcttggaagtgtaatagttatttgaaatgctagttttgttgatcttaatcttgaattatgggttttggcatgtaactctctttaatctggtggagatgctaggttggttttcagaatttctatatgtgctttcaggatttattacatcattgttggtcactttgatttatccattgcattaaaagttacagtagctatcattgactggcctaaatctgctttacatgtgaacatgtctaccatggcctaccttgtttcgttgtacaacactattagttggactgcaaccttttctgtttctgcagcctgtgataatgtgtgagcctccctccgaggcaattgatttaagtttgtcatccgcacatcatggtgcatcaggttttactcggcgaaggactggatttattctccttttccatttctgctgaacacaagaggtaagcctgctttacatttgtcataaggtttgtttgtttagcagtcattgagaaacgagctagagaatttctttgcgatgttcgttgagcattatctgtggtggtctgtactacatttgtcaccaaattcttgcaagaagatcaggagattcaggctagcacacacaaagaaaaaaaaaaccctgctttctgttcatttaggaacaaaactttactttattattggtagcttagctgaactttttgctatcaagtgcactgtttacagggaggaaacaacactactaacctcaacaaccctgctaacctctgcaccattgaaacagactaagctaagaactgaaacgatcaagaactcctatatttgacagttgttgccattttcattttcctacaagaaagtgtccttacattgcaggctcttgagaaagaatcgaagaatcgaagaagaagaagcagtgcgttccagagtatgtgatgtgcgttggctgctagtgattgacaattacccagacggcgtagatgatccccgggaagtagcccaagaatgtgagcaagaggcagatccagaactcgatctgatagtccatccaggcgagaagccaaaattgcatattagcatcgacgccaaatcaaaatgatcaagcagaatgcgaaatggggattctgaatatgcagatttcagagagagagattggaggaagcttacctcgcagccgaccttgaggaagacgccgaggggaggcaggatgatggcgatgacgaggtccacgaacgtcgccgtcctgtcggccatcgccggcggcctgtccgccatcgccggccgatcgaccacaaacaccggcaaaggcgacgcaaaggcggggagaggatgggaggagacgagacgacgcggtgtcagcgggagcaattcaccaagtttagggggacacaaaagcctaatccaatcgcccaaagtgcatgtcaatttttagcctcttactaattaactagtattgtggcccgcgcaaattgcgcagctagctaccaatattccttattttctattccaaattttcttttttttttctaaattgtatttttatatagattgtaaactcttatttcagtatttttttattttttatttttataaattaaagttataaattgtatttctatatagactcatatgtctacttctattttctttttttaatttcaaattttagttagttctaaattgtatactaatatggattctagttttttctttcaatattcctttttttaattcgaatttcagctatttaaaattgtatttatatatggactctattattctttttatctgatttcatatttcaattaattataaattgtacaccattatgaactttagccttctcttctaatatttattattttttaattatctatgtaaattgtttttctatatggactccgattaatatgagaatttctaggccatgacagcaaacacggagtctaattttcttaggctatctttagatccagggtgaaaatttttgccctgtcacatcggatatactgacacacatttgaagtattaaacatagtctaataacaaaacaaactacagaatctgcctgtaaaatacgaggcgaatttattaagcctaattaatccgtcattagtaaatgtttactgtagcatcacattatcaaatcatggcataattagactcaaaagattcatctcgcaatttacatgtaaactgtgcaattgattttttcgtccacatttaatgctccatacatgtgtccaaacatttgatgtgatgtttttcgccaaattttttggaatctaaagacaccctatattaaatctaaactgttataatctgaatctactatgacccaatggttattttttttctctttttcttgattagcatgggaatttctatttttcttgtccgttttcacttttttctatctttcttgtccgtttccaagttatttttgtccgtttactctttgtttttttgtccgtttccaagttttttttgtccgtttcagctcttaggtttttattttttgtccgtttccaagtatttttttgtccgattcgaattttttttgtccgtttctaagtttgtgttctttgcaaagtactcctccttctatttttctttttttctttcgattaacgtgggattttctaggccgtgagagcgaacgtggaagcttctttttctattactttatagatataatagatagatttgctactcctcagagtcagtactgacgctaaaaattatcgttgtttttattaccattcgacagcacagatgatggtgacgatggcaacagatgaacgatcgatccccttcactttcgtctgtgctggtatgctgattctgctcatggaggacaggatgcagtcatcagcttggctagtggaaacatgaggcgtgtccgagagaaaagcatcaattgccactacattatctgtcgccatttgccgatacagtcgtgtgcgtttctcagtctcgaaacgacacctaggacttttaggacagaaacaaaagggcaaacggcgcctccgttttttcttggctcactcaatcacctcgcttacatcgccattctgtcatggcatttggcaaaacagtagcacacactaatctctctttgagcaagtttaatattatatccaactattagcttcaaatcatctatagtcaatttaatagccaattcatataatagttacctataaacatatactaactaataatagctggtcttacgtaccatacgcacatcgtgtcatgaagtccgtactgcagttatctacaaatctattatctccttaaaatatatttatagctagcttgtagtccgacaacctactcttatcactaaccacagtcttctcctagcttataccttgttccaaagctgcttttccttgttcttatcacacgtcttttgacatatggcgcacgcacctctcctcgcttttcacggctcgcacggcatcaatagtccctccgttctaaaatacattccaaataaatcaatctacgtgatacttcctgatacatcaaatctaaaaataagcatttaaatttattacctcctccatcccaaaatatttgacgtcgttgacttttttaaaagtgtttgactgttcgtcttttttaaaaaaattaagtaattattaattatttttcctatcatttgatttattgttgaatatacttttatgtatatatataggtttatacatttcataaaaaaatttaataagacgaacggtcaaacatatttaaaaaagtcaacgacgtcaaatatttaggggagaagggagtatattaaaatgtgtcagctgtagtgtaggaggttaatttatttcggaattgaacgaagactacttaatccaataccaacggccaacctccgacattgtacttgtcagttgtcactctgctcagctgcggtcgccaacgaggggctgcaatggccatgcccatgccgatgccgccgccggggccgggcggcgacgcgccaccggcgccgacgatgatgcccggcatggcgatgccgatgacgacgggcatgtccttcacctggggccaccgggcggtgggtgctcttcccgcggtggccgggcgaccgcgccggcgtcggcatgtacttcctctgcctcctcctcgtgctcgccctcgccgcgctcgccgaggccctctccgcggcgtcgcgccggctagacctcgacctcgacctctcccgctcgccggccggcggcggcggcggcgacaacagctgctcgccgcgggcgtccacgcggccaggatggggctcgcctacctggtgatgctcgccgtcatgtctttcaacgccggcgtgctcctcgccgccgtcgccggccacgccgccgggttcctcctcgcccggagcggcctcctcggctctcgcgccgccgcgccggaaatcgacggcgccgccgccgccgccgccgccacgtcgaatggttcttctctccatccatcgtcagagccgaaaccttaaaaaatatgtaattctcttcatgctgtcccgtaattaccagataatgaaagttgtagtcaaaggagattatattaaaaaaagactgcaaaattgtactgcatcaaaatggtttattactgatcgatcgtctctcgatctgaatttcgttttcactcctgaaatccaagaacttgtcaggcttgtcctgcagcttcagtttttgacttgtcaaaattacaagataagtgcaagtattaatcacactgacttgctggctagtggctacactcttgagctggtagtacagtatctactaataattggcagctaggttactgtagctgtcgtagattggctcaagctagctgcggccatggcgaccttgctgctgctgcccgtggcggcggcggcggcggcgtgggtgtggtgggggcggtacgcgtggcgggcgcgggcggtggcgaggaggctggcggcgcagggggtgcggggcccgcggcgcggcgggttgctgcggggttgcaacgacaaggtgcggcggcggaaggcggaggcgaagccgaacggcgtgcccatggacgtcggcgaccacgactacctccgccgcgtcgtcccgcacttcgtcgcctgaaaggagctgtacggtacgcacccccctcttggccctgtggcaacaagagcaagaagaaattaatcctgtgcttaattgaattaattctttggataattcatagaattttcgatctctatatctacagaatcaaatagtaataaagaaatactacttggtttccactgaaaattttccgcgtctcacaactgagaaacaacaatataaagaacagcaacaataaagcctcgatcttccgttgcctaacatgtcatatcgaatctaaccattacatcggattccagccactccggtcatcaccggcatcgacaattgaatgaatgatcaaactccatcacaagaaatttctggggtttttttttttgttgttaaaagcacaaggacatgaagaataattatattgttttcatatagcctttttttaacgaaagatgttttcatgccttctttgctaggatcttgtctcaggcgggcaagcctcaagcccgggggatatattggacatagtagaaatgtaaatcatctattctttgggtatcaaagatgaatatactattaattaaaaagatgttgagcagtgcagagtggaaagttttatgccataatattatacctgtcgatagaaacagaacatatatatccctgttcttttcggatgaatggattaacgaacaatgtttcccaaactcctaaacaatatgtcttttaagacattttgtgtatatgactttcttagaatattttctaaatctatttttcaactttgtaatagttaatttatttgtttgcaccctcaaataattattacaaatcattcggctatttagcccttcaagccacacaagatcatatgacaagtgagagacacacaagatcatataacaagggagaacatgtaacaaaaatggggagagaaaaacctagcagaaatgaccatgcctagaagagaaaaaaatgccatagttaaataagtcaccaaatactccctgttcaatgcagaaaaatagcctattcaactatatatcttgtaaataaatttcagtgatttatatgaacctccaacctgtacttcttgactgtgggagtgagaatatgcaattctgaagccattccacttcagcaactatatatatactaactcttcaaattatatgttttcatttgaatggtgtgtaggaacgccatttctgtactggtttggccctcaaccccgaatctgcgtctccgattacaacttggttaagcaaatcctttcgaagaaatatggccatttcgtgaagaacgacgcacacccagctattctgtcaatgatcggcaaagggctggtgctggtggaaggcgcagattgggtgcggcatcgtagggtgctcaccccagctttcaccatggacaagctaaaggtaaatggtcattctaacctggctccaatttctagcaatggattcctagttccttcagaaaatctactcagattttgtttgggagaagcttcctattcctaattctaatcaaatttatttcactgttctgcatttaggtgatgacaaaaaca

SEQ ID NO: 28712 - DNA, 9440 bp, Oryza sativa
attatatgttttcatttgaatggtgtgtaggaacgccatttctgtactggtttggccctcagccccgaatctgcgtctccgattacaacttggttaagcaaatcctttcgaagaaatatggccatttcgtgaagaacgacgcacacccagctattctgtcaatgatcggcaaagggctggtgctggtggaaggcgcagattgggtgcggcatcgtagggtgctcaccccagctttcaccatggacaagctaaaggtaaatggtcattctaacctggctccaatttctagcaatggattcctagttccttcagaaaatctactcagattttgtttgggagaagcttcctattcctaattctaatcaaatttatttcactgttctgcatttaggtgatgacaaaaacaatggccagttgtgctgaatgcttgatccaggggtggttagatcatgcatcgaacagcaagagcatagaaatagaagtggaattcagcaaacagttccaagatttgacggcagatgttatatgccgtacagcatttgggagtaatagtgagaagggaaaagaagtgttccatgcacagaaacaactgcaggccattgccatagcaacaatactcaatctgcaattaccaggattcaagtaaatctatctattcatatttcaccagtacttttttttcttggtacaaccttactgctaacgaatggcttctttttgattgtaggtatctccctaccaaaaggaacagatgcaagtggaagctagaaaacaagttaaggaacacgctcatgcaaattatacagtccagaattacctcagaaggaaatggatacggcgatgatcttcttggcgtgatgctcaatgcttgcttctcaacagagcaaggagaaaaacgagatgagctgatcctgtgcgtggatgagatcatagatgaatgcaagacattcttctttgcagggcatgaaaccacatcgcatttgcttacatggacaatgttcttgctcagtgtgtatccagaatggcaggatcggctgagagaggaggtcctgagagagtgtagaaaggaaaatccaaatgcagacatgcttagcaaactgaaagaggtaagaatataccgtgcatggattgcgcaaattaaaacagaatttagttcttgaaagtatgttttggaggctacggtttgacaagcgtttctgttttctattgttgtggcatgtcagttgaattattcttagtatctcattgtggcaatttgtagctgtagctaacattgaagtttgatattgcagatgacaatggtgctacttgagacactgagactctatcccccagttattttcatgtttagaaaacctatcaccgatatgcaactgggaaggctccacttacctagaggcactgcgattgtgatacctattccaattctgcaccgagacaaggaggtttggggtgacgatgccgatgagttcaacccgctgagatttgcaaatggggtcacaagagcagcaaagatcccacatgctcatctgggattctcaataggaccaaggtcatgcatcggtcaaaactttgcaatgttagaagcaaagttggtgatggccatgatcctgcagaagttctcctttgctctttcgccaaagtatgtccacgcacctgcagatctgataacacttcagccaaagtttggtcttcccatactcctgaaggctctggatgcatgagataatagttttgtatgtagctactattagtatgatttataaaatatgtatattacggggttgctagagcttcgggcgttatagttcttatccaccagaaagtacaccataaaactagaagatatgctgaagaaaggctgcaatctacattgttcagtgtattctgcatgtccagtctcttattatctataaaacttgtcaaggatatgcccagattatgtgtagaagatataaaaccttcaaagtctaatctgaattttggatggaccacctgatagcttggtctagcagctaaagatagaaagcccagttactgcctgatttggagctctatatattggcctgtatgacaacagtggaaaagcaaaggttgcccactcaatagcatttatgcagtaagtccaaattgtcctttcagctttgggtgctccattgattgccacaagtcatatctaatattcaattcgtctgtatgtgaacaacatatttcttatgtgaaaatgaagtacaaccaatacatggtgtgtacatctcgagaaaaagagagatggatgacacctgtttgaatggattgcacatgacatgaatagtccagcagctatggctgtcaaactgatctgtcctgaactagtgattaaagaacaggacaagtgataacgaatgcagggttgttcaattgttagcacactgttgtgtcatatggtttaaaacacctctagaaaatattaaaacaggagaatcaaaacatccatgtcaatcaattggtaagggtaaaggttgagtgctactaggaattctatgagaaggtgtagacagctgcagtgctcagcctgaggctgtgtttagttcatgaaaaaagttgaaagtttggggaaagttggaagtttatgtgtgtaggaaaattttggatgtgatatgatgtgatggaaagttggaagtttggggtagttgggggtgaactaaacacggcctgagtcccttaacagaatccaattatgattcttctagtgaagacacaataaatgaagagatgcacacatgtctcggcctcaacagagcccatatttgatacattaccttctctctcttttttttaagaaacgacagtaggagttctaccagaatttaattgaccctgtttataaggaaaaccagatcaaaaaccatacaactgcacagttttgctacagggaacccggcgaaaccccacagaagacaaagcaaaaaaacctgtggcaaaacaaccacgaaccataatggtgaccgagagaggagcaagaccttcaaggcgaaacctccaaggagggaagtaacgacggaagccgctaccaacgcccgcctaaaaaggacagggttttcacccaaagggaaagagagtcagcaaggcaacacctccatggaggatacggcacccgcaggcgtcgatgttgccgatcctggaataccaggcagggcttttgcccgagactcccttgaaaggtgcaggacctccaagaaactagagcagagtgctgagagttatcgttgcccagctcatcggctaaacccgatgcattaccttctctgctgagccatgtagattggtggctgttattttcattccacttacggtaatgcagtgtccctttcagttcatcaagggacagaggatagcatacctgataccttcatttgctacttgatgttgattgtgccatgacgtcctactatctgcatggcgtcatgcatgacctcatcttctgtatctcctgtacgatttcaattgcatacatacaaactaaaaaaatgtctctactctgaaagtggccgcacaacccaaaaagaccaggtaaatgcatacgagaaatttgtaaagtaaataattctctgttccattatttttcttctagaaaaaaggcagcaggatctctgccccaatatttgagatagaaacagcatggattctaaactgagattaatacacaagtaggcactgtacggtgtacgattagaaaaaacagaatgcacaagagaacagagttcttccccagttctttaatgacataaaacacaaactatgaagctagaaggatgtgcaacaaggcaaaacctggttctggtgtttccatgtagttatcctcgatgtcactcttacagcttcatcttctgattgccatagcctcaaaggtcgtatctcctctttcacactatcgttaagaagtgatagaaaggaaattcagcatggtttctagaacaaaaggattagattcatgactacaaattaatacacaagtaggcactgtagcatgtacgataaaaaacagaatgcacaagaatagaaaacagagtccttctgggcaatatgccttttctctaaaaaaatatagtccttccccaatctgttagcgacaaaaggacacaaaatataaagctagaaggatacacaaaatattgtagaaatccgtcgtgtctcactctcacaattttaccttctttttttcataacctcaaaggttggatctctctatcacactattggtaagaacccctttcatgtagtttccctggtaaattgaactatgctgttgctctgacatgaagaagttaattttgaatgtgcttacaccgaagtctttttttttttcatttccactcagccaactactagaacaatgtagagagagagagagagagagagcaaaaaattagtttcgcaaggaccaccttcagggctagaaggctaggacagacacatgtaaggaccaacttttttcttatgtcatcttttgtataaatacaccataaaaactataaatggccgaggatatgcaaatactccccagttccttgaaaaaaccatatctctactactataaaagcattgccatcctcctccctccccatcacattgcgtgcacaaccagcaatcctcgagaaaaccagaaaaaaaaaatcaaatggttggttaaaaaaaacccagaaaaggcggttagttaaaaaaacaaccggttggatcctatctcagtcatgcagctcattctcatatgggcctgttacaatgcacgggcatggtactagtgactataaatattgcaccaccttcctttcctctcctctccataatccaccacctctttgccatggcctctcttgctctggttttccttgccctcttgttgcctaccatctcatggctatgggactacatcattgtgccccatatatggaggccttacattgcagccaagaggctcagggagcaaggaatccgtggaccaccctacaagttcttgaaaggctgcaatgaggatgtgaagaaaatgaaggatgctgcagatgatctggttcttgatgttcatgaccacaattacctcccaagggttatgccatagtacctgaaatggagatctcaatatggtactagatctgctcaatgcttttttttttaatatgctgttgttttagtgcttggttagcaatgctgtatggtggccaagcaacctgactgacaattttcaaagctaaatgctcatccttcactataaaactaagaatagatcactaatgtggatggtaagcaacattgcaaatgtgaattgttgcaggagagccctttgtatactggtttggggcaaagcctcgaatctgcatcttcaactatgagtgggccaggcagattctttcaagcaagtcaggacactttctgaagaatgacactaccccaacagtgttggcgttgcttggcaagggactagtactggtcgaaggaattgattgggagcgccatcgcagagtaatcaaccctgctttcaccatggataagataaaggtaatcttatctcaatcgtcttaacatgtaggtgtgctagtgctacagaactgagtatggaaatgcaccccagaaactataataggttgagcagaaaactcgaggcaacttaaactaggttgttatatgtttgcatgtccatttgcaatttcacatgacagttcgtttgtagtaagaaaacaccagataaaaagaaaccaaaatatcgaaaccataatgaaaaaaaaatcaaaacaagacaatagaaaatatatcatacccaacacatttaattgcaacaaaattaatattagtatcgcttcactttgatatccatgcagatgatgacaaaaacaatggtagcttgtgctcaaaacatggtgaaggaattggaagatcaagcatccagcaacaagaatggagaaactcaagtggaattggacaaacaattccaagagttaacagcagatatcatatctcatacggccttcggaagcagctataagttaggaatagaagcgttccatgcacagaaagagctccaggaaattgctgtaaaatctctcctcaacgtgcagataccaggattcaggtaatatatctaatactcccttccaaagcttgtagaatgtgaaattaaatcccacgaacatgcaaccatattttggctcattcattcatatatttacttcttttttttttttagttcagctaccttcctacaaaagggaattggaggaaattgacacttgaaaagaagcttaggggcactctcatgcagatcatacaatcccgattatcatcaaaaggaagtggatacggaagcgatctccttggtttgatgcttgaggcttgcattgcaacagatcagggaagggagcaacatcagctcagcttaagcatcgatgaaattatacatgagtgcaaaacattcttctttgctggtcatgaaaccacgtcacttcttcttacctggacagtgtttttgctcagtgtgtatccagaatggcaggcaagactccggttggaagctttgagggaatgtggaaaagaaaatccaaatggtgacaaccttagcaaactgaaagaggcaagaaaactagtacctatgttgccttttataatctattttgatatcttttttttcttgtgatatgtaactccatgtgtatcattctaataataatggttcatgtatggctaactacaacataacatatatatatatatatatattgcagatgtcaatggtattccttgagaccctaaggctctatggtcctgctcttttccttcaaagaaaacctctaacagatattacagtaggagaaacaaaaatacccaaagaccatgcaattatcataccttcagcaattatgcaccgggacaaggagatttggggtgacgatacagatgaattcaatccattaagatttcagaacggggtcacaagagcagccaaagttccacatgccctactggcattctcaatagggccaaggtcttgcatcggtcagaattttgcgatgttggaagccaagtcagttatggctatgatcctaaaaaagttctcattcacactttcccctaactatgttcatgcacctgtagacctgttaactcttcagcctaagtttggtcttcctgttgttctaaggctactggatgcatgaagttagatgatttacatgttaccaaacttaaatggaatctgtatgccaaaggttgctactgacctacggcactatacattgtaccccacagtggatgtatccttataaaataaaatagctcgggccatgattcaatgtgaattactgttctggtgcaaggttggtaccattttagcataatactccgtatatagatttagtatggatattatactatcattgcgcgctacactttcggggcaacatatttttttttctgaggtatctttgtgatgctacttatgattgcaggtctcctctgaaaaccacacaaattatttcaaattcttatttgcacataaagtaatcgaatacgcaaatcccttgtaaattcacttccatagcaaaacaattgcaaaattgaaggttagtaatcttgtagataattttctgcaagcactgctatcgttgcaaaataccagcagtagctgtgcaggtttctgctacctttggcttatgaaggaagaaatatataacctatatatagatcagctgatttttcatgtggttttgatcccaaggccactggattagattccatagagttgcttgttcaatttgataatttcacatggtaaggaactcagcgcgtaaagcgatgaacacttttgatttctgaagtgggcaagtatatatatgatttggaacaaagagagagacatgagcagcatcaagtacatccaagcagggcatccgggagctcacctccggcgtgggcgatcgagaaggatcaaccaccacggggccgctccattgccggccctcgaccgctgcgccccttgctgttggggatgtagcgcaccttgcccagccatgtcagacgcgcctcgccgggcggctaccaccaccatcaccagccggccggccggccagctccagtcccccggcgcccggcatcctactgacgtcgacccccctcccgacgacccgaccgccacgcgcgcagcggcgcggcggcggcggcgagaaatcaggttgcttgggtcatcagttcggcacgatgacggggaaaggaaaaatcgatttgacgccttgtgccgcggaacaaatttgcgatttgtcacggattatttaccctgtctttaaaaataagttttcttaaaaaaaattgagggagactattctactttttttaaaaaaactgttatctttgtggagttttttttttaaaatatttaatttatctatatagttatatagataatcggtaataataatttagtgaatagtgtatgtttcaatctaatagatggaaagctaaacttagggtgcgatggttttaacttttcaggattagattctcctcgtttttcgttagcacgtttttcaagctgctaaccggtatatttcgtgcgaaaactttctataaagaagttgttaaaaaatccaacaaatttattcataaaaaaattatattataatacttaattaattatatgctaatattatttctcgttttgcatgcggctaaacagtccaccgccaccgctgaaacgttctcacccttactcgaaaagtactagaaagtatatagctaatagctccctgtttgttgtagcagaacgagaagggctgcttcaacccctagggatccctcaccgcctcttcgaccactccatggtgaactcctcgtgaccatgcaaatcctagccaactttggaggggtttttgtcaaaaaaaaaacttcttcaaatgttcagctgtgtcgatccattgtgaggatggtgactcggctatgatccagggcgaactgccatgttcggtcgcatccttcctgtgcaaatatcttgacattcctctctccacccataaattgaggaagatagacctgcacccattgttgataaagtaacttgacgactgctcctatagtaagcggagaaaatggtgccaatcggtatcatgaaggtgaagggagtcctaagctcaatttcaatctatttattggtttcaagtggatgcaccaaaatggttccttaaaggaattggcaaaatctaccatggattcctctaggctggatgggcaaatgcacagggtgggcattgccatgttgccaggtcaaaagtttgtgccatagtcaactatggcagccttggtatcctaaatcttgggctcatgggtgaagcccttcattcatgatagatttggctataacgcacatcaccgttgaagctttggtagggactagtgatcccaagcttgcatgcctgcaggtc

SEQ ID NO: 28713 - DNA, 611 bp, Oryza sativa
atacatccactgtggggtacaatgtatagtgccgtaggtcagtagcaacctttggcatacagattccatttaagtttggtaacatgtaaatcatctaacttcatgcatccagtagccttagaacaacaggaagaccaaacttaggctgaagagttaacaggtctacaggtgcatgaacatagttaggggaaagtgtgaatgagaacttttttaggatcatagccataactgacttggcttccaacatcgcaaaattctgaccgatgcaagaccttggccctattgagaatgccagtagggcatgtggaactttggctgctcttgtgaccccgttctgaaatcttaatggattgaattcatctgtatcgtcaccccaaatctccttgtcccggtgcataattgctgaaggtatgataattgcatggtctttgggtatttttgtttctcctactgtaatatctgttagaggttttctttgaaggaaaagagcaggaccatagagccttagggtctcaaggaataccattgacatctgcaatatatatatatatatatatgttatgttgtagttagccatacatgaaccattattattagaatgatacacatgg

SEQ ID NO: 28714 - DNA, 715 bp, Oryza sativa
cagctaaatgacagaaagcaatatatggttggtacctccctttgatatgctatttgttgtagcccatctgtgcatactcatgtaaaagtttcttatgaactgtacagatcaaagagttgaattcctatgtcaccttgaggaagacgtaagtcagcaagttctcttgatgaataaatatgtttcacagaacctctagtttagtctctgttgtattatatataaccaattccattgggaggaaacccagtttcttaaactgaaaaaaaatgctcttgtttataacatccgtacctcctgcaatattcttctgtaatgtcttttgttacttctagtaatgctaacacaaactatctgttgcagatatcaaagtagcctaggtaataataataagagggttgagctctttgatatgggcgctggaagtagtgaacctgctgccgaggacaacatccaaatagcatcaggtgaaaataatcatgtgaatctttttcaaatgtggttaatgccatgctaataatcttcttaaatgtaataattgccttatgattgctgagcataagatgcagagcttgcaatcatgttgagagtatatgaaattacaaagtattgtgatggatcgatttcttaacttttgatactataatgacaagtagactatattatagattttcttttgaacaacaaagtagagaaaacaattagtttcgaacatggt

SEQ ID NO: 28715 - DNA, 7171 bp, Oryza sativa
  unsure (1)..(7171): unsure at all n locations
ggcatcctccgaccaccgcgcccgccgtttcgcatcatgggtaggggccacggccagaagctctcgcttcatggccttgaggctccggcgagaaacgtgagcgcacgctcccccattgacggtggcgacgatggccccgggctcctggaaccccaggtcatcgtcgccatcgtcgacatcaccggtggtggccttctgcttggcctcacctcgccggttgccggcgggagccgccggggccttgccctcacggcgctcctgcctccgctcctcctcccacttcctcgtccgctcagccaaacttttgaccgcgcggcaatccgcgaggtcgtggagggaggtgttgtgcacggaacaccacttgccaaacttttgaccggccttcttctttttgtcgctcgcaggcctcccctttcgggtggcccgcgaagcgccctcgacggcgaggacgtgaccctcgtcgtcggaatgggccgacctcttcttcttcctcctgtcccgccgccctgaccgagcggcggtcccggaggcggccggagctgccacaccggaaccggaggagttccaggtccaggcctcctccttgcgagccacacggtccgcgagctgaaaaagctccgcggtggtctggggctccttggaggcgatcttctcgagcatgcggttgtgccgcacgccccccctgaacgcgtagatcaccgcgtgtgcagggatgcatggtatggtgttgcggacttgacagaaccgctgaacatacgagcgaagagactcatcgtcccttcgctgcaccgcatgcaagtccgctttttcgcctgggcgcggatatgtgccctggaagttcgtggtgaactgctggcacagatcctcccaagagtggaccgacgcgggtggcaagttcattagccaaccccgcgcctgacctttcagggccatgggaaagaaattcgccatgaccctatcgtcacccccggcggcctcgatcccagtcgtatagatctgaagaaactcggcggggttgacgcttccgtcgtatttttcggtgatggtgggccggaaccttgggggccaacggacgttccgaaggctcgccacaaaggctcgacagccggcaccgccaaccggggacacggggggctggcccctgtgcccgaaccgaagtggcgctccggacgaggaggcgccctccattgcgtgggcagcacgacgaccattgcgccggcgctcgatactggggcgggtatccggccccccacgcacatcttcttgggtcggaggcgttgacgagggaatggcggacgaacggcgggaaacggtcgccgctcgccgggcccttccgcttgacgacacggagccggtggtagcagcaccagaggtcttggtggcggaggaccgcccaccggcgcctatgcgctgctgcgccgtcatgaccaagtcggccacgtcatccagccaacgtcgggctggagtctctggatcggggacgatgggcgggtgacgtaagagcgcgccccaagcctggagcgcgccctggggcgtgctaccatcgccgtagacgaggaggcgacgctccccgtcttggcgtaattctccatcgcccgcgggcggtgaagtcgcggatctttcgaccccttcgaacgcctcctcccgcccaagacttcggcgagagggggacggtggagtacgaactcgacggcgcgggttctgctccccgtcgtcaccgctagcgctcggagagaggttgtgcgccactgcccgttcggccattgggccgagcgggagaagcttggcgcacacgaaagaggatgagggcttagaaagacacacgcgccccctacctggcgcgccagatgacggagcttggggctcctcaccgggagaccgcgcaggcccccctttgctggttcggccgggggcgctcagtgaggttctttgccctcggtctggggaaagttcgcgagagagagaatgcacaagacacgggcgatgtagacaggttcgggccgctgagaagcgtaataccctactcctgtgttctggtggatctgtgtatggagaagttacaaagagctggggagcaagagagttcaggctctagaacccctctattccccccctggctctcgatctgatcccatccccttcttcggtgggtaaggtcttccttttatatctcaaggggaaaccacatgcaccacttctacctactcttcttttgggtggggacccaccctatcttgaccaaaacttggctcgcatcttcgcctggaagctaaatcatagcttgtccttgagtgaggcccagcgccgtcactcgcctgacataggggatcaccctgtcattccttcattaatgggcggagattgcaatggctgcagtccgaatgacccttcgatgggatgggtcatacctacctccactccgccggatgcagatgcaacgtgggagcacagtttgtcttccgatgacgtgaccggcatcagaccagtcacagaccggtcattcttgtccaccacgtgtcagtttagcatgccgcacgtctgctcttctttatacaattacttccttgtaatggttgcgatgaagcctggcatgaacctagccgggactgacgtgccaactgcaggagttagcacgccggccccggctagggacgagttccaggaggctctcatcattccgacgggacggggcgaggcgtgtgacaggccgcctgttgccacctaacccgcgatctgaccggtctgtgaccggtcacacactgcgaccggtcacggaccggataagcgagcgcgctgcgctgcattaaatgcggcgtggcgcgctcgtccaaactgtaataaatgcggttaggtgagccccgctgtgttcacctaacccatacacgtggcgccagaaccacagagggtcggggcgccccagccctcggggtcgaaacgggagcggcccgacccctcggggagacggaggaaggggtggccacgtcaccctcgggcccgaccccccccaagggggtcaggccacgtgggtgaccgcggctgcccaagcctctagtcatgatactcccggtctcatgtcaccgacaactgtggtaggtagtggaaatatttaaaagtttgaaatttttgttcaagtttttgtaaacttggttgggttacggggctccagtgacaaactccaccttttgatccaggcacaaccacacagcctggtagctccaacatatccaaccccttttctctctcaccattttttttggaaattgtttgttattatttattttttttaactcaccacatttccacataactctgccgcatgctcttgcacataccatgttttgctaaaatgctaatacaatcaactagaaggcattttctaacataacacgtctcttgagttctacttggataaagtgacacctagagagtatgtaagacatcacctcctagaaagagaggggaaaatctttcgaatgatgaaacagataagtcatcccaagttgacactaggagaaataccgagtcatttccacattgctaagagtcattgctaggagtcccgttgacttagactatactagattagggtcttcaccttatactattgagtatttatagtagatcaatacatataaacacgatagattgctattacccattaggaggctcgatttgtataaaaaccattacctcctacttcatagctcaccttcgcgagcatccttgtactgatcaatccttatatctgtataaaccattgtctcctacttccttattatatcttgatgagcatcctttactgtccgactatacaaaatcaatactatagtcatgccctaacatgttagcaaaggtatcatgtgagcatctctatgacatgccacatcaaatattggattgatgctaatacatttaactagtttatggggggtataatatgtattttttttaagtttgtggacaaacataactcatgtttatttactcatagaactttgcatccacgattcacccatccataaatcacactatggatatgacccttggagtcaaaatgcccttgtttcttgagaggaataagtctatttcgcatccctcatcttttatccttgatcgaatcgcctcctccaaccgcaaaatcgggtataacacatcccccatctttgaaaaccggtgcaaatcaactcattcggtggtgtcgaagtagttttcataggtggggctcacatgacaatgaggtatggcaaaaatatatggccccacctacaaaaaccaatttcgaaaccattaaaggagtcgatttgcactagtttttaaatatgaaggaggtgttatacctggttttgcggtttggggggatgggattgatcaagggtacgagatgagggagttaaaatagacttatttctttttgagaaacatcaacaggagaggaagaattatacttgggccggaaaaagtacatctaaggtccctcatcttgtcatcggattacaaaattatcccccaatcgcaaaaccagatatatgggatccctcaacttataaaaccgggtcactttgggtccctagacggttttgacccggttttatccgacgtggcagctgagtcagcatgggtcccgtatgtcagtgtgtccactttatcactccctctttttcccatctctcttcatcctctcttctctcccttaggtcccgttcttttctccaacaaagagttggatgaagattaagattttcgtggcacgcttttcaaactgctaaattgtgcgtttcgtgtgaaaactttctatatgaaatttgctctaaaatatcatattaatctatttttcaagtttgtaataattaaaactcaatcaatcatacgttaatgccacctcttttgcgtaaaaaacttaatcttcatctattcatcttcgggagaaaagaacaccacctactcggttactctctctctctctctcaatattctttgggcaggccgacccgcgggtgcgaggtggaagagaggaagggcggccgatgctggggcggcgacggccaatgcgggagaaggggagacggtgtctcgtcctaccgccacaacgacgccgtccattccttcctccttgctaaggcctctggctctgatttcgtcttctcccttctccgccgcatcctctcgttctccccacccgccgactccctcttccgccaacgccgtccactcctaccctcctccgccacatcctcataacctcgccagcggatggttgaagatgaagtggctggggtcggatgccccgcggtcatcccgcgcggcggtacctggtaccgcccgagctcctccagcatcgcctccaccgtgaccaacgcacgcgccgcggcaactccgcgagacacatggaggaggtgatgctcgcccacaccaatgcctcctgcgagtttagcatcatcctcgacgcccgtctccctcccctcccccactaccgnncgaaccccacccggacgacgcgcgaccattagaattttcgtggaccacccattgtgcagtgccagactttgaagtacaacatgaagtcgagggctgggagaggctttatccctgaggtgctgaaggtgatgtccctggtgtaccactatatttgagtagcccttatcaatctagtgtattttttgtaccctgggggtgtttagatccaggggtgtaaagtttttgtgtgtcacatcgagtattatatagggtgtaaaaaaaactaattacagaatccggcagtaaactgcgactctacgagacgaatttattaagcctaattaatccgttattagcaaatatttactgtagcaacacattgtcaaatcatggagcaattggcttaaaacgtctcgcaaattagtcacaatatgtgcaattagttatttttatagcctatatttaatacttcatgaaggtgtttaaacgctcgatatgatagggtgaaaaattttgatgtgtgatctgatcagggcctctgtttggttaaatctgaactgtttgcttgtagataatagataagtaactttgtcttgtcagtagattagaaacccccttccccttctctaagtgttgaatgccatttaaatttggattaagattctagtttcattgtctaatgctttgagtgtgttccggccatgattagagcaggtacaatagcatgctataagcgagttataaacatattttaaagagataaaggaagagagagaagagcagcggactacggatctatagccagctgcagcacggactctaagacttaatgtgtgtatgacaagtaggactatgtattaatagtatagtaagcaactattgtatgaattggctattatattggctatagataatttggagctagtagttgactatactattaaacttgctcttatctgtagaaaaaaaatacatttgcatatgtaaatttatatttgtgttgatggtgttctcctataatcataggctgcgaacatcccgaagaagtatactccgaccattggaatttccgtggaccaccgccgcaagaaccgctcacttgagggctccaggctaatgtctagaggtttaagacataggccttgtttagttcacgaaaagaaaatttttgagtgtcaatgtttaacggatatcggaatgggttttcggatacgaatgaaaaaaataatttaataacttgcatgaaaaccgtgagatgaatcttttgagcctaaactaattcgtcattagcgcatgtaggttactgtagcatttatggctaatcatggactaattagacttaaaatattcgtctcacgatttctccctaaatgtacaattagtttttatttttatctatatttaatactccattgtccagagattcaatatgatgtaaaaatttctggggactaaacaagggcaaggtatggctgcagtttgttgtccctgactccttgtatatgtttatcgaaggtattgtcttctagatctggttttgagcttgattgtgctagctcttgtgtcaggctggtgattccactgccgaggagcttgccactgccacccaggtccagggtgattaattacatgcctattgctcgcggtgagaagcgctcggttgaggctgtgaaggtcaccgatgagatgaaggcgttcaaggcctacgctaattaag

SEQ ID NO: 28716 - DNA, 2282 bp, Oryza sativa
gtcaccgacagtagcccccggcgttatgtcagtgtgatcgcccccctcgagggaagcgctcgggcgtgacgccactccttaggcctggtggcaggtggggccgatttctacaggcggacaggaacccagcggtcgcaaatcgcgcgcatcggcaagggaaaccgaccgacaataatgagcggcctcttcaagaccgctacattattcgagtagcgcgcgaatcgggatgagccggttcatttcacctggagagatgatgatggcgcttcggtcggcgagcgtagtaaacgcgcgcacgatatgtcccatctcgactgccacggccgcacgtccgcctcgtgcgccgcaaacgggcgagtgggattagtggaggcgtgggcgcgagaaacgagggggcgagatagtgggcgcgggaagcgaggagccgggcatagcgttggcaagggtataaagacgccgaggaagagattcgtttccttcctctcgccattatttcccttgccttcgccgcttgcgctctaactcctcgtttcctgtgccctacccttgccacactcactcgttctcaagctcctcctccgccggcgtcatggcacggggctccgcaccgctcgatggttgcgtgctgccgccttcccgcatcgtgagcgagaggcaggccgggctgccgcgccgattcatgccggaatctgccactggccgggaggtggtcacgctgggtgagggacgcccggcgccacactacccggggcggtccgtcttcttcctctctttcgcaatggcagggctagtcccgccattttcttccgtcttcatggatgttctggagctttacgatctccagatggcgcacctcacccccaacgcggtaatgacgttggccatcttcgtgcacctgtgcgagatgttcatcggggtgcgcccatctctccggctgttccggtggttcttccccgtacagccggtgtcgccgccgtcggtagtcggtggctgctacttccagccggggggccggcgctgaaccgctacatcccttgcgtcctccgcaaaaagtgggacgactggaagagcgactggttctacacccccctcgccgacgaagcgcgcctccgacttccgagccagcccccggtgcaggcctccagctggcgggcgccggtagatctgggagacggctacgacgccgttctttaccgcctggcgagtctgcggtcccaggggctgacgggggccatggtgtacggcgactaccttcgtcgccggatcgcgccgctccagcggcgcgcccggggcgcctgggagtactccgggtccgaggactacatgaggacccaccaggggcacaaatgggattgggtccctgaggacctgaggatggtggtccaacgggtgctgaatctcagctccgtggaggcatcccttatcccccaaggtgtcctccccctctgcagcgatccagatcgcgccagcatcctgtccatcatgcaggcggtcggggcgtcgaaggagcgggctcctcgaggccacgatggcgcgggcgggagccgcaggggggaacaatctaccccgggagggggtcgtgcttctgggccccgcgacgggggtccggggggcaactgccctgccgacgcccgggggaagaggaagcaagagggtaccccttccccatctcctccccgagggggcggggcggtgcgtgccagcagcaggcgcccggagggtaccgcgccgacgtcgcagcccgaggggggcgaaagaagaagcggctccgcaagatgggggagacggaaccatgccggggaaacctcatctctcccccaaggtggtcgtttagccgacctccccgcaggttcgtccccgcgcccactgcggccgtattcattctcccatcccccaaggcgagtttttactcacccgcttctttttgtcttctggtttttcttctgcttcagcgagatcccgtcgcgcccccctcgccattccaagtccggccggtctgaggtcgaggagacggcgaccgcggagactcggaggcgagaagctgaccggcgagaagccgcggtccgcctccgggaatccgaggaggctgtccaggaggccgtccgggctcgccaggctgaggaggccgctcgggaggaggctagactccgccgggccgaggagtccgtccgggaggcggagacggcacacgcacgccaggcggcccgccaagcccccgacccgactccgcctgaggcgacgacgacttcggaggccacccacgacaatgccgcggggggtac

SEQ ID NO: 28717 - DNA, 984 bp, Oryza sativa
cggcgcgtcgcaggggtggctggtcaccgtcgacgaggcgcccaacctccatctcgttctcgtcaaccccatcaccggcgccacggcggcgctcccgcccatcaccaccctccacaacgtcgagaggttcacgagcaaaaagggcaagacaagatacagggtgtacgacgacatgggatacagcgaggcgtcccttgagtactcgccggcgcatgcgagggaatgggtgtaccaccaggtggtcctctcgcgcagccccgccgaggggagcgcatgcgtcgcgctcctcctgcaccggccggacggctatgtctcgttcgcgcggctcggcgacgagcggtggacgccagtcgcgtacccgggacaggactgctccaccggctgtcgccacgccatctacgatgacgccgatggcctcttctacacgttgcggtacgacggctccgtctacgcgatcgacgtccctcgcgccgcggccgcgttgtcgccgccggcgacgagagaggtcatgcggagtgtgacgaacgcggacaacggcagcaagtacctcgtcagggtgccatgttccggcgatctcctgcaggtctggaggttcgtcgactacgacgacggcgacgaagtcgaagaggatgaagacgctgaagattaaccactcggcaccaagcacctgcagatcttcaaggtcgacggcggcgagcagaagctcgtggaggcgtcggcggcgagcttggaggatcatgtcctcttcctcggtcacgggttctcggcgtgcttcccggccgagcacttcccggcgttgaagcccggctgcgcctacctcgccgatgaccacgaactcgtcagcgtgagtaagcattgccggcgagacattggcagatgggacatgaaacacaggtcagatggaaaggctctccggaaaaaaaaacgtggcggcgccgtctcagccttggctcaactggccatctcctgtctggatcacgccaa

SEQ ID NO: 28718 - DNA, 2144 bp, Oryza sativa
ccccaagtccatcctgaccaccccaaccagcctcttcatcccggtgacaatgccacaatgcccgccacgccggccaacgtacaccgcgacctcgaggtaagacccatgagctccgaaacaccccggtgccgacagcgccttcagttcagattcgtcgagggagaagacggcggcattggtgtgtggatcaaggttgaactctgaataattgatcagagggacaggagctatctggacagggaatcctcggagccggatctcgcagtggaagctccgggccgccttcctcgcattcgcaccggggagtttcagaccaagctgtccaactgaaagtctgacaaaaatctggggatccattcttcgtgtcactgaagattagctacttccatggcacatgctgaaaaattcacaaatcattgaagtcagatataatttgatgtaacaatcaattgtaggaaaagaaatgaattctgcaaattagcactaggtgtgcagctgatcttaaaattcttccaatagtagtgtatggtatgacagtatatgctccaagtgatatggaactatgaaaaagactacatagtagcaaatccagaaagaaatgcatagagcatgtttcagtatcagctatgtgctataggaatggcacatgaaaagtagcaacattgctgttgcatgaagatatcactttcagattccattcaaaaaattacatcacttttacccttgtaggtatgaccaaattctacagaaagtaaaagcctaactccgtagccagattcagctcatcacttcaaaatcataggcttaaagcgccagatagaagctgattgcattagattagaccatagccaaattcagctcatcacttcaaaattacagatcacaggcacaatttctccatctgtaaccaagttttattaggtccacctaatctaaggtttaagatcagccaaaaaaaaacttaaaagtaaaagaactaattatttaggaaataaaaatgatttacttagtaagttagctgttttttttttctcaactcaaagtagattttgccagcatttggaattagcattcagacatgtctttaatcgtgattttgatctaatagaaggtacagttcaccttaaacattccccactaaaaaaagaacacgcaactgacgcctagatgcttgcctttcccccattttttttgtgaaacctttgggatccttgacaaaatttaaagaaagatgaatgttgatcaagtagcatattcttcccctttgacaatccctagtgcaagcactaaaaaaggcaagcattgctaatgccactcaacacctcttagcttaaacaactgaaagggagaagaaaggaagaaagaaaaagaggcatctggtgctttgcaatcatgccattgagtggttatcaatggcaattgccaatgccattagcatgccacctctgttcaaagctcctgtcatcagtcaggcactgacagtgtcactgcaactgcaaaaaaaaaaaaaaaaggcttgtgcaaccaaagaaaagcatccaagaagagcagcatcaatggcgcggcgcgacataagctagcccgtgtgtcgcgaaaaggggcggcggccatggcagcaatggtggtgcatgggtgaggtagcctattatcagaattctccctttgctcccatttctttaaccctccaagcaaagcttcctcctctgtcgtatgatcagcgtgcaaagtggagattccaaaccttcctctccaccaacaagtcctcctccggcgcaggcacgccacgccacgccacggcgtggacaaggccgagcacataaggcggccgccgccgcagccgcagccgcagccgcagccgcagcaaaagcttcgctgcatctcacaatgttaagcgcggcgaacggcggcggcgtccaccatgatcaccggggtgattacccccccgaccagcggtacggcaacggcggcgaggaggccagacaacagcagccttcgtggcagccgccgcgggaccaggtgacgcaccacccgcgggggcggagggcgcaccggtcgggcccgctggagtggacggcggcggtggtgttcacggtgctcgccgtggtggtgctcgtcgcggcggtggccgtgctggtggtggtgct

SEQ ID NO: 28719 - DNA, 621 bp, Oryza sativa
ttttttttcaaatacacccctggtttggattgctgtcattggaagcgacttggaatttctcaaaattgctcgaatgaggcgcagattcagggttggattttagtgaactctacaaaattcatacaacaaagtttgaacgaacggaaaagggagtgtccaattctttcaaagtgaatttacagaaggattttgatggccgccatgggtgctcgatccatcggtgcttcgccagctgtgcgaggaagaagacgacgacgaagactagtaggacatggatgcatcggctacgtgtcgagctcgaggggatcaggggacgatgaggcagaggccgtcttcttggtcgccgtcgtcttcctccggaacggccggcacgccttgacgctgaggtcgacggcggcggcgagcgccacgaacatggcggcgtcctccatgcacgtgacgtggcgcatggcgagctgcacgagcggcctgctgctccgggactccccctccacgcggcagctcatcacgaacccgccgccggcgcacgcctcgcccaggctcgccgcgcagtgctccgccccggcggccagcgccggcgcctgcctgtccatgtcgatggcgaactccccgcccctgtcg

SEQ ID NO: 28720 - DNA, 2500 bp, Oryza sativa
tatgacgggaactaattggtctacattggaaattctgcttatcttgtacggataccatgggaagccaaaggagctaaagatgacatgggatcttatgcaaggtctccctcatattcgacccaaaagctttatactagcaattgaagcatttggaaaggttggctccatcgatcaagcagaagagatatggggaaagtttgaatcaacaagaaagccgaagctgacagaacagttcaattccattttatcagtatattgtaggcatggtcttgtggataaagcatcggctgtgtttaaagaaatgagagcaaatggttgtcagccgaatgctatcacataccgccacttgacgttaggctgcttgaaagcaggtattgttaaagaagctctgaagacgatggatatagcaaagaaagaagttgtcaccaagaaggtgaaaagttcaacaccatggttggagacaactcatatgatacttgaaagctttgcagaaaatggcgacttggtaaatgcaaagagagtttttgacgaactgaatgaatcaaagtactgtaggaattcatttgtgtataatacccttcttaaagctcatgtaaaggcaaaagtttatgagccagatttgttaagagcgatgattttgagaggagcgatgccagatgctgaaacatacagcctactgggattgatagagcagttcaagacataatgaacctgtacacaaactagctattgtagctgtgaaggagtttgaaatgatatatactgaactgagccatacaacaaccggtggtaacatgtgaacattttggcacataatcattcaatattccaattgtcatactgatggtatcgctggtattcatggtgcatgatcagtgtctgaagatgagcacaaatcattgctgaagtgcaggcctcgcagctacctttgttatcctgaacatctagcacaaggtaaaaacattaattattccaatatcttaaatatgttgttgcccaaggtaaaaacattaattatttcaatatttgaaacctgtttttctactatgtaagaagcatataagatgctaaactaggtcagctgaatcctaagaaccagatgttgtaatctaacatttttttccccacaaacccccacacctaaacattgcaggtgatgtacactgcattttcaaagtaggggaatagtgcaaaggaaaaattgcatcagatggaggacaaacacttccaagcaaacaaaggtagtcaggatattacaatgaccactgcttagtggttacacaacatgttgcaggtttcattgtgctacttcaaccatcttcacacctcggccccctgaaacacacatcgacctggtgtttttaatgtgcaaatgacggaacgagatataaaggaaggcaagataaccattataaagcttaaggaaacagtgctacgctgcccaaatgctggatacacaaggagtaccaacctccatttgaatggcagcaaatctagcagcatgcaagtctaacccaagcagcttgtgctctgagcatctgactctggagcaataattttaagataaatgcctgataccgagacatgtatgttgtagctagttgcatagcaccaatctgacattgttcttgtacaaaaagaatccatgcaaagaagttacaataaacagtggccatatgttccatatggtatcgagtcagtggatagattattagcagagactgatttcgtcaagtaatttcatttgcatcctgtccgggcataatcaatgtgcatcctgttgcagaggctggtacattgacaaggtgaccttcaaagagtaattcgcaaacaatattattatggagccatggggaatatatatgttttttttttgccaaaacaaatgttcagatgtacctgaaatgtaaatgattattgacaagtatacaattggtttatatgtttttgatagcttttacatttgcaacaaaatgttagttcatgacacacaggaactgattatgccccatgagaggttcagatcaaggagtctataatctgtcaggcctcaacataacatgatcttgtatgctacagtattcatttatggaatgtcactgcaaaatagacataaaaatacatcttaaaatggttaacaataacatgctgacacaaacttgaccacctgaatactgcaagttttgctctcattcaaaatggagctgcaatcagaggaaaacaaaggaagagacttgtacctgactctgagtaccagtgattttctgaactctagttaacttgtaatagtcatagtgtcaaatttaaattgaaaagcataatgcattggttcctatcttcgatctcaacagtacaaatctagctgaataaaaggatacacatgacttggctccacaagttttgtgagtttcagtaccaggaatcacaatagcataaaggtacatggtgcaaccagaatatctgaaactcattatcagaaacagatatcatgtcagaaaat

SEQ ID NO: 28721 - DNA, 4027 bp, Oryza sativa
tattttctttcagataatccagtcactacttttaacctatcaaatcctacatggtcctgactgtggattggattggattgtttggatataacacatggacattggaacttgtcatttcataaagggatagaaggtccaagtttagtatggaataaagggtgagttgagttagacatttcacatgaacttgactcataatttattttaattttattttttcttgtgcactggtaaacatctactactgctattacctgtactgctagtcctctgaaaatgggagtagaaaggttcttcaggacagacaacacacaattggcatgaagggcaggtgtaacagaaacagatgcttctgttgctgctgatgctgcatctgaatgattgtgttctatcaaccacggctataaatctctctctacctgaacccaactgcttcacagtttacatctagctcttcagattaggtactagcttcagtgttggatatgctgtgcttgttcaggcactggaagtgagaattggaggaaaacaaactgattgctggttgttgtttgcaacagtgtggcaaacaatgttcagcttgtttttcttcaatatctcaccttcaggttgattgcttgatggaatactttagttgagcagcacatgaacagattggcagctagtgttgggttttagcagctaggaccatatttatatgtgccatttgaaatgaggattaaagggaactgaaccattttgatgaatatcagaaggttcagtttcctctaatatctcgccttgaatggcccatccggaaaatagctatacccatcatatatgcactaaaatgtaggaatagaagagaaccagtttgtggccctcccaaattcttccttttattgaattctttgatttttgctgaaggcgcatatcaacctctcttttctcaaacttacagaattttatccaccaactcttttttgaatatcgtgtggaaaagcctactctttgccaccaagctcatttgaaatggtaaacataggttgagtttagaaaagtattttatttaacatgatgataagttttgaacaaaattcagtgccaattacaaggattaattcattaaacgttcagaagtttcaatgagttcggttataccatacttcaaacttgtgaagattttggagttacaccaactctaatatcatctaacatgataagaaatttttttgccagccttgtcagttttaagcatcttatttatatgtaaatagaaagaatacatatttagaacacggtaaaaaatggctcagaacttttaagtgttgctctattgatcaagctaaatcatacttacatatatattacagaataattgtaaaccttgaaggaaaaacatcatctctctgtttcctgattgccttggtcataacacaggcatagagattttgatcatgcatctccctaatgtcacaaaatgtacacgtataattactttcatgtgagtggcagtacgccttttgaaggatgtaccctatgttttctgagtatatacaaccgctgtgtttgtggatctgactcaaacaaaaagcccctcaactcaataatcctcaagcaatgcctccaaatttttcctcctcgcagcatgcttcagcttctccattgcgatgagtcctacttgcctcaccctctcccttgacaacccgaatctgaggatcatttttcaaggccaaatattataaactaataaatataccaagaaactattatgaatagtttgataataatggaaaagttttagatttttttttatggcgagcaaacttgactaggcagttgaacatgtacaggaccttggtccataagagctgaagaaataatacttactgtctgctaatatcctcccatgtatggcattgttttcctatgccatgatataaccggataatgtccctctcacgctcgttgagagttgagtttaaaagcttgttgacttcttcctggtattagtagaatgtttatagttaaagcacattcaatgattctctaaggacataaggtaatgaggtctggtcatccatataccagtaccaactcagagctataatatgtttgtggagtcaacttttaaaaacaaaatgcttggagtcataatgatcttttgtcttgtggatggattatttccaaaaataaaagaaagaacaggattatggactagtagcaattagtgcaattatcttctggaacaaatatctctgtggttaccttgagataccactcctcaaatccatgccatggatcatttgcgacattttgatcctctatgtactgagaacaaggaaagggcgaaaaaggtttaatctcgtggcacatttcaaaattgaaaatgtataatggtgtttcaaagtagctatatagctgcttacactgtgcagtgtctctccaggtaagccgtttaaggatggaaatgcttgttgatccaacgaaagaaccttgttcacagcctgtatttttcaaccagtaaaaatgtctgtgacaatgccagaaatatcaaaggaatttaacaaaagaagttccaccgagcaagatgaagatatattacctctgtagcattgagtactttcttttctgatatgttgagtgaccctgctatgttctgagaataaccaccaaaaggttatagcaaaccatcagagacgcgacattcaaattatataatctttttcaaagaaaaacaaaagtagcatggttaaaaatacaatagcagcaactagaagtactttgcagttcacagaactgaaaaccatcataaaggttggcaaactgtcatacctgcgtttttaattttaattttaaaaataaaaagaaacaatgattaaaatacacaaagaaaactgcaattgtcaatattttgtaattcatggaaacagaacttgccaaatttttattttgatagtgcagtatgccttacttctattgttggagcaattccttgaacttccaactcatactttgcaccacgaatcgcaatcatccgctcgtgcagataatttggaagcctgtatgtttttgaagttttaactaatactctagaaacaccctggtatcgatcgaaacagtgaaataaggacaatgtatcaggtatcgattgagttaatctctgactgtaattctgaacttccatacatttgcctgagcacaggatagcagagaactcttacctggcgtatccaccagtatacataagtggaaattctaaagcccctggatgcatcaaatttttcgatcccacggagtaaccctatcagaccaccctgcaaaatgtgattggatcgcaacacgttactacatgtctcaagcacacaaaatcctcctagtgtgtccaacagatgattggactgaacagactctgttagaattgcaaaggcagctgaattaactgattccattacctgaatgaggtcagccaactcaacaccaaggttatcatacttctgggcaatggaaatgaccaaacggaggttgctcattgttagcatctcccttgcaagaaacgactcgtgcatccttgatcgtagctcgggcggtgatatcttcagcgaatgcgccagctgtttgtatgagggctcatttcccagcttctctttcagcctggttcaacaatggaggaacaaaccatcaggatcaagaaagctaaaaaaaattatgaagaaatggcatacaaatgcaaggtcactgagtgcaatgcagaatagcaatttgaatggccattactgaaaaatcatacgaatcaaatcacttaaatcatttgaagtattttggtgaatttcatacaccgatcaatcgatcttcactccgaagcttaagctgacgatgaaatgtaaacaatatacttgaacagtttcaatggttttgagaggaaatgataattcaaatgaaggattgatcatttcatatttgcagtgtgtggcaatggaggcatactttgatctttgctgctgcagccagatgccatccttgatcttgtgggagaggtggacgacct

SEQ ID NO: 28722 - DNA, 2216 bp, Oryza sativa
tccccatctcgattgttgcgggctgtgtatggtatgcaagatagtatctcagattctgatgccattctcccagttagtatgatctatggcgtcttcattgtatcagttattacattttgattggattagtgccaactctaaaccatgataaaattaacccaaacatttcattccccccaatcttgattgatgtgtataacaaacaagaaatcacacacaattgaatcgttggtactgggaaaaggaagcaacaattgcaactcacgattggattaacagatctttctttgcaatatatcccaatccacaaatcctgttattacattacaagcacgcgtacaaaggcaataccgaatcaggacgaacgaacatcggtacacacaaacatagcattagcaatgtcaaatgtccttttctatgtctgatatctggaacagtaaggtctactatgccagtaatacagtgtttcaagtagtctgattcctcgatcgtccatgtaaagaactcgctatccgttccgtccctgtattcttctcagtatggaataatcgattcgatgagctcctggagtggagccagctccttcttgtcaatcaggccaaattcctgcaccacataccaaaaggccggaaacaaatgaattttgctttccccagatttctatgaaccaagagcaaatatgagataaatgtaaacaatcctggtaatgagtttacaatctacaaacaaaagagacttacagttgtaaacagaatgaagtgcttgaagcacgtgttaagatgggcctcctccttgaggctgacaatcttctgaaaactggagtgatatatgtgggcataaacacgaaacaagcgcttgaaaattgtctttacaacctccttgaagtttggcgggaatggtgtgcctggtaaaggaattaaacccatatcagtgtcatgagttgtgtcaaaattggacaaatatatgagtagtgcctgcactatttctaaggtacacatgaccattccaacatcaaatgtttgtgacaaacaatgattaccaagcttttggggaaatatagattcatcatcaagttggccttcaatccagtccattaggaactccacatattttggcgctgacacttctatcggcttctttatctgtacaccatcagcccatctgtactcatatctgcataaattccatgtttctgttgttactttgttatgacgtgaccaatatatttaagtaattctgtacaaaaaatgaatcaggggcttgttgacatgacaactccactttgtaataggtggatataatacaaagtcactttataataggtggggtataatacaaagtgttcttggaaatttttgttccaaaaaggacccatcatgcttgtccatttagtcaatgttctagcctttaattatatcaggacaggtggaaagaagcaaagcactgtggacaggctaaaatggacagattcgaacatccttacctgaaaattccagaaaatttcctaaaattttgcttcggtgggctggtccaatcgacgcgatgcccacgggctggaaagtggaaactggctgcctcatcttgggctgggccgaattttatcgagaagattagacacgagtatgggctttgggcccagaactctccccaagcgccgcatctgctcccgagttttccgcttccgcaaagcgggaaaacgaagcgggaaaccgggcaaatacctcccatttcttcttttttttttttttgccttcgaaattcctctcatttgggggaaaggcgtcggcggcgagagagcggcggcggcgaagaagaagatggcgtccaacttctccttccctccgttgacgccggagcagatcgcggaggcgctgcacacctacggcctcgcccccaccgccaacctccgcgcggaggacatcgccaacccgcagccggatctcctccccgccgtcatctccaacttcctcgccaccgtcgtcgaccccaccgggtgcgtgcgcgcgcctccccctcccccctctcgccggcgccgcccgctcggtgtttgtaattgttgggtggagattttgcagcgccgacgacctcgacgggcagctaggattcgacgcgctggcgtcgctcgacaacccggagcactacatggagggcatccgggtactccgcctccacaagagggccagcgctttcctcgagtccatccagttccccgggtt

SEQ ID NO: 28723 - DNA, 3081 bp, Oryza sativa
gtttcacctggccctgtagtattaggccaaattctcttctaggtctgagtgtccgactttctgacttcattatataacttgcagttctatattgtgttggttagaaatgtcagaagcgtccaggtcaaatagggatagaaaccagaaggtttgcagctttgccatttggacaagacgatctttgtgtataattggattgaaaaatagtttggaaaacccatttacattgtaacacactatcatttactcttgacatatgttaagctacactgaaatggttctcgctgacatgctgaaattttagatatgcagaaaagacgatttctcactaaacgccttgttattttctttatacagattgccaaaaatgattttgagttggtgaaactagcacaagaaaattccaagttattgccaaaaattgttgagtccccagaaaagcttcaggttcgatctgttcctcttttttctctattgccgctggcaggatggtcagtcttgtttaaatacctgaattacttcaccacaatcatagatggtttgtagtgatcgtgtgcaatggtttttgtcctctatatgtttagtttttagtgctgatctaggttttttttttcacataatctggtattaaagggacatttggatatttaccattctaaaactcttcaaaaagtttgtgagaaattgaaaaacaatgtaaatactattatttttgcatgcacaactgacattcttccaatgccgtagaacttcgtatttactctgtatattatttgttcattaaaaagttgcagttattgccagatgctctgtcttgattctcgaggacacactttcactagtttaatactcctcgcttctattcaactgctatttggaaatatatgcatatatttgaatcaatcagatcaacactttgttcttctaacagcatataaattatctttataagcttgcatcactaattttggattttattctgtattacagagggcccttgaagagaagaaaacagctcgtgctgaattaaagaatgctgagaagatagcaacgcaaagtgtacaagagaaaactgccactttggagatatacagtaaggtagtcttgttccactcttcattacaaaacaccgaaggtagaaggtaacttgtatttgccgattggccgtaacaatatctagcaaatatagggttacttcatctgtttcatattgattcaatttcctgatattccactgtattgtttggatcatctgtttgttgcggttgttggggctgacttgttgcaagagtggcacttggctacttactactgttccttgtgatgcttgacctactgatccattaataactgcagatgctgtctccattttgcagggttatgaaaaattgtcgaagcattctactaaaatccaggctttacaagaacaggtatggacatctgcaatgctagtttttcattatggagttggattaatcttaagatgaaaccctagtaactctcttatttattattgctgttaggttactgcaactaaagcccttgagaaagaagtcaaagcgcgcaaaactaagattagtgatgaaagtgttgaaattatggcccttgacacaaagattattgaatgggatgggaaaggttgtcaaactgtacttaccttttgtagtattgctgaatttgtgtatgctctttccattctgaaatactcttttcctcacgttattgcatgaatacctttttgattagtgcatgaaatggaggagcatgttaaagctaaagaaaaaaaaaaggatcaaatagtagcagacgaaaatcagaagctggctgctttgagttctgaagttgaatggaaactcaagtgtcttgaacctcgtgaaaggaaagtagaggaaacaattgcaaaggtgatgatttcgtcctgaaattttgtgtggttcaaactcaatgtctttgaaaacttctttttccctctgaatcattgatttctggtgttcacatgccacatgccacctaatacaatctaatgttccaaagaggcttcattgtatgcgctagtattggtccaggaacatatgctgaccggcctgactatctccctaatatgctaaagcctgtagattatattatcttatttgttaatactatgatcctatttcaactatacttgacatatttttctgtcattacaggctactaaactatgtgcggaagttgattcaacaaggactgatgctgcagaagaactacagctgatatatgctaaatttcaacaaattggacatgcggtatgtttttattagaggactatttcctataatcattgataaaattgttggttgctaatataatccttcttcagtttacttgctacaaggataattttaagtctttcttggaacaagttgatgaggtgagcaaagaaactttagaaagtttagatcgtcaagctgtggagccattggacacatctgcaacattgtagattgagaaaggttaggtcatccagcaattgacacccactttcttgttgcagttaacagcatttcagctgttattgtagcatttcaagctaagtttggtagacggcagttttgcaataccttgctttcttgctgtgctgtaatcctaatgaaactcatctctccttgttttgaatggcagagaactcttgcagccccgctccctgaaaagaggatagccacttggagaagatagcctagtgtgttttatgccacagctgtaaatttggaattgagatgtttttgttatcactggtgacagttatggaccttatggtctgtttgaacctcgtctgaccaattcggtgactgagaatacttcatcgaattatctgcagtagttatgtaaaaatgccttgaatcactctgatatggaaatgttggtgtcaggttgccaagtaaaaactttggattatctggcctactatctgactacataattcattcctttagtatggtttaacggtatttatcaaaacgctgatgcacggtggtgttaggtcagcaaatctggagcacagatcgtgatatggacggatgtaacaactttcctcttcattac

SEQ ID NO: 28724 - DNA, 1782 bp, Oryza sativa
tttttttctcaaacgcgcaaaaggattgcatgtcaatatattactccatcccaaaatgtttgatgccgttgactttttaaatatgtttgaccgttcgtcttattcaaaaaaatttaagtaattattaattctttttctatcatttgattcattgttaaatatacttttatgtatacatatagttttacatatttcataaagttattgaataagataaacggtcaaacatgtttaaaaaagtcaacggcgtcaaacatttagggatgaagggagtagaagaaaagaatatttgttacacaacacaattagtcagaccaactgatgccaagagaggaggtaaacaaaagaccaaggaaaaaaatacgacttgggtactatgactccaaaaggcgggaagggggcagagcccaccatggtggtcaagtcgtaaagttgagtcgaggtacccttggaccgacttgtcgacttggtcgactagtccacgacttgtccatgactagtccatgacttggtcatgcaaaaacaggggatacaatatataatttttactactattatactgggctaagaaatgtatatagtataaactataaactatggagtagcaaagcaagacaattagtcaacaataaaataaactaaagtactaaacacaataagccaattatcatggtgaattggtaatttgctacgactaattacgactaatttacgaccgattttacgactaatgtacgactaaccacgactaaccatgactatcacacgacttgctatttggtcgagtcgtggttctttagtcgactagcttgaccgactttacgactaatcacgattagtcgggtgacttgataacattggagcccactactctcccaaaaaaacccccaaaattagcaatgccagctaacgaccatagatggccctctgagaggatggactgcaggacctccgagactgaagataatgcagagtcgaaaaccatggagttccattccttccacagttgctaggagaccaagaggatcagagaatcgaagtcaggacggagatgctcaggcatgcatgccctaaacgaaggccaccaatcctggaggcagctaccacgggagggagaaatggcaacccaaccaagaggtgacaacactcggagccatacttgtcaagcgaacacgcaatcaggaggatgtggttcgccgtcttaagctcttgagcgcaaaaggggaagaccgagtgaccgtcaatgtcgtgcttctggaagagatcggtcgtccaacagtgtcactgaaatgcaaaccagaggaagaacttacatttagcaggatccctcgcatgccagagaagatcagcacaagcaaatgactgctggccataaaagaacgtctggtacgtcgaacgcgctgagtagcgctagtcacttgtccaacaccaaacaagacgatctccgacacccgacgagagctggaagtgagacactgcatcccaaatacgaagaaactaggagatgaccgggacaattagggtgccacggatgtcggaaacccaagaattgttcgtcaggccagaagcgaccgtgtacggacctcagatgcactggggcacgacgaagaggagatcaggagccaaggaagccattgagcggccatcaatccattggtcagtctagaagagcaccgattcaccatccccggcatgaagaaggtggacgcatcgaacatgtcggaaacagtccgctcgacgagggccttcaaaccatcacaataaggatgcccagagcgctga

SEQ ID NO: 28725 - DNA, 843 bp, Oryza sativa
cacacttggccgttaggtcatatcgacctcccggtcaccttcggtggatccgccaacttccgcacggagcgggtgaacttcgatgtggcggacctcagtctgccctacaacgcggtcctggggaggcccgcgttggtgaagttcatggcggcggtccactacgcctatctccagatgaagatgccgggccccggtggccccatcaccgtccatggcgagctcaaagtcgcgcttgcttgcatggagcagcgcgcggaccacctcgccgcggcatcaaagcccgagggtggcgacgagaggttcagcgcctccgtcccagccgccccgaggcagcgaatgatcacatgcgacgaggtcccgatcaagcaggtagccctgggcgacggcccgtccaagaccacacgaatcggtggtcttctggacggcaaataggaagacgcgctcgtctccttcctgcgggcaaacgctgacgtcttcgcatggagaccagcggacatgcccggggtccccagggaggtgattgagcactgtctcgccgtgcggccgggcgcaaggccagtccggcagaaagtgcggcggcaggccccggaacgtcaagccttcatccgcgaggaggtggcgcgacttctggaggccggattcatccgtgaggtcatccatccggagtggctggcgaatccggtcgtcgttcccaaggcgaacggcaagcttcggatgtgcatcgactacaccgaccttaacaaggcatgtgctaaggacccttaccccctgccacgcatagatcagattgtcaactccaccgcggggtgcgaacctttgtgttttttagatgcatactctggt

SEQ ID NO: 28726 - DNA, 690 bp, Oryza sativa
cgccaggtgcgacgtatgaaacgccatttcgacgggatagagcttcggcacgtgcccagacgggataacgcggtcgccgatggactctcaaggctcgcttcctcgcgagcccagaccccaccgggcgcctttgaagaaaggcttgcccagccgtcggcgcgacccgaccccctaggggagacggatgcacctgaacggcccccgaggcccgtcggagtccaggcctcgggacccgaggggagcgctcccagctcccctagattgattgcttggatcactgagatccaggtgtacctcgcagataagactctacccgaggaccgcgaagggagtgaacgcgtccagtgtatctccaagcgctacgtgctggtggaagggaccctctatcggcgcgcggctaacggagtcctcctgaagtgcattcctcgggaacaaggcgtcgagcttcttgccgatatccatgaaggcgagtgcggagcccactccgcctcacgcaccttggtcggaaaggcctttcgccagggtttctattggccgacggcactcaacgatgcggtcgacctggtccggcggtgcaaggcgtgccagttccacgccaggcaaccccatcagctggcccaggccctgcagaccatacctctttcatggccgtttgctgtctgggggctcgatatcctgggtccgtttagg

SEQ ID NO: 28727 - DNA, 635 bp, Oryza sativa
tgtccttacataaatatgttttcctgtctgtccattctaatactgttgggctgtttcgccgtgctactgaactgaactttttgcaatcttcgcaggcaaatcgaaggaggaagcaatgagcgactacatcaccaaggtgaagcagctcctggaggaggctgttgctgcagcctcttaagaagttatgaactctatgctacatggcttctgtcagctgaacaactctatgctaatctggttgctgacaacttaccattctatcaattcgggatgtgaactatgtacctctttgtgtactgttgcataatttatccatctatttatgaagactattagtcctatgaatcatattatcttgtaatctttcatctctctggctgtgtactgcacaatagaaaaataatggttgtcaagccagttacatgccccaatttcaagtaaccataagcagtaataaccatcatatcctggatcatattccaatctcagaagacaacacaatctaaagagaaaaaagatctattgatcagaaggccaaaaacatatctatatgaaaaatgaaaatgcttaattgttcatagttagatagatcaacaacaccgcactgcacacatatatactgtttactcataatg

SEQ ID NO: 28728 - DNA, 5894 bp, Oryza sativa
tatcctgtgtcatttggttggtggcatgatggtttcattccctgcctgacctgaaaaacctgataggttcattagcctagctcaggccaccaaaaacgagcgcctggctcagtctagttacacaaaacaaaacgcgctaatcaagcttgtcctgtcacggacccacgactgtgcatgcaaaaggtgttggaatattttattgttgaatcttggttggtgcaaacgaaccgaaaatacaacatttgcttatatgcgatagattaggatatgagataccgttttatttaaataatatctaccttaaccatgtaattatgaaccatctaatctcaatttagtttcctcaggcttaggctactaaccaaacaacatttgctcaggctagcctcatcaggcaagttttgacaggatagctaatgcctcttaggcatgtagttttcttaggcacatcactcaggtagccaaccaaacaggcccaaatccacaggccaaacaggccaaattgctaacgtgagactatgcctcccggtcacggtcaacaccagtgtagcagcactgcaaattaagaatgccaaattaattattgcaaggactatatactgttaataacgcaagaacaggtaaccgatcgagcagtttatcgtacctttacccaaaagaatagatgtccaaatgaaactagaacaccaataagaccgaacactccttcccatgtcaaccccaatgacggcagcgctagagctggaactgaagctgaatgggtcggatcagcatgtacagccagtagatatatgccataaatcaccagcgctgagaatgtcatgtagagaatatgacccacatgccgactcaagctcttgcaaatcctctcaccgaacatgccacagggaaggcatacattacccagaccccaaacagatgcaaatgcggcgagcatccagccgtcataaccagccggcagaaaaggtcgggcaagaaacagaactgccaaagaggtgctgaggatgtagacgtagccgatttgccttttgttccaaatctcgtcgtccgcctgtgtatacacattaatatttatatagagagagagagttgtggattgttataataacggagcgttgcttaaggcacaaaactggaatgtatttttttcacaagacaaaaattactaaatttcttgaaatgaaaataacacacaaaaaaaaaggtgtagcagtactagagggggggtgaatggtagagaacaccaaaaacacaaaaactgagcctgagaacactgtgtttaaatctgctggcatcatgtcttctttgaatgcatcttcttcgaagtcaaatgttgtgaatgcaaaaccttctgttgatgcaaaatcattgatttcaaaaccatctacttcacaaacttgtcgtgagaagtacccttgttctttttgcggaaaagatggacatttggttggtttttattttcgacttgcccgcaaacagaaaaaggaaagagaaattgcttttgcgaaacgacggtggcaaaaatcgggtttttgttcgaggagcacggttagaccgcagttgaacgggcggtcagaccggcctcgggacagtttttcgcatacttcaaatcggacttttgtgaaaccaaaaggtaagttttcagctaagtctgattctgattttgtcagtgcatatgtacctactggttctattggtcgtgtgactcagtgttggattccaaaatttcttatttctaaccccaacacagaggcctcgacatcttctcgttcgtaggtattttggcggcatactccccatgtgcattcaacgttgagatggcgattgctttttatggtaacatcaatttatttttggattgacatatttttggttctactctctcgattattagctttttatatgctagtgtttgaggtagtaatttttgttaatacaagtggatatatgtcgattcatgagaaccttggtgatatcattggcaattggatgtcttttttaaaatctttgatttcttcttgatttttctttggggagaattggaggttaatttgagggggagtttgtgctttttcatgcattcatgtttattttatgcatttgctctaattttgaaaataaataaaaataagaaaaataagagctttgttttatacctctagtatattcttgtgcatgctagcaaaataattgaggtctatttgttgctatgttagcttgtatgcattttagtctttatatgaagcttagatattgcttttaagtgagatgatgcatgacactaattcttttacttgaattaagaaaatatgcaatattaatgctagcatatggtttgatttttaaatgcttatatatagctttattgaattgttattcctcaaatagctttgtaattgctcattgtgaaaagagaataaaaaatacgaaaaaataaataccgaatccttggaagcagtcttgacgataaggacgtattcgatgtgagcaaaaataatgggtgccgaatccttggaaacagtcttgacgacaaggacgtacccggaataattgagagaaaaaaatatgagcaaaaaagtctcaaggaaagaaaaagttaaaaattctcttggttgttttgtactaaagctaatttgataaacagtaataaatgcaataggtatatatgtatagtgtttatttttcaacctatgtgcttgtgaatatattgcattataaatcatttgaagtcatgagtccttattgatgatttgagcttaattgtaatatctttgattcatgtttatactatgatgcatgcttgttaactagttgatgaatttatctcccttatcttgcaaaacatgatcattaattgcttttggtacatttcaaagctctcgaaaaaaatagaaaatggaaaataaaaatttgttattacaagtggcaagcatgacatcatttcatttgtgctttattgtcattatttctcttttgaattcttgatgaaatcattgtcaaagggggagaaatatacaaaatgcatgcttcttggaaaggggagaattgaactgaaactgtttcgatttacaaaatgcatgcttctcgaaaaggggagaattgaactgatgaactgtttcgatttttaaaaatagtcgattttgtgctttgattgcaaattgatgggagaaattctttcttttaaaaagggggagagtttttctttttctgctttgattgcaaattgatgggagaaattctttcttttaaaaagggggagagtttttctttttcacttttgtgatttttgtttttatttttcaaaaacacaaatttgcattttggagatgttgccaatgtattcatcaagggggagattgtgaaatcattgtcatgattaataattgtgatgaacaattggctatgcaaatgatttaatcaaagaattggtttgaaaagatgtgcgaatgttagtgtgagtgcgtgtgactaatgtgagtcaggttgtgatatctgtgcccagaaacggttgttttgtctgattgtgtgcaggtgacttgaggtcagccttagtcaatggtgaggaccgggactatgctcaagaggagcagaggtctattgcggtcgggataccatgtaagaaggtgactagagctagtattcttggaggtcaacttcggtcaacagtggggatcgggactaaactcagggaggagttgaggtccagacggtcgaggatatcgggtgacgaagttggatacgagatgtcacacggtggatggacaccgtgtgggagagatcttcgcaacaggcttcacgaggtgtgcgtgcaagtgctggtgttcgcgaaggagattggagtgagaaattgagaaaagggtatatggtgctacagtacacgtggtactgtagcatgcgtatggatggtatctatgcatgtatgttgatcatgcatgtgtggctcggtgcgttcttcatgcatgtgtgatggttcggtgggcttcggtggcagctggctggaggccgaaccggtccaggagcagcagcacgttggcccacgtgcgataggcccaagcaggagcaagcgcaggagatcgagtccgatgcggttgattgcggctgtgcgagttttgggaaattgtaaaaggtttggaaattgagggtttgagtcctactgtgaaaaggagttctacacctattttgagtagggggtttttcatgtataaatagagggggagcgtgaggcttcccggtatcgcttttttatcgcttttcagagcgtggagctgatagtttagttagggtttcgagtttagtcgagatttttgtaaggagtgttgttagtgcactttgtaaacacagagagaagcaataaagttgtcatctactttgagagttcttcgatttgtgtttcatcgggttcggcggttcgaccggcggcgtgcaagcggttcgactggcggcgtgcgagcggtccgaccggcggcggcgacaggactacgtcgagatttccatcgatttgagggtaacttttatttccgctaaaagtttttgggttttagttttctctaccattcacccccctctggtaggcttggtttcttgtgttcgatcctacactcttgagggaaaaaaattacatctccatttttattatggtcatctttattgtcaactgctaccttttgaggtcttttggcagttgaaagttgaaacaagaaaacatattactctaataaggtgcaagctagcaggagatctatgcaacaaatagtatctccaaaaccaagctattaaaatcttgcaatactagtaggaaataacatgatttttcagcaggacaactgcaacctaactatgcctttgttacaccatgccattggaaagtatgaaagacagaaagagcagattgttcagcgggactgtacctttgctgtggctgcggtgccattatccgtcaaaggaagggtataagcattgtgaggcgtcgagctctgcggagcagtttcattgggcctcagtgtgatcaatggcaatctgagaccattggagcctgaaactgcatatcctctgtcggaagaagagctgccggagatgtgagaggtaaccgaggcaagtaacaacaatgcattcagatttgggaatagcaactgatcgtcagctgcagcaatagcaaagaaatcatgcagttaggcacaagtaataacagaggcaagtttaaatagtgctgaacaagttggatataggcttgaactggtttcagaccatccattttaaggtgtcgtagaacagagacaagcagtattaacataccattcagctactactggttttccctatctacaatattcagatcatcatctccgaatttccacaacattcagataaaactatcatcaagaaacacaaaataccaaagtactgaacaatttacagtactgaaaactacaaaatccacattattgaacggacaaaagggacctgaaaaacataaacattgcccacaggaaactcagtcaatctagcaagcttggcaatgaaaaaatgccaggcaatctgcaattagtgaactatactagacttactgatgcagttttaacatttcaagaacttgtgcttcaggaaattcagtcactgtcatcacttgtcagaattcagtccctgtcatctacggaatcatcaataatctcaagttatgcagaccattcagaactacataaacaatgttcagagaattcagacacatgcatatcgagctagtctgcttactttcactgttgggcatgacaaggacgatgtgcagggtctcccggctgcgaggcaggtcgatgagcagaggagttagccgcccatggatgccggcgcgaacgcagagtgtaaactcgtcgtagcccagaatgcctgcgagcttctct

SEQ ID NO: 28729 - DNA, 680 bp, Oryza sativa
ttgtgaagacgcgcaaccaatagaccttactctcggatctagcggaaactttcgaaagtctccgctccgcccgcataaagctgaaccccgacaagtgcgtgttcggcgtacctgcgggcaagcttctcgggttcttggtctctgcccgaggcatcgaggccaaccccgagaagatacgagctatagagcggatgcgcccccccagcaagcttagggatatgtaatgcgtcaccggctgtatggccgccctaagtcggttcatatcgaggctgggagagaaggcgctacccctatttaagctcctcaaacgctccgggccgtttacctggacggaggaagctgagcgggccctcactcagttgaaggcgtatctcagctctcccccagtcctggtcgccccggagctagatgaaccgttgctactctacctggcggcagccccgcaggtggtcagtgcggcgttggttgtggagcgcgatgaggacaaccctcattccgcgcatccccaccctgtgccgactcgacccgggagagagcagggaggagaggctcccgagccgaacggcggcccgaggcccccgacgaccggagctggccctccgcctgcttgtcacacggtgtcaggcgcccccgacccccagaatggccccggggccactgcgggaaggccgcacctgccg

SEQ ID NO: 28730 - DNA, 6122 bp, Oryza sativa
acctgcacactacaacatagaaatttgctgcatctagcttctgagttctgatagctgtccatattcagtcttctagtgtgattatgtcctttcacaacatgtttgtgaaatgtcatggtttttatctatatttttggttttgtgctgaaaagtagtagaagttactacatgctagatgtgttttgactatctatttctttgtcaaacttgtaaaatctcactgctacttccaaatttttaactatctattgccctcatgtcccttttgtaatcaattagtcaattcttatatgaatctgatctaccttgccaacagttctttatattaacttgttactgtgttttgtgttaacgaagatatttcacgatgacgttgctaactatttctttttctataatcttctgaagctcgtcctggcatattcgcccagagggacagggcgaaatgggatgcatggaaagctgttgaaggtccatatacttctctctgtccttacataaatatgttttcctgtctgtccattctaatactgttgggctgtttcgccgtgctactgaactgaactttttgcaatcttcgcaggcaaatcgaaggaggaagcaatgagcgactacatcaccaaggtgaagcagctcctggaggaggctgctgctgcagcctcttaagaagttatgaactctatgctacatggcttctgtcagctgaacaactctatgctaatctggttgctgacaacttaccattctatcaattcgggatgtgaactatgtacctctttgtgtactgttgcataatttatccatctatttatgaagactattagtcctatgaatcatattatcttgtaatctttcatctctctggctgtgtactgcacaatagaaaaataatggttgtcaagccagttacatgccccaatttcaagtaaccataagcagtaataaccatcatatcctggatcatattccaatctcagaagacaacacaatctaaagagaaaaaagatctattgatcagaaggccaaaaacatatctatatgaaaaatgaaaatgcttaattgttcatagttagatagatcaacaacaccgcactgcacacatatatactgtttactcatcatgttcattcattctacacatgcatatgatctcatctggcaatggcaagaagccaagaactcctgaaaaaaaaaggatgaaatcttcagagatgtccatagcctaagacctgaccacctgagaagaggttgaggcagagcagggaagcagccagcagcgtccctggaatccaccacctgacaccctcgtcggcgaacatggcgcacagcaccaggcacagcagcagcagcatgtagaaccccagcccggaccagaatccgccgccgccgcaccactcgccgccggcggtgacgccgtacttggcggcgtccgccgggtagtagtatattccggcgaagtaggcgaccaccagcagcaggaccaagaacgccatgatgttctgcagcagcatcacggatagcacgatcgccaccggcacgaccaccacctcgctccggcggctgaggagcacggcggcgagcagcaggagcccgccggcggcgaccagggtgacggcattgtcggccaccgtccccggcaggttcgccgccttgtcgtaccactccgtcagggtctcgttgtagttgacccagaccagggccaccacgatgaggagtggcaccaccggagacggcccaccaccgccgccgcggcggcccagcccccacgccggcgaggtaccccggtagtagctcatgatcacctcttcttctttgagctctttctgcttcttatgctacttctgttcttgctgcttttaagcacactacttagtactactcagttgtaagtagcattagcagtgaaaaagtccaggtttgataatatttagtttctgaaatgtggattagtgttcatcttgttccaactaattttaactacctgcttgtgtcctgatgtcaattgtcttggaatttagttgaggtagggacctgcttaaagctggtagatgaactgattttagagaaagatggcatagaggatagtgatttgtaggtcttgtcattttcatgtatgtgtcattctttgtttttgtttggtttggctggggttattaactggaacaaaatcttctattgcctccatgtagacttgggaggtacttagcttagcaacagaaaatgatggctgatatcattaagtttaccatgggctgcttcaaccatacaaagtaaactgattaaactcagtagttgtggactcagtacaactgcttttattctaatggttatctaagaagattgtaaaaagcttatgcaatcaattggattcatttcagagtttcagattagaaatttcagttcattagcaaattccttgattagtttcagattaggagccatactgacaaaagaaggcattagtacatggcaagatgaaccaaacaaagccaacatatccggttttttttttctcaaattcactacactgttgagagaagacatgaaattggaagcattttctgaaaagtggacttcctttggcgacaaatgaataatgatccataaataagagagaatagaaaattaatctccattcatataagaagatttgatttttcatttagccattagcctccaactcatgtttttcctttcccccttgatatatatcactcagaatttcttgctagataagagagtgcaccagcaatctgctgagcttcttgttacacagtcaaaaacctgtgaagatattggcagcctattgaaggccatatacaagcaaagcccctactccggcaatgccgattatcaaactgacgatcactgtaataggtggtagcgcaccaccaatcgccctcccggtttctgcatcatatttcgcgaaccgcttctttggtgcgttgcattgtgggcagccatattcatcaggctgaaatggataaaaagcactagttgaattgttggatacacctgattttgcgggctgtgagtgccaaaagactgattctctgtgaaagaattgaagtgaatcttacctgttcttcgaaaggcttgggaaggaagtatatgtatccacaatcaaggcaaatgtgtgttgctctagcctgtgacaattcacaactttgcaggttgaggcttaaaagttggaaagagcagacgattgcaggcagcataagctctgagaagcagacagaactatcttgagcttaccttttgtgattccgtcaatttccggccaaatctcggaggcgccggccttttcggaagtcgcttcacatcaacttgtgcacccctgagatggcgcgaaatgacagcaggagatgaaatgtaaggaacttgaaggatccaaagtacttaccatgaaaagtacatatttctactagtattactgtctgaattttgaatataactgcataatgagtgcatgtacaggatttcaaagttacgaaaaaattgtaatgctggggaggataagtccttacctgctaaccacaaagtagacagagtctggctttgcctggatggctgtcttggtgaaccccagcttatctgcaggccatagttcatctccaaagaagctacttgtgtagagcacctggtcacctgatttcaggcctgctcttgccgcgttccctccagaatccacagcctaaagcaaatgccaaatgaactattactagtcactaattataacactttctgcatctccagctctaaggcaagctgtacatactgaaggcaaacagatatttttagcaggaaaagagtttggagttgcatttttaaccgtcgtagtagttcctagcttcaagtcccccccccccccccctttaggcataagccagtctggctgattgctttgtgtaacaaaaactcttttcctgctaatatattgacgtgcaatccttttgcacgttcaaaaaaaaaaacagatattcttgataagtcctaactcatgtagaagttgattcaacaggttgttatagttttctgagaaattaatccactaatggcaaagaactagttttatgaattaggacttgttgaagatattcctaataagtcctaactcatttttcctgaagaaattcttctaaaaatgtaagaatttcttcaggaaatatagtgatcttgagacagcaattcaatgctgccccttttttttctctgttaatggatcatgaagataaaacaagagcagggaatatacagtgaatagcaatctagtatgttcttgatgagacagcaatcaagtagtgaaaatttccattggttgatcatgcagagaaagaagaacaggtggcatcatgcatggaagtatggaagcaagctgtgttatatactgacggtgatgacgacgccgccgccggtcttttggccgagggtgaggccgagcggcttgtcgacctccacctcgatgtttttcgccgcgccggcggtcctcgcgttcacctgaagcaccctccgccgccgcccgctgccgccgccgacagaggccgcccaccgcctgtccaccagtgacagcccatggaaggccgtcttctgcactcagcacagcatcatcatcatcaacaatatcatcaaacattatcacacaagaaaccagaaaagcaagaagagaaaaaaaacatcaagaatcaatcaatgaaccaagaagagaaaaaaaaacatcaagaatcgatcaatggatagaatcaatcaatgaagcaagaagagattaaaaaaaaacatcaagaatcaatcaatggatatgcatatgtatcacacttacagttgatgatgagaggatggaagggggaggggagtgctgggctctgacaatggagcagtgcttggagggggcaggagcagaggagagtgtggcagccatggcggtggtgagaggatggcagcagtgcaggtggtgtggaggttgagggagaagatggctgccattttggatggagatggtgtggctaaggcaagagtgatgtgtgtggcctcacagtcacaaactcacaaccaaagggagaggcatacctgtggaaactgtgaacctgacaccgacatgtattccattctagaaaaaaaaattactccctccattctaaaatataaatatttttagtatagtgacaagtcaaacattttaaactttaactattaatagcaaaaaaaaaataaaagatcaaccatagaaaattaatgttactagatttatcattaaacaaactatcataatatgcaactctttttatttgaaacattttatttttataaagatattattggtcaaagtagcatatcggagaccgtatcagagtccaatagttgttatattttgtgacggagggagtagatcgagattcatagctaaaattattctctccatatttataatacttattgttattgtttagataagactgttgtcaaactttaaaaacttttattataaataacatctaaaatatttgtcttagaaatatgatgaccatatgtatacatatgatcttaaaaagcacttcaacaaatcatatatttatttatatttttcatatatagtaataaaaaatagtgatcaaagttattttttgaaaactatgtccggttcaaaccaataagtattatcagccttaggtagtaatggcatttttaaaacggagggtgtagccattcaccctgaaactgtggctacaaatggacagcttggaagaacgatggccatgtttgagatttcacaaacaattcaccttttttttttgtttgatgtagaagtctgggaaactttcatgttctaaatgcattctcagtttggttattgatcgaaaatccaaatggacataaaagtgacattctcagtcaaaaccagcaaatttgtggcctgtgaacacaagccaaatatatctcatgtgcaaaaggatgaacatgggtaccagtacaatgcacatttatccgggacgatcacaaaacaagccatagataccatatagaaagcacagacttaaaagaaacagaatgcagctgggaggtaacaaggtggcaaccatatccaacatacggactgcagtatttgtttcacattacagggcatccat

SEQ ID NO: 28731 - DNA, 1053 bp, Oryza sativa
aacatggtgtatatgttctattacagtaacaactctaagttacctactgatgcctcctccttgtcctccttgcaggggtggattcagaaactcttgacctcctaccctgtgctggccctcccgctataacacccacggtgctagaagtcgacgcttgctccacagatgatgactgttggggagcgacagcagcagccggtgcagcaccattagcatcaggaggtggcaaaggagcctgattgccactcccagcatcagcattgaccacctgctgctgtgttgctggtgcagaaggcgcatcttgtcttgcctgccttcgacccctaccccttggccggggtgcagatgaagccgcctggcctaccactatatcttggttttgcatcaaccgcctcaccatgtttgcaatgcctcctcttgtgtctggcctttgcagctgctgcctcaagctctcggtcctctgcgcactcggcctgggagggatttggatatcatttctggaggagttctcctcgccacctcctcttccataaatcggtgtgacgtttacttcgagcacctcgcccttgcagacagggcaatcagagtgctctgaatgtccatgaagccactggtatatgcaaggccagcagaagaggtggccacaaggggtaaccacaggatctttagctgattcaaagcagatattgcattcgaagctgccgttgcatccgcaaccgtcatccttcttggtggcatcactgccatcaccatcaagcatctgcctccttgatgcctcaagagaattatgagacctctggatggcccgcgccagattatcggcttccgggctattcgcccgtcggctgcggctcactggcccagtccccgccctcccattcccgacgccgtgttgatcgctcacctggatcaacctccgcagccgattctccggcgtcatagggcggcttgcagcagcaatctctgctccccttataagaccagtaggtgggattgctccaccggtctgcacaagcatttccaacgcagcacaagcaaaaatctgtggcagcg

SEQ ID NO: 28732 - DNA, 1950 bp, Oryza sativa
acggcaatgcattcggattcgggaatatcatctgatcattcgctgcagccatagcaaacaaatcacgcagttagaaagagtaatacacaagaattacagctcttgcaagtaaaaacagtgccagtaattcacatgttaaaatgctactcggatgctgaatttcacactgaaaaatctacaacattcagatgaatcctacagcattcagttaaacccaaggtgcacacaattgtctgatgatgcctgaaatgaatattcatcagataagtgcagatatatttcacttgtatagttctgtcgttctaaagtattcttcagacaagtcctaacagacaaaaaaagatgagctgaactagctaaaaaggcccagaaaaacagaagcactgcccacgtcatgccatgcattcctttcagagcaaaattaagaattacataagtaatgttcagaaaatccagcaacatgcatattggatgtcgaatttcacactaaactaccgatatgatcattgtgaaacaagttgaatagacaatgcaggcttgaacttgtttcaatccatccactttagttctgagtcacaacaatagtaataacccagatgcacaccatatttacataccaatcaagcattcagctacagtattcagaccattgtgtgaaaaagtctacaaagctcagataaaccctacaacattcagataagcccaaagtgcatagaattgtctggtggtggccgagattaaaattcggcagatgaatttcacttctgctgttctacagtatattcttcagacaaatcctaactctacaagcaaacacatcatgactacattttcagcaaattccacaacaggcacaaactactgaaaacaggaaaatctacagtgctggactgacgtaacaaaatcagagaaacagagacaaagcaaaattcagaatcacataaacattgttcagaaaattcagcaacattcatactcgaactgggatttttaccttcgctgttggtcctgaggaggacgatgttcagggtctcccggctgcgaggcaggtcgatgagcagaggggtgaactgcccatggcggccggcgctgacgcacatcgtgaagtcgtcgtagcccacaagctccgcgatcttctctctcaggagcctcaccgacctccctctgatctcaaccgtagtccagatttctccctcgctggtgttgtcgaggtcggcttcgtccacgaactggatctcccgcagcggctgggggaagcacgccctgacgaagaacccgggctgcacaaaatcaacaacggtagcagaaggaaattcgatcaatccacaaattgtactgcacggttaattcttgcaagaaatcaagattaatttccgacgaaatcagcatcaagacacaaaacaaaaaaacaggaatcgcaagaagagagcggagaaggatcggagaagctcacctgagtggcgatcgggagccccggcatgtctccactcggggggacgcgcaccacctcccacagcaacgtatcttcgccctcgaagttggcatccatgagcagaggggtgaactgcccatggcggccggcgctgacgcacatcgtgaagtcttcgtagcccacaagcttcgcgatcttctctttcaggagcctcaccgacctccctctggtctcaaccgtagtccagatttctccctcgccgatgttgtcgaggccgccttcgcccacgaactcgatcactcgcagcagcggtgggaagcacgccgcgacgaagccggactgcacaaaatcaacaatggcagcagaaggaattcgatcaattcacagattgtaccacacggttagttcttgcaacaagccaacaaccaaatcaactcccacccaaatcaactccaagagacgcaacaaacacacaagaagagaaagaagaggaggagctcacctgagcggcgatcggg

SEQ ID NO: 28733 - DNA, 1132 bp, Oryza sativa
ccgaccagtctgcaacggcggtttcttcctccatggcgacggatctgccggaggcggccgggagccctactggaaacggatgaattggtttttttcttcctctgctttgcgattgcgattgcgatttgctcggatggttcggtcgcgctagcgcatgcacatcgacctatttaaaaggataaaacggccgagtccgagatcgaactgttcaggccatcaccgagtcagagactgaggccctgtttagatgagactgaacttttaagtccctatcacatcggatgtttggacgctaattataaatattaaacgtagactattaataaaacccaaccataatcttggactaattcgcgagacgaatcttttgagcataattaatccatgattagcctatgtgatgctatagtaaacattctctaattatagattaattaggcttaaaaaatttgtctcgcgaattagctttcatttatgtaattagttttgtaagtagtctatatttaatactctaaattagtgtctaaatatagggactaaagttaagtcctggatccaaacaccacctgaataatactggatcccggcctattccctggccggccagcccgggcagtaaaattccacgggccaattttccggaccatttggaagcccatcagctgggaaattcccggcccgatccacgtggaaaatctcgtcgcgtcgctcgcgtgccgcagcgacgattcccctctcgcgaacgaaggtcgccgccgccgccagtccttcccctccagcgagatgcagcgccaagcctccctcctccaagatctgggttgagctgctcttcacatcctctcctttttctaggttttctataggtgatgcacgggtttgtggttgagtcccatctctgctcccgatgctccaatcctcctctcctcctggattctgccgaggcggcagtggcatttgaaggcgtcgcgagaagacgcaggtcactctctgacacgtgtgtcccacagtcaactgtcgtcaaccgtactcaatgacgggtgggcccgagaacagggagtgcggcagatttcatggtacaggattttgtcaaatgaagcggcgcaggttaatcaggattgggtttgagtggact

SEQ ID NO: 28734 - DNA, 848 bp, Oryza sativa
ctctctcccatctcttgttgcgattcttggtgtttgtcgcgtgtcctctatgcgattctgcaacttgtttgcgtcatcattcgttctgctacaatctgtgatgctgatttggtgggggattaatcttgatttcttgcaagaacaaaccgtgaactgatcaaattccttgtgctaccgttgctgatttttgtgcaggccgacttggtcgggcgcctcgtcaaggcgtgcttcctcccgctgcagcgggagatccagttcgtggaggccgacgacgacggcaacatcggcgagggacaagaagtctgggattcgtttcagtaccaggggaggtcggtgcagctcctgagaaacgagctcgaggaccgtgtgggctacgccatcacggtgtgcgtccgcgccggccgccatgggcagcacagccctctgctcatcaacctgcctcacagccgggagaccctgcacatcgtcgttctcaggcgcaacagcgaaggttcgatctcgatatgcatgcatgcttctgaatttttctgaacatagtttatgctgttctgaaattgttggcaatgctgtgggcgatgtttctgaatggcatgcatatctttttcttgtcctttttgttagttcaacactgtagatctttccagttttcagtaagttttgtggaatttgtggaaaattcagtcatgtttttacttgttgagttaggacttgtctgaacaacattgtagtagaacggcagaagtgaacattgcagtaggaattgtttttacttgctgacaaatgtgaggaattttctgttgatggaatgctagtcaggcatcacaagaaaattgtttgcaattgatagg

SEQ ID NO: 28735 - DNA, 1382 bp, Oryza sativa
gggggcggtggagctcgtactggcaagctatcaggccagggaccccgacttctccccgtgggcagcgctggacgagttccctccaggaccgagtaccacgcgcgcgcgcaggtccgggactccgccgaccacatcgtccatagcttccagggtacggcccctcggctcgcgttcgccctcgactccgacgagtaggatggtgcggacgacgaggctagcgacccgggcgcgtcggagtgagcccccgggcccccgccaatcttgatagccctttttttttcgaggccttcgggcctccttcttgtatagactaacttaatctgcaatcaaataaagagaaaatttctgtgtcaattctatttgttgtgtgtatgaggcaaggatggtctgtgccgcggtccttctgagtcttggcttgaacaagggctcgtgcccaggtcccagcctcaaacggcgcgggtcggggctagtgcctggggagatccacatgtcgagactggccaggccgggagcgtggtgaccgagggttatggatgacccgattgtgggcctttgccgattcccccccggagttcaccacaccccggggcacggctcggttctgggccccttttggcgattttagccggcccgggccaccgagggcaggatcgagcacgagcgtgctaattcaagtcaagattcttcaaaaggaaacaatggcacagatacagtccttaggaaatcgaaaatgcttttattgaaatacggaagagaaaaaagataagtatatgcatgtggtagcccccggccaaccctgcacgcccgggggggtgcggggttggcccgagcccgagacctgatacccaacccccactaggggtagaaacgacgaaggtgttcgatgttccacgggttaggcagctccgtgccgtcgcccgtggccagccgaacggagcccggccgggggacaccgatcactcgatacggaccctcccacattggtgagagcttgctcagtccagcacgcgtttgaacgcggcgtaggacgaggtcgtcgacgcagagtgatcgggcccgaacgtggcgctgatggtagcgccgcaagctctgctgatagcgcgcggctcggaaggccgcgcgccgtcttcgctcttccaagtagtcgaggtcgtctctgcaaagctgatcttgatcagcctcgcaatacatggtggcccgaggggacctcagggtgagctcagatgggaggaccgcctccacgccgtagacgaggaagaaaggcgtttccccggttgctcggcttggcgtggttcggttcgcccagagcaccgctggcagctcctcgatccacgagtcgccgtgcttcttgaggatgttgaaggtcttggttttgaggctct

SEQ ID NO: 28736 - DNA, 676 bp, Oryza sativa
ggccatggctggctagctgcgtactactccctcctttccaaattgatcatcatataataagatttaaaatttttcaaattgaacatcatataaccgcatggacacggatttcatcaaaatacaattaatgtagcatgggagaatgtgtgcatgctaatgtgtaattggcatagtgttttaatcgatgcatatattgtgggagaatgtgtgcatggtgtcttgattgatgtgatttaaattattcttgatcttggtgcataaacatatatgatgatcaatttgggaaggaggaagtactagctagggtttacatcacccttcaggatggttattgcatctactgttgacggagcttggggctcctcaccgggagaccgcgcaggcccccctttgctggttcggccgggggcgctcagtgaggttctttgccctcggtctggggaaagttcgcgagagagagaatgcacaagacacgggcgatgtagacaggttcgggccgctgagaagcgtaataccctactcctgtgttctggtggatctgtgtatggagaagttacaaagagctggggagcaagagagttcaggctctagaacccctctattccctccctggctctcgatctgatcccatccccttcttcggtgggtaaggtcttccttttatatctcaagggga

SEQ ID NO: 28737 - DNA, 6324 bp, Oryza sativa
  unsure (1)..(6324): unsure at all n locations
agggcgaattcgagctcggtaccctattttgctatatatgagatgaggatgatctgtgccgtggtctttttgcgtcttagcttgaaataagggcccgtgcccaagtcccagtcctcgaaaagcgcgggtcgaggctaatgcctggggagatccgcatgtcgagactggccagaccgggaacgtggtgaccgagggttatgggtgacccgattgtgggtttttgccgattcccccccggagttcaccacgccccggggcacggctcggttctgggccccgtttggcgattttagctgaccgaaccgaacccccgagggcaaggttgagcacgagtgacattatttcaagtcaagattcttcaaaaggaaaaaacggcacagacacaacctttagaaaattgaaactgcttttattgaaatgctgaaataaaggaaaaagggatatatgtgcatgtgtggtagcccccggccaatcctgcacacccgaggggggtgcggggttggcccgagccaaaacctgacacccgaccccccccccctttcaggggtagaagcgacgaaggtgttcgatgttccacgggtttggcagctccgtgccgtcgcccgtggccagccgtaccgagcccggccgggggacaccgatcacccgatacggaccctcccacattggtgagagcttgctcaatccagcacgcgtttggacgcggcgtaggacgaggtcgtcgacgcagagtgatcgggcccggacgtggtgctgatggtagcgccgcaggctctgctggtagcgcgcagctcggagggccgcgcgccgccttcgttcttccaagtagtcgaggtcatctctacgaagctgatcttgatcagcctcgcagtacatggtggcccgaggagacctcagggtgagctcagatgggagaaccgcttctgcgccgtagacgaggaagaaaggcgtttccccggtcgctcggcttggtgtggttcggttcgcccagagcaccgctggcaactcctcgatccatgaatcgccgtgcttcttgagaatgttgaaggtcttggttttgaggcctttaaggatttctgcattggcgcgctccacttggccattgcttctggggtgggcaggtgaggcgaagcagagcttgatgcccatgtcttcgcagtagtcgccgaagagttcactagtgaattgggtgccattatccgtaataatacggttaggcactccaaaacgggccgtgatgcccttaatgaatttaagagcagagtgcttatcgatcttgacaaccggataagcctcgggccacttagtgaacttgtcgatcgcaacatacagatactcaaacccgcccggggcccgtttgaacggtcccaggatatcaagcccccagacagcaaatggccatgacagtggtatgatctgcagggcctgggccggctgatggatttgcttggcgtgaaactaacacgctctgcatcgccggaccagatcgactgcgtcattgagagctgtcggccaataaaatccttgacgaaaggccttgccaaccagggtacgcgaggcggaatgggctccgcactcgccctcatggatatcagcaagaagctcaacgccttgttcctgaggaatgcacttcaggaggattccgttagccgcgcgccgatagagggtcccttctaccaacacgtagcgtttggaaatgcgttgtacgcgttcactcccttcgcggtcctcaggtagagtcttatctgcgaggtatgtttggatctcagagatccaagcaatcaatctaaaggagcttggagcgctcccttcgggtcccgaggcctggactccgacgggcctcgggggccggtcaggcgcatccgtctcccctaaggggtcgggtcgcgccgacggctgagtaagcctttcttcaaaggcgcccggtggggtctgggctcgcgaggacgcgagccttgagagttcatcggcaatcatattatcccgtctgggcacatgccgaagctctatcccgtcaaaatggcgctccatacgccgtacttggcgcacgtaggcgtccatctgcggatcagagcaccggtattccttacagacttggttaacaaccagctgagagtcacctaacaccagaaggcggcggatccccagcccggccgccactctgagtccggcaaggagtccctcgtactctgccatattattggtcgctcgaaagtcgagacggaccatgtatctgaggacgtctccgttcggagaggtcagcgtgacccctgcaccggcgccctggagagacaaagaaccgtcgaactgcatcacccagtgggcggtgtgtggcagctgagaggggttcgtgctggcctcgggtattgagacagtctctggagccggggtccactctgccacaaaatcggcaagggcctggctcttgatagcgtggcgtggttcaaagtgcagatcgaactcagaaagctcgattgcccattttaccactcgtcctgtaccctctcgattatgcaagatttgaccgagggggtaagacgtaaccacagtgacccgatgcgcctggaaataatggcgcagtttcctcgaggccatcagaatagcgtaaagcatcttctgggcctgtgggtatcgggtcttggcgtcccggagggcctcactaacaaagtagacaggccgctgcacctttcggcggggccgatcctcttcgctagggtccgtacccccggggcgttcttcgtccgagtggcccctcggggcgcactcgtcttctgtgccgatgacctcggggtcggaggacgacaggagcggctttcccacagtggcctcggggccgtcctgggggtcgggggctcctggcgtcatcggacaagcgggcaaagggccaactccggtcgtcaggggccttaggccaccgttcggctcgggggcctcttctccctgctctctcccgggtcgaatcggtacagggttagcctcggggtcagagggcgataggtgcggcctccccgcagtggcctcggggccttcctgagggtcgggggcgcccagcaccgtctgacgagcggggagagggtcgactccggtcgtcaggggccttaggccaccgttcggctcgggggcctctcctccctgcttgctcccgggccaagtcagcacagggtgggggtgcgcggaatgaggattgtcttcatcgcgctccacagccaacgctgcactaactacttggggggtcgccgctaagtaaagtagcaggggctcatttggctccagggcgactagaaccgggggagagctgagatatgcctttaactgagtaagggcatgttcagcttcctccgtccaaacgaacggccccgagcgcttgaggagcttaaacaagggaagcgccttctctcccagccttgatatgaaacgacttagggcggccatgcaaccagtgacgcactgcacatccctaagtttgctgggggggcggatccgctctatagctcgtatcttctcggggttggcctcaatgcctcgggcagagaccaaaaacccgagaagcttgcccgcaggtacaccaaacacgcacttatcggggttcagttttatgcgggcggagcggaggttctcaaaagtttccgctagatctgagagtaaggtctcttggttgcgcgtttttacaaccaagtcatcgacatacgcctcaacattacgtcctatttggctacccaaagaaattcgagtagtacgctgaaaagtaggacctgcattctttaacccgaagggcattgatgtataacaataggttcctacgggggtaatgaacgcagttttttcctcatcctccctagccatgcgaatctgatggtaaccagagtatgcatctagaaaacacaaaaggtcgcaccccgcagtggagtcgacgatctgatctatgcgaggcagggggtaaggatccttaggacatgccttgttaaggtcggtgtagtcgatgcacatccgaagcttgccgttcgccttgggaacgaccaccggtttcgccaaccactccggatggatgacctcacggatgaacccggcctccaaaagtctagccacctcctcgcggatgaaggcttgacgttccggggcttgccgccgcactttctgccggaccggccttgcgcccggccgcacggcgagacggtgctcaatcacctccctggggaccccgggcatgtccgctggtctccatgcgaagacgtcagcgtttgcccgcaggaaggagacgagcgcgtcttcctatttgccatccagaagaccaccgatccgtgtggtcttggatgggccgtcgcccaaggcaacctccttgaccgggacctcgtcgcatgtggccatccgctgcctcggggcggtgggggcagaggggccaagcctctcgtcaccaccctcgggcttggacgcagcagcgaggcggtccgcgcgctgctccatgcaagcaagcgcgactttaaggtcgccacggacagagatggggccaccggggcccggcatcttcatctggaggtaggcgtagtggaccgccgccatgaacttcaccaacgcgggtctccctaggaccgcgttgtagggcagactgaggtccgccacatcgaagctcacccgctccgtgcggaagttggcgggtccaccgaaggtgaccggtaggtcgatgtgacctaatggccacgtgtgccccggcgtcacaccgatgatcggttgagacggctggagcaccatccccgaggccttgatagcatcaaaggccgcgggggaaaggatgttgagagccgctcctccatctatgaggacacgacccaacttcacgttgcagatggtgggggaaaccaccatcgcaacctgccctccccgggcaatgcacggtgggtggtcggtctggtcgaaagtgagagcaacctccgaccaccgcgcccgacgcatcgcctcatgggtaggggccatggccagaagctctcgcttcatagccttgaagctccggcgagagacgtgagcacatgctcctccatcgacggtggcaatggtggccccaggttcttggaaacctaggtcatcatcaccatcatcaatgtcaacagcgggggccttctgcttggcctcacttcgccgtttgccagaaggaaccgccggggacttgccctcacggcgttcctgcctcctgtcctcctcccatttcctcgttcgctcggccaggtttttgaccgcacgacagtccgcgagatcgtggagggaggtgttgtggacagagcaccacctgccggcgaggcgctccttgctgggtgtaccagcctcgttctttttgtcgctcgcaggcctcccctttcgagtggcccgcggagcgccctcgactgcgaggacatgaccctcgtcgccggaacggtccggcctcttcttcctcctcctgtcacgccgccctgtctgagcggcggatccgggggcggccgaagctgccactccggaaccggaggagttccaggtccaggcctcctccttacgagccactcggtccgcgagctgaaaaagctctgcggtagtctggggctctttgcaggcaatcttttcgagcatgcggttgtgccgcacaccccccctgaacgcgtagatcaccgcgtgtgcagggatgcatggtatagtattgcggacttggcaaaaccgctgaatgtacgagcgaagcgactcatcatcgcctcgctgtactgcatgcaagtccgcttcttcgcctgggcgcggatatgtgccttggaagttcatggtgaactgttggcacaaatcttcccaggagtggaccgacgcgggtggcaggttcattagccaaccccgcgcctgtccttttagggccatgggaaagaagttcgccatgaccctgtcgtcacccccagcggcctcgatcccggtcgtatagacctggagaaactcggtggggttgacgctcccatcgtacttctcggtgatggtgggccggaaccttgggggccaacggacattccgaagactcgccacaaaggctctacagccaacaccaccggccgggggcacggagggctgatcttcacgtccgtgtcgaggtgacactctggacgaggaggcgccctccggtgcacggggagtacgccggctattacgccggcgctcgacgttgaggcgggcatacggctccccatgctgatccctccgagtcgacggtgtcgacgagggagtggcagccgaatgacgtgcagncgccgccgttcgccgggcccttcggcttgatgacacggagcccgtggtagcggcgcccgaggtctttgtggtggctgaccg

SEQ ID NO: 28738 - DNA, 10035 bp, Oryza sativa
aaaggtgccagaccacgtgggcgattgtgtctgcctcaagcctctagtcatgatactcccggtcccatatcaccgacagtagctcacgatggttaatcgtgttatgataattaattgataattaaaacttatcaagggtgggttgtgagcacatggttttaaaggttgtgctcatggcaattaaggaccggttcgcgagctactgttgtgagaaattaaccgtgccaaccacaagccagcgtgggcaacggctttaccttttgtatagcatggttcattgcggggcaccagactgtgaagcggcgagaagtccgtgggggtcgctggggagtccatgcctctggttattgagggggtgattatgatccaggaacggtgcgctgtggtggattgtgttgtgcaaggggtactgtcacagttcctttctgaggtactgtggtggtattgaggcgcatggtgacatgtcgtggagctgtgtcttgtgggtacagtggtacacctctggccagagtaaaactattcgaataaccgtgcccgcggtcatgggtgagttgagcaatgtttttcgtgattagtctcacacctctcacaataattattgatgctataactggtaataatttgtttagctcctggtttggagttagatctgtacagccgggtatggttgttcagggtggttgggcctgtgcagcatgggtgtgctgtgcagtgttgattaaaattgatgattaattactctactgttttactactcttaaatgtttgctaaatgctgcttttgtaaatgagcctatattatgacatcctttggtatccttgtgcacttgcatatttactgtgtagcttgcggagtatgtcatatgctcaccttgcaataatcaatcaacctcagttgaagaaaaaggatccagaaggagaagacgtttggcttataccccagttgagctgcctgtgggagtggagctgaagccatcgctagaccgttaattccgctgctattttcttttcttttgtaagtatgtaatgatgttattatgatggatttgtatattaaattgtcagtttgtgtaccttggctgatttctggacgagggttttatgcacaaataagttcggaaattactagtgaatttccgggcgtgacacagacccacatttataacatctcaatagtcaaaactgacatataagtcgtcatcaatggcaggtgtttgcttctacctctatctataactgtcgaaatattgaaccattgtagattgtgtcattacaaacggttctagctgagccattacacataacaggtcatagatgaagttttttttttaagtagtagtgatttaatgtagggaaagtataccaataaggtgtagatttagaggtcattaggccatgtcacataatgtaatttagtacaagtgccaataattttttatacatgtatgaaatgctcagaactatatcggtttaacatataacgatgctaccatatccttaattgtattcgcaaaagtgtatgagtctgttttcttatacatgtaatcggctgttcgtgcaagatcaacaattgtctcagccactatttttggttgttctgttggtagtgtaaggtattcttttactatatccttccatgaatcttcaatcaactcctttatcttcacacatgcatcatgcattgttgttccatgctgaaacatgtaacattgcacagtagaaacatggtgctcccctttttgctcacgctgtacaagggatagtaagacaaagtcaaaccactattaagaaaagatatgatggaattttcctttagtttggccaattataaactacatataaatttgttaatcatgtgtttgtttgtatgaagtttatgtttgtacttcaagttctattctaataaaagaatggaggtgtaaatgatgcaagaataaacatctatgtaaatgcacatgtgtaaaaccatataacgacctttgttgaaactatatcgttggataatcttgccaatgttgtgaaacacttgagaagctccggatatgtcaaaagccaatcaagagtttctttagttatgatatcacccattaccacaaaggaagcacatgctatctcaaaagctccaacagtcgctcttgaaacctccaaatgttcatcgactgtttttgggatataatgttcatcacgccatttaatctcctgtgagtatccttgaactaacctctttaactacaatgaacataatgaaatatgatttcagatattgaatttccataaaattaactgttgagaaatatcattttactaaagaattagctgaataacaatattaaaatacaatagtttgttgtacttatgcaaagcatgtatactttatacgtacaatggtttgttttatatagtttaatttggagcggtattttttgtattaaccattgtacatataaatgatttgcataacaatgtgatttctacatactatataaaacaaaccatataaaagggtgttaattagttttaaggaaattcgaatttaattggattgctcaacgtttgtttacatggatcatactacacatcatgatatacagcctaatcataggatgaaaaaaatattaccttcatcccaaaatataactacctaggagtgtaggggtgagataaaggatcggggcaaaatgtcaaaaatgcccctcattaatacataggggtttatgggattaaggatagtatgggtggtacatagtctcgggagctagtgaggtgatggggccattaggggtagcatggggagtaatggggtaatttaaacaatttaaacataaagactgatatattttgggacggaggtactatcgctacgtagcaatatcaagatttaatttggtctaatataaaattggattatgtaaagtaaacttagagtgaagagggcaaattttattattcttgaactctagtgtagctaacataaattataatatgtcatctttagctggataaagtatataaatcacacatgtttaacaaactaacaagtttaatggcataaatacttgccagctctttgagataaaatacacgataactgttacttgttccaagttcctcttcaatcaagtcaaatgtcttcaataaatacaagtaaaaacacttcatatattctggaagtctcactattgcactttcattacacctgtattttacattagagcatcaggtattttacataaaccaaaatacaaccatatcagaaatttagaactacaagtcaataatatttcccgaaattggtgctacatggcccagattaataatttaacatacataatgattgaataatcattaaaccacattgtaagaatggagttgcattttatacaatttaatttgtaaaatttttattctagttggttcaagtcagtaaatttgtatgtacaaatgcatgcaatatataccatctctgggggggttcggggtaaaagtgaagaaaccccaaagacaatggtaaatttcaggaggaggatgaatatgagataaaaaagcaacattaacattagactaaaactaaagattacttgtatatcgcttctgcaagcatcatactctcctctgttgtaccatgggtgtcaaatatatcatctattatagtgatataggccatcatctttataagtataatccgtgacagagaataattgaattcagggcatactcctgtcatccaaaaatgcatttccacaattctatctcgaatgaaacttagatttgattgaatattaagctccttccaccatctgtaataatgcatataaagataaatctactaattaaaaataataattaagaagtacaacttagctttttcagtacatatcaagtttaaagtgacttacaatgtgatcttttttagctcctcacaataaagaaattgaagtaggttgaaattcaactttgcaaattcaagtatggtctcatttcgtccagagatcttttcatagattgggatatagtttcttgtttctaatattcgaaccctcctaaaaaggggtgtttcaagggcagaagatacttcttcttttaacggagatttcaaatgttccaatttagcttcaaggtgggatttcgtgaaggcaatggctccgtcaagtactttgtccccacgagtccttacatgtgctgcattatataagcctaagagacttcttacttcatcagcagcaaaacttccttccttgtctttgaaacatagaaatatatctgcaaagtttgataaaataaagtattaatttgtcactgtcttttaacaatctattttttattttaccaataaaagacttaccagacgacacgtcatagccattcttccttagaagataaaatcgaagggaaactaggtttagatctttatcgtcaaaatcggaattgtaaatggaatacagtagatcatctagctcggtcttgtagtagctatccaaaccaagccgttgcagtgtgagcacaaggtctagtatctcagatacttcctttgagccctttaccatgcacctaacttcttctttcagcacctcagccctttctttcatgcatgcatgctttaaaatgagtagggtagtgtgtattagtcaattcttccatgcaatcgatcagaaagctacgcctattacttaaaaaaaaaggaaaacaactatgtttatagctatatctatacatatgcctatagttattaggcattgttgtgatgcaaggaatatctcaacatgcctaattactataatatgatgttaaattattgtgagatatcgtactcttatttaatatttaattggagtagcaaaattatctgggatccatcgagcggaacataattataatggctaatattaaataagagtccacacatgcacaacttattattattattattattattgttgttgttgttgttgttgttgttgttgttgttgttgttgttggtccctccaaggaaattcacattataattggagaaataatgaataatatatcaaatgaaattaaaataaaagtaagcacccgttactacttgttaattattaattcctaattttgaaaataaattaacaggagtccaatacagatagaactttgtatttattattttcgaaattctgaaatatttaattaaaaaactatcactgagactccaaggctagtacagctttgcatttgttgattttgaatttggacattatttttgttaatgataaataaagttaagactccaaacttggtagaacattacatgaaaaactaaaactgaaactgttgaacaacatatgagtgcaagtcagggatggcatgccaattattattaatttcaagtttttatattgttaaacaacatgaaaaactaaaactgaaactgtaaatcaggtatagttttcttattaattccatatttatgatttttctgttcatttaaacactaaaataaataatccatgaaaaatacaactgtgtattaatttattaattttgagtttcaagattactaaattaagaagataaaaaactataaaaatattaattggtatgcataatgttgtatattaaaattttgggagtatctattgttcgttaaataccatatacaatgtttgtatatcatagtatatataaatagcacgcgtgaatgcacgggttactgaaattcttcagcgctatatttgcaattaattgttttaaaacaaaatatttgcgattaattgctacctgagatttatttggtggctggtaatcgacgaagaaatcaccccacagggtggggtggaatgtagaagcagccttttgcatcctctcgttgtcttctttctcggagcaaacagctgcaggtttgattaccattctatccatcttgatatattaattagttgtctctccttaagtgttcttcacaatttctcttcttgctgactgaaactgtgctgctctgaacggctacttatagagggtgaggcatcgataggccagcaacaaacgttgtaattaaaatgctggcattgatcgtgtccaagtgaagaatctttccatgcagcagcctgccttatgaccgaattggaagatgtgatagttacagttgaacttacatgaagtaattttgatataaaaatttttgaccatatgtaaatattcttttgagatgacgatgcaggcaagaagaggccaacaacgttctagctttggcattgaacaggccaagtgatgctgatgtatatatatatactctgactgtactggctgctatcgatagcgttccaaacaatgcagtaatttgatatacagtcgatcctgacccttatgtcaattcattctattttttctagaaggaaatgtgcacaagtgatgtagcaccaagagttagagtagtacgtaacagtagtttgactcggcaggctttaaaatatttcagatcattgtattcctattccaaacgaagataattcaggaaagagaacgaatggggagaacaataaaactaccaccgatgaagagattccttgcagcacactatagagctcgcatgctgtcggtcgatcttggtgacaaaagaaagagcttttttaccgtccatccaaatttcttcttaccttttggtacctgcaatcagaaccatccatatagatagatccaacggctgtcaatacttggtactgctaggtacagaaatctcctctgtggtacctccccttcatccgcatgcattgaaagagttgaagggcaaaattgggttttcacatggctaggctggctcatccttcttgcgttggttgtgagtttgattctcgcatgccacttatttttttctgccgtcttgccacattatttttccctactgcctgtgctcccgttatcatcctcgagagcgcgatataaggagttcttcgtgctctctctctccatggtgatgtgattccggacttcaatcttcctctcatccaaaatcaaacaaaaggctaaagcctagaggtgatgatcaggtgatgcaagattttttttttttagggggggggggtggtgggggaagggagggcatcggctccaccgcaaccacagtcagggtcatgggcgtcagcgcatcccccgttggatcgctagccgcctttaacaataaatacaaactgtcgcgcatgaaggcatgtaagtatagtgggcctttgatgggatcacgatttgcacgtgaggacatttggcaggtcacaagtccatttccttctttttcctatcgtacccttacataatcgacgattagattttgtttggtacctcatagtaccagtacctagagacatcatttgctggaccgtaaaagcccacctcatcaatccatcaaccctatgtagtttcacttgctcatcccgtccatcgcatttactcgctagatcaacactcgcctcgtgctagctagatcgtcttctcttctgtggtccaccccatgtgatatatatcccggtctccgcatgctatgaaaatttgatctatatagttgtgctgtatttgggaaatttttgtcctgttcctttttcttatgtaagcctattatttgtttaagcaaagttggtaatggatggatttggtttaaggaacaacaccatgtatgggtgtactattcatctaaagcatgtatgggtgtttggtgacttcattgaaattcaatgtagatagactagtgttcatgatgtcacacaaatgaattagtctttctatatagatcaatatttgcctattaggaaagaggatagcaagttcgtaattaacttttaaattaatgagatgtgtgatctgcacatagctaaccaatatattgtactaatacgcttaaatatgagcaaatttcataaaactacatatactttacacaatctatcacaaaactatatatttaagaacttatttcacaaaactacagattcaatgtcttcgtttatcacaaaactacaagtactttgcacaatatatcataaaacacagatttaagaacttgtttcacaaaacaacaaatttaatatctttatttatcacaaaactacaggtttagtgtcttcattatcacaaaactacatgttttagcattgttaaaacctgtagttttatgataatggagacactaaatttgtagttttgtgataaatgaagacactaaatgtatagttctgtgataaacaaatacactaaatcgatagttttgtaaaacaagttcttaaatctataattttgtgatagattgtacaaagtacatgtagttttgtgataaacggacatactaaatttgtagttttgtgaaataaatttttaaatctgtagttttgtgataaattgtgcaaaataactatagttttgggaaatttactccttaaatattaactagaaaatgacgtgaagatagctataactagcaagtttaatattatagccaactgctagctctaaaaattggcacatcatctatttttatataaatatatattgcatcattaataattggcaaacctctcatacacataatattttaaagcccatgttatagctgtctacaaatctgcaaagctaacttattgtacttgctcacacccaattaaaggcaggcaactcttgtctgaaaaatgcccaaattaatctctgcaagtaccgattgtagccatgcttttttctctatatatgaaaagaaaagattgtaccaaaaccatctatatatgcagtggcattggcaagtccttgtagatactcgatcattatcattgatacagtggtgggttattgtctcgtttaccaggactccaagaaacaagctacagattcccacccagaaaaaactgctgcaaattctctcacgacaaagcaagtttcagatgtctgagtgacgcagaaaatttgccacaagcagggaaattcttcgtgcattcatggcattttcgtagctactccatgcagcctaagtacatgttgtagttagttagctgcctgcgtaccagccgacgaaattaacttggtcgatgttgtagtagtctcagtgcatatgctcggaaaatcgcaaccttgctatatactccctccgtttcacaatgtaacactatgccggcccatgctagctgtgacgggcctaaactatcatctctgacggattcggcccctcgtcaaagattagtggttagtgatgactctcttcacctttgacgggtgaagggccgtcagtggtgaccagcccctatgacgggccacgtatagaacccgtcacaggtaactattatctcaaacggcacattaatttgtgagccgtcagtgatgtctaaaatccagaaaaaaaaagaaaaatagactggaacccgtcataggtgtgaaaaaaccctagcaagaaaattggcgcacgctgcattggtggtgcttgctgtcatcaaactgacagcatcacaaaaacatcaaactgaccacatcacaaaacttcaacctgaccaacagttcattgtcctccatcaccgcatcaccatctcatatagcaatcattcacaaaagaggatggcaagaatttatcatacaacaatatcatatcattcacaaaaggggcacactagccgatagttcgtcgtcctccatgacgaaccagctatgggagacgcatgtggaggcgccgcgctcgcagccgccggggaggcggcggaggatctcgaagaggcactccactgctgctgcaccactaaacaaaaatcaagaaacaagaaaccaccattagagcccacattctcaaaccaaacacctcaaatcaacaacaacaacaacaacaacaagaacaagaagatttaattaaaaaaaaaactcaccgaggtggccggtgggtggggatggaggaggcggtatctgtgcatccccggcctcttggaggtcggatccggcggctagcgcggttggtggcgttggtgagggaggcatcggtggcgttggcggccgggaggtggggggaggcaccggcggaggtggaggcataggtggcggccggctagc

SEQ ID NO: 28739 - DNA, 1451 bp, Oryza sativa
aaaactaattaatatttgttacaattgtgaaactccttacttgataatataatatttataatgtaaatgcgtgtggtgatttaaatgctatatggctcaacgtaaagtgatgctatcatatccttgattgtatgtgaaaaggtgaatgaatctgcttgcttgtatatataatccccagttcgtgcaaaatcaataactgttcttgccacgatttttggctgaaggtttgttggtgcaaggtattctttcatcatatccttccacgaatcttctatcaactcctttatcccaatgcatgcttcatgtattgttgtaccatgctgcagcatgtaacactgaattgtggaagcatagtggtcccctgcttgttcacgctgaaacattccatagcatcatgttttagttatttataattgaagttgaagattaatatttataaaacataaatgaatatataggtgtaaagatagagagatattaaattacctttgttgaagcaatatcatttgagagccgtacacatgttgtgtaagacttaataagttttggataagtcaaaagataatcgagagtatcctctgttataaaatcacccatcccaactaaagaagcacatgctagttgaaaggcaccaacagtcattctggaaagttccaggtgttcctctattgtttttggaatgtaatgatcatcacgccattttatctcttcagagtatcctttaattaatatcttgaactacattaaagatgtaaaagtgtgaattcagtctgtatattggcataattttgaagaaatatctttttacccaaaaaaaagatgattaagtcattagaagatcgtaaaataaagtggttaccatagttccctctaagggcatccacaatgtggtgcaaaagtagtccataagcattataatatttcattcagccacctattacctttgtgcaactagtccgtatagaaaaaataacaaaaggtacccatatgcaaatagattacccatatggcggaataaataatattatctatctctactcctctctctttttctaatgataccttgtgtctatatatattgtgggattgctatagttaaagttcatttatatgtgtcccatctatatggatcattttgtcatatacatagttgatgccctagctaaggataaaataatcagttctctcctctaaaatacatatattctattaagcatatatataatcatatcaagatttatatgtaggatatgaccaacaatgaagtttctatacgatttgtaacaaaagttatattgtaatcaaggataaataactatatcattaaatttcagtctatttaataatccccccaactcccctccccctccttgttcccaaaatataaagcgactaagagttttacatggtcaccaaatattgtactttgacgggtaccgagctcgaattcg

SEQ ID NO: 28740 - DNA, 19877 bp, Oryza sativa
atagttaaagttcatttatatgtgtcccatctatatggatcattttgtcatatacatagttgatgccctagctaaggataaaataatcagttctctcctctaaaatacatatattctattaagcatatatataatcatatcaagatttatatgtaggatatgaccaacaatgaagtttctatacgatttgtaacaaaagttatattgtaatcaaggataaataactatatcattaaatttcagtctatttaataatccccccaactcccctccccctccttgttcccaaaatataaagcgactaagagttttacatggtcaccaaatattgtactttgaccattaatttatttcatgatatatcatcaacaactatgaaagtaacattatatgaaagcatatccaaatactacgaatctaatacaaggatatggtaactacatatttaattgtcatatatataagttttgccacaaattgttttgagataggagacttaccagctctttgaaataaagcactcgataacttttgtttggacctagtgcctcttcaaatgaatcaaatgtctttaaataatataagtagaaatccttcatgtattttggaagtagaactgttgcagattcattgcacctatattttacaatctagtgtcatttaatattttcacaaaaaacaaccaaaagtgtaatcatgtagggagccaaattgcaaatatttattagcgtatagtgatttttgattaaatggttgaagattggcaagtttgtctagtatacacatttattttattggcgttaatatttttttatgtataacagttcttatgtcatttcttggtagatcatatatccaagatataagattaattacgtggctagcttgattgtctgttctaccttcctaaactcctaaggttaaataaaatggaagcattatatattcttggcaaaggttggtgtatggcatgacataggttcaaagtattactcatgatcatggactcatggtgtgttcagtagcagtgtcccaaatataagctagtgttgttgcatacatgtaggatattgccaaatcattactttgtctagataatccatgctaaatttatcttttgatgtttgcattatgatgattgctctggattatattttttttgacctcacattgtctttccactactttatgtccatagtatgtgttctttgatttaaatttttaggatgaattactttaaatgaaatgaatgaattattatcaattctgccatgttttatatctatgtttttatttttttatttaacctcagaataattttgataattgcaatatatgtaagcatggtatttgtggattttatatcattgcctgtatcgaagaatattatgatttaacttatgtatcaacttcatattgcataaaacatgcatggcagcaaatgaccaactgttaatattacaatgaggttttaagtaaccgttacaattaatgcccagataggttaaatgtttgcatttctttttctaagagaaaattgttttccttgatctttggtaattatatataggagaaaatttaatatgcttactctttttctcaattaatgaggcatacatgggattaatatattaatacaacatggtgaatagattacaagtatcagaacatgtacggatatacatgtgcattgcatatatataatttcatagagttatttggctcctttatactatgattttgttataatttactttttatgtgtttagtctattgtgaaattgattccacatacaactagaaatttcacacttagtataaactagctactacaaaataaagatgcaattaatattaccacatattataatgaaggcttacatatatatcgctttggcaagcatcatgctctcctcggttgtagcatatgtatcaaatatatcatctagaatggtgataaatgctgtcatctttgtaagtataattcgtaaaagagaataatggggctccgagcatgctcctgtcatccaaaaatgcatttccactattctatcccgaatgaagcttaagttggattcaacgttaagctctttccaccatctgtattgtacataaatgtaagtactaacttatttatcataatttcacgaaattgtagaatcattatgcactttaaagtaattaacttaccgtgtgatagtttttaactcctcacaataaataagttgaaggagattgacattcaactttgcaaattctaatatggcttcatttcgtgtagtcgcgctttcataaataggaatatagttttgtgtttctattattctaaccctccggaatagtggtgtatcaagagcaagagacacttcatcggctaccggagatttcaaatgtttcaattctgatcttaggcggttagtagtgaaaacaactgcttcatcaagtactttttcaccatgagtcctcatatatgccgcattatataagcttaaaagacttcttgtgtcatcagcaacaaaactcccctctttgtctttaaaatgttgaaatatgtctgcaatgcaaaggttgatcatgttaacttaaaaatacgaacattaattgcatgtccccagctatatatgtataggagaatatgcaacacaatatagttattaggctgcatgcatgagtatacatgaaatacattatactgaaatatacttcatttaaatttctccaatctaatctatatagctagcttgtttaaaatatttcagttaccagttgccagggatgttattagtatataatatattcagttcatagatgcaaactatatattttttaaaaaaactaatagggtatcaaatccttcttgtggttttggaacagggaaagtaaaaaaaaaaggaatgttcctatgtgctaagggtttaattataggccagtagaaaatgcatgtccttgcatctatctgcaaaattattggtttgtttatttgaaaatcctaattaattcttatcatcaataaggccttaaaattaccagatgacacatcatagccgttcttccgtagaaggtaaaatcgaagagaaactaggtgtaaatctttatcgttgtagtcggtgttgtaaacagtgcagagaagctcatctatctcggccttgtagtaactatccaatccaagtcgttgcagcgtgatcacaagatccaatatctctggtacttcatttgagccctttactacctttctaacttcttcttttagcacttcagccctttctttcatgtaagcatgctgcaaattaaggaatacacgtctgtcaacgatgcaacagagaattctccgtgtataaatataaatatcagtaatgttaccgacagatggcacagatacacaattaatctccaatatatacactcatccgctaataatttactatggtaatataattagtaaaaacgcagtgtaaatgtaatactaatgctgaagtgtttcaaaatattattctatcttatttcttatgcccaatataaaaatatccatgaacactggagaaattagtttattattagagtttataacgttcagctatcacatagtgtaaaatgtctcacttattaatttcctatctacacagagccagagaatatatataattaaacaagtataattaccttaggtgcagtaggtggctggtaactgatgaagaaatcgccccagaggctggggtggaagccggtaggagcctttcgctcatcgtcttcattggagaaattagctgcaggtgtcgatgacatcttctgatctcttaacaaaaagctctttcctattaattgttgccaacctaattttattattgttctgcaactatctggtgagtgtctactatttgctgcatctcgcatggtatttatagacagttgcacaggcaggctagctgagcaagcatcagcatgatttcatgttgccaagtcagaatgatgtactcatgcttgcgtgatccacatgtgtattttttttccctgactgcttagagatacatacacacacatatgtcatgactcaagcagatacctacgagtacacaccccttaaataagctcgagagatggtagcaaacagttaggtggtgttaatttggatccagggacttaactttagtctctatatttagacactaatttagagtattaaatatagattacttacaaaactaattacatagatgaaagctaatttgcgaaacaaattttttaagcctaattaatccataattagagaatgtttactgtagcatcacataggctaatcatggattaattaggctcaatagatttgtctcgcgaattagttcaagattatagatgggttttattaatagtctatgtttaatatttataattagtgtccaaacatccgatgtgatagggacttaaaagttttaatcccatctaaacagggtcttaatctattagactaccgttacctagctaaccaacattttattaaaagcatacatttacatgtggtaactacagaaaccaagatttaaatctgatagatgaagtcatgcgctcataagaccacgactccaccaccgcactaaatatgattcatgtatgtgtttaattattctataggcaaatactgaaagtaggaggggtttcttttttaaaaaaaaatatctagaagtatgaatttccttgagaagtaccattgctcttttatcaaataagaaccaagtctggcttagtatgaaactgcttctttagcttagcttttcggcgacaactgaaacaagacgagtcattagcacaaaattagttttgtattaagtatgaaaaactaaaaaaaaattatttgatcttttaagacaatttttataaagaaaagtacgtatttaaaaaatgtatcgtttattagttgaataaacatatatactcacgataaacaaggtatgtctcgatcggttggtaggaggggccatgtgtatacagtgtacaacgtaccccttccacgtacgattgattccattaattcaagtggtcttgtttttaatttctgctgattgatttgataccagtgtcctaactaataaataggctgtcccttattttctttttatttcttcttcaaatacataagtaattacaagggaaaattctcacgtacgtgaaacatgtagtagtagctcacagtcacaaggacaaacataccatgagattgattgatgattggtacgtgtatactattctcccagaaaacattcaaatatggccagctatttatcactggttcagcttgcatcatcggtcacactcaggcatatatagcattaattaacattaatatagcatggccgatgcatgcatggagcatagccacattcttttagtgtgcataaatggactttgaactgccagcttgacacaaatatgagaatgtaatggaactcttttaatctctctagcggatctccactcgtttgttcaaacactatccaaacagtcataaaaaatatctcaaaaaattgacagcatatattcatgtaacaaacatatattgcactctgcaaaatctcaagtctaaactcgtctcatacattcgatttttttatcatgttttaaaaaggcaaatcaagcgtatgaatggtagcggtattatattcacacctaaaattatcatatcctttttttcaaatgaatattaagtttgaagtcgattttttttaagtagtagttgtgtcactctatactgtcatttgtttctaaaaaattgcatcgaatttaagagaaaaggtcccatatgtaaggctcaagtgggccaagacactcacactgcaagagctagagaagcaacgtgtggcttggattatgtcccacctcacctagctgatgcaatttatatgttggtagtcacatgtagcatgtgccctacgatgctatataagggcatgtacaatggagatcataagcacctgtggcctcaggctgtcacataggataaggccaataaaaaccacgatgtctacaatggataccactgctaaatatattttgtgtttcagcccctatctatttatgtgttagtctctatgatatttgttattataaaattaactattttagaccttctaataacaaaaagaaaaatgtacagatacccctaatctctatacggacccactgtcagcctctccaatcctctttctcatttattttctctatcttatcctcttcctctccagcgttcctttggagtctcgtcgcctccgcttcctctcaaagccgtcgctccccctctcgtgtgccaccgcatcattgactcctccacatctcaacgcagcatccacctccggcctctcccccgcgtcttctctgcaagcggcgatgacggagccacatggcggcggggacagatttggctgcgagctcgtcggctctcgccctcccttctctacgagtggcggcggcctcttcccacgagggcagcggatctggcctccggcttcttccctctccccccctctcttctcgcggcggccgagggaccaccagcggcagggaggaggagttctcaacggtgagtactcggcggcggcggggaggagttcacgatagcggatccggacgcgggctcgacgctgccgtactcctccccccacaatggtgcggacgagctcgccgacggcgtggcgagcttggcggtggcgggctcgccggatctgggcgcaggctcgccatatctggcgacgggggccacaacgggggcggttcctctcctcctcccttcttcgcgagcgtcggtggcggggagcaacggtggagaaggatctggcgaccggacgaggcgatgcacggggcttcggctccaccaacgcgtgtcctcgggtcatggcttcgccgttcccgaacccaggcgcagcgcttcgagcggttcttctgcaagcgcggaaacggcccgcggagccacggtccccactgccaccggtgcgcgcgtccgacgtggagccgtgagaccacaagctggagccacgcgttgtacatgtcctaaagcagggttcaatctttcgtcgtcggcattattttaaattatttgaattttcaaaaaaaattgatcaaatttgaacaaaattcagaaaaatgaaaaaaataaaaaattaggccaaaataatgtcatattgagggggtccgatagagccaacatttctggaattttgaacccttataagatagtgatatgaccatcaagtatatgcatacatcccagcatgagaaatataaaacatggccaaagaattcatcaagtgaatggaggatctacaagatattaaaatccaatgagttttggaatccagttcggcctccggagacagcactgacttcaaatggacctagcgccttcatgccaactccgatttgtgtgatcttggacttcgtggaaagcttatctcgccacctttcaaacgcatctggtaccatgtccaaattcatctcgagtcaacgggaatcgccaaaacaagacagtgttgttgctaaaaccgaacttgggccttgagccttgtaatagactaggccccctccacctccacgaattttaacttaaccctagatttattttcctctataaatagctttgtacatcctcaaaaatatttgggttttgtttagttgaattttgccaagtgccattcaccttgtctctagtcctcgttcgattagtcgacgactttagattcagagcccctaatagttggtgtgttgatttgccgggtcgattagatctaccacttcaatcgcaactatttctttgtgcttaatcacctattcgcaatatttagattgcatcttatcttgttcttgcagtgttctctcgtttgtattgcagggatcatcaaccgcgcgtcacggttggtacgatatcgtttgtggtgtagcgattgcacggcgtcctggacttgttctgattggtagccacgtcgcaaacatcgtactcgattatagcgagagttatcccctcaccagaagatcggcccacgagagagagcgtcatcagatagtaacaagagatcttacatatggttgacctctcttttagccattagtggccaattaattaagatgaatattttacacatgtaaatgtgatgtgaggaccaacttggtcctgttggtctagtcagactgatcgctcttttttagttagaaagaaaaatggaattcctgatgacaaaatggttgacctctcttttagccattagtggccaattaattaagatgaatattttaaacatgtcaatgtgatgtgaggaccaacttggtcctgttggtctagtcagactgatcgctcttttttagttagaaagaaaaatggaattcctgatgacaaaatgtggcaatagcatgtcgaaatcctaggagcctattcttttttttgtttcttacaaaacagtgttgtacctatctatattaattcgtctgtgtgtgaacagcaatagcacgttggaaacctgagcttatacgtatttcgtcttcctacttggtacctaaaagtgttgtctctatcatctactacctccgtttcacaatgtaagtcattctagcattttccacatttatatggatgttaatgaatctaaatagatatatatgtctagattcattaacatcaatatgaatgtgggaaatgctagaatgacttacattgtgaaacggagggagtattcatctctacttaaagctaccgcacgccgttgaaaaacgattttcacatgccctttacctcagggggcgttaatgaaaaacgtcacgcgttggtttctctagggaacagaggtcaaggactgtctgcgacagctttccgctttggaagcatctccccctcccaactggtagtgctttctctcttgcttttaattttactctacttccttgtcgatccccacggacggcgccaatgttgaaacaaatcaaacgggaatccaacaagtgtttaaggtagtcctctttctatattcaacatctcccaatagtgagccgatatacatttatataccccatagaagtacaggaaattatgaaggcagccttctcagcctctactctcctgctagggaccaacaggtgggtcccacagtaattaggtaaagttctaggggacagaggatgggactgctcccattatgcccgtttcgacatctcccaatactgagccggtatacatttatataccccatagaggtataggaaattacaaaggcagccttctcagcctctactcttctgctagggaccaacaggtgggtcccatagtaattaggtaaagttccaggggacagaggatgggactgctcccattatacccgtgtccccagggatcctgcgactcccgggtgcgtggctcaagggcaaggcgggagactggggctcctcgaccctttgctctggcaccgccgcttgtgtcaggggtagttgggcaccttgaatgcgccatcaatgccgttggtgtcacgcgccctggatgccatcatgttgttggaggcctagggaatgggactgactttctccccctgaggcttactcctggagcccctcgagggctccgcaaaggggaccttcgctagtctcccccggtggctggcgggctccgaggggcttcccaggagcaagactgtaagactccttaatcagccacgagaatggggacgacgggggatcctcggtcccatgcctccgagggcgaagccacttccccaacagcaggaacataattataatggctaatattaaataagagtccacacagtcataactcctactccgatttagtgattactatagatgaacttattttggaataaacatgaggagctaaaaataaactagttacgggaagaagggagtaataaatgctaaaattatcttgtaaattttaggtataaaggtgcggttataaccaaatccatcgaccaacacggcccatgcggttgcaaacaagcccatgggctagcatggttagctgagatcgtttgctcacaatggaggttgtttgcggaatcatgcttactggagataaattctttagtcaaatgtaaggctagatataagggttttttttttcttttgcgaagaaatataagggtcatatagacttgaattcttattccaaccacagatcaagcgttgctccagtgctgttggacacatggagttcccttggtgataattaaggttcaatatatctatcacttctgatctagaccatgtcaggagtcaatacatgaaaagcttaacaacggtgacataatattttttttgtacccatcaactacgtacatgatgatgatcataacatctgaacatttcatcagaatatttgaacaattttgccatgagatctactccaattaactaaaatatatataaatagttgggggacagaacaagatcatatggacttagtatattgcacataatattgtgacaacaagctaaggaaaacatttcttagtttaaccatggaaactttctaatgaggctgaaagtaatgattatttggtgatcaacagccaccaacacattattgaaagctagtgaatatatattacaatttgaaactctatattggataatataatatttataatgtaaatacatgttttgatttaaatgttatacggctccatatagagcgatgctatcatatccttgattgtatgtgaaatagtgaatgaatcaacttgcttgtacatataatcacccgttcgcgcaaaatcaataaccgttcttgccacgatttttggttgcaggtctgttggtgtaaggtattctttcatcatatccttccatgagtcttctatcaactcctttatcccaacgcatgcttcatgcgctgttgcaccatgttggagcatataactctgaattgtagaagcatggtggtggtcccctgcttgttcacgctgaaagattccatagcatcatgtttcagttatttataattgaagtcgaagattactaaacataaataaatatataagtgtaaagatataatggtagaaaatgacctttgttgaagcaatatcatttgagagccgtacacatgttgtgaaagacttaagaagttctggataagtcaaaaggcaatcaagagtttcctttgctacaaggtcgcccatcccaacaaaagaagcacatgctagttcaaaggcaccaacagtctttcttgaaagttccaggtgttcctctattgtttttggaatgtaatgatcatcacgccattttatctcttgagagaattcttgaactaacctcttgaactatattagaggtgtaaaaagtgtagtgttaattcagccgttatacgggcataattttgaagaaatatcattttaccaaaaaatatgattgagtcattagaatgtcataaataaagtggttaccataatttcctcttaggataaaacaatcagtattgttcgttgagttagatatattctattaaaacatacaatcaaataaatatttatatgtagaatataactaacaatgaagttgttatatagtttataacaaaatttgtatcataatcatggataaataactatatcattatattccaatctatctaatactcgctccatccaaaaatataaggcgcctgattcacatggtcatcaacattgcacttttgaccattaatttgtttcataatatatcatcaacaactatgaaaatatatgaaggcatattcaaatacagatctaacataagaatatggtaactacatattgtcatttattttacaacccattagatatatcgatgtattaaaaataaaacaattctacatctttagccataaatagttttggggtagaatacttaccaactctttgagataacacactcgataacttttgtttggacatagtgcttcttcaaatgaatcaaatgtctttaaataatataagtagaaatccttcatgtattttggaagtagcactgttgcagtttcattgcacctgtatgttacaatatagtgccatttaattttattcacaattcaaattaaccaaaagtgcaatcatgtatggaaccgcaactcaaaatattatattagctatagtggtttttttaataaacgaaagaagactagtaaatttgtctagtatatacatatttattggcattaacaaattttgacatacatcagttcttatgttatttccatggcagataatatatccaagataaaagataatgttcgtagcttgattgtcttctctaccttcctaaactcctaaggtaaaataaaatggcaagcattatattcttgactaagattggtgtatggcacgatgtagcttcaaagtactactcatggtcagtcatatggtagtcactgaagcagtgtcccaaatataaccgttgtttgcactgtccgaaatatatatggcaaaattgtcatttcgtgtccaaacaatctatccaaaatttaatattttgatgtgtgcactatgatgattactctagaatttttttcatctaacattttttctccactgctctcagtctatggtatgtgatgttcgatttaattttttaggataaattactgtaaatgaaatgaatgaattattttcaattttgccctgttttatatctatgtttttactcttgtttgtttatcatcatagaataatcttgataattgcaatatacgtaaacatgatatttgcgtgtcattgcctttatcgaatcgattttagaaatattaaattacctcaaacattggattcggatatgattcaagtaaagcattaacttcatgttgcataaaacatgcatagcagcaaatgccaactattattattgcttttaagcaattattatagtaaatgcccaaatagatttactgtttctggtgcttatttttagagaaaactgttttccttgatctttggtaattatttaggagaaaattcaatccacctactcttttactcaattaatgagacacacatgagattaatattttaagatgttatggtgaatacattactagtatttaaactaaaaatgtgtgcatcgcaatatatagtattcatattcataaaggtccttcgctccattctactatgaattttttaatagttgactcctgatgttcatcctacagtgaaatagattctacatacaactggaaatgtttacacttagtaagaactagctatacaactggaaatgtttacacttagtaagaactagctacaatataaagctacaattcatattagcacatattgtaatgaaggcttacatatatatcgctttggcaagcatcatgctctcctcggttgtagcatatgtgtcaaatatatcatctagtatggtgataaatgctatcatctttgtaagtataattcgtgaaagagaataatggggctccgagcatgctcctatcatccaaaaatgcatttccactattctatcccgaatgaagcttaagtttgattcaacattaagctctttccaccatctgtattatacacaaatgctagaaattacttatttataataatttgagggaattggataatcattatacactttaaagtaattaactcaccctgtgatagattttagctcctcacaataaataagttgaaggagattgaaattcaactttgcaaattctaatatggattcgtttcgtgtagtagcactttcataaataggaatatagtttcgtatttctaatattctaaccctccggaacaggggtgtattaagagcaagagacacttcatcagctgccggagatttcaaatgttccaattcggatctaaggcggttagttgtaaaaacaattgcttcatcaagtactttttcaccatgagtcctcagaaatgccgcattatataagctcaaaagacttcttacatcatcagcaacaaaactcccctctttgtctttaaaatgttgaaacatatctgcaaaggtgatcatgttaacttcttaaaattatggatattaagtgcatgtccccaactatatatgtatatgagaatatgtaacagaacataattaggctacatgcatgagtatatatgaaatacattatactaaaatgtataaatgaaattttatgacaggtacttcaattaaatttctccaatctagactgtttgttgtttttctaatatgatttgtttaaaatatttcagttaaccgcagcactaatttctactagatgctaggggtgttattagtatatatttagtttatagatgcgaactatatatttttcaaactaatctataaggttcgtattgattccttcttcgagatctttgaatagggcagttggataattggaatagagtagaaaaaaaggaaagttcctatatgctatgggcttaattatataggacagttagaaatacatgtccttgcatctatcatcaaatactttgttagttgtttctttggaagaaactaattaattaattcttatcatcaataagaccttaattaccagatgacacatcatagccgttctttcgtagaagataaaatcgaagagaaactaggtgtaaatctttatcgttgtagtcggtgttgtaaacaatgcagagaaggtcgtttatctcagtctcgtagtaactatccaatccaagccgttgcagcgtgatcacaagatccaatatctctggtacttcactcgagccctttactaccttcctaacttcttctttcacaacttgaacccgttctttcatgtaagcatgctgtaaattaaggaagacacatgtttcaaccattcaaaagcataccatgtatacatataataaataatcagttacctatagaaggcacaaatacacaattaatctccaatatgcactcatgcatccactaatagttttcgatggtaattaataatatagttagtacaaaacatggtataaatgtaatactaatgtgaacatatatatttctcaagataaagtctacattattcgttatgtccaacaaaaaaaattccacgaaaactaagggaccgttagttatttagttatagtttatttataaagttgaactaccacatagtgtagaaatgtcacttactaatttcctatcaactgagaatcagatagtatatatatatatactactccttccatattttaatgtatgatgccgttgactttttaatcaacgtttgactattcatcttattcaaaaaatttatgtaattatcatttattttattgtggcttaatttattatcaaatattctttaagtataacataaatatttttatatttgcacaaaaaatttgaataagatgaatggtcaaacgttgtttgaaaagtcaaaggtgtcatacattaaaatacggagagagtatataataagaaagtaattgccttaggcgcagtaggtggctggtaactgaggaagaaattgccccagaggggtggaagcttgtaggagcccttcgctgtggctgctcatcgccttcattggagaaagctgcaggtggcgacgacatctcttagcaaattaaaattctctcttctattgttgccaatgtaacctaattatatttctctgcgactagctggtgagtggctacgtctgctgcctcgcgtggtatttatagacggttttgcacaggctgagcaagcatgcatcagcatgacttcatgttggcacacgtcaaaatgatgtaagcatatgcttgcatgatccacgtgtgtgtcatccttccatgattgcctagagtatgtcatgatgcaagcagataccagcgagagtacagacccctaaaactcggtgagatggtggccaacggataggccaggtgttcggttcataaccacactttatcacaccacacatttaaccgtcacaatttgttagccatgtgtttggttcactctgacaattataccttgccacattttcttttaatcacatgtcccacacatcatatactcaattttcttgctaacttttccacactttattgctagcaatttgtccaccacacttttgtggatgcctcgacttgacctaattaatctttgttaggggtaaagaatggctgacaaccaaacacacccttaatcttttatagtgtgttctcaactacacattttcaacttctagtccctcatttaattcttcgcacgcgtgtttcccaaactgctaaatggtgagggttttttttaaaaaaaaaaacctatacaaaagttgttttgaaaatatcatattaattattttttaaagttttttttagcgaatacttaattagctagttagctctgagccaccccttttttacgtgcacaggagaaaagttcctaaccctctcctccgaacacacatctaatagatgaattccctaaaaaaaacatctaatagatgaaatcatgcatgcgtatgtaaggaagttgggagggtttcttattttccaagtaaatgtctagaagtgcaaattttcttgggaagtaccattaattgttcttttgtcaaataagaacgaccgagcctggcttagtatatatgaaaaactgcttctttggcttagcttatcagcggcaaccgaagcaaaacgagccagttgcttatagctagttgagtcttaattaagtattgaaaactgaaaaaaataaatttatttgactttttaagataactttcatatagaaagtattttaaaataaaataatatcgtagtagataggaaaatatgcttgtcataaacaaggtagtagtcattgcaatttgcgaagcagtttagacagccttaactcgatcagttagtaactaacactaccacgtacgattgattccacgcattagtgggtcgtctgtttaatttctgcttaattgatttgatacaatatgtcctaactaaataggattatttcctcattttctttttatttcttcttcaaatacaagggcacattctcacgtgaaacacgtaaaagctcacagccacaaggggaaacatatgacactgagtggtatttcctccgccccataatatagcaaatttatttttgtctatattaattcataaatgtgtcatatccctcaaaatctcttatattataggtcagaagaaagaaataataggtaaataccactatcctcccagggagaacttgcaaattggccagctatttctcattggttcagcttgcatcattgatcacactcaagcatatatataaagctggccgaagcatgcaagaagcatagccaaattcttttaattagcgtgtactttgaaatgacagctcacactcaaagggaacgttaataccatctcgttttaatctttcagctgaaaagaacaccaccttagggcccctttgaatcgtaggaataaaaaaacagaggaataggaaaaacacaggattctgacaggaatacaattgtaaaacagaggattgcaaaacacaggaaaaacacaggaatggccgtttgattggaccacaggaaaaacgcaggaatcagatgagagagatagactcagaggaaatgttccaagaggttagacctcttgctaactttcctccaaaatgtgcataggattacccattccataggaattttaaaggattggataggattcaatcctttgtctcaaaggccttcatagcatttttttttccataggattgaaatcctccaaaattcctacatttttcctacaaatcaaaggggcccttaatctctccagcaaaactcctctcgtctgttcaaacactgttcaaacagttacgaaaaaaatcccaaaaaattgacaatattcatataccacacttcattaaaagtctaaactcaagacatcgatttttattaaaaaaaagagataaatcaaacgtctgaacggtagtggtactattcacgcctaaaattctctcttttttctgaatgtatatcaagtccgaaattgattttctttcaagtaatagatgtcactctgttgtcaattgtttctagaaatttgcattaaattgaagagaaaatgccccatgtaaggctcaagggtcgacaaattagataggtgtggtccagcacactcatactgtaagagctagagaagcaaataatgtgtggctcgcatcatatcccacctcacctaggggtaatgggcccgtgctctttgtacaacccatcttagctcttaaatatttttagcttaaaaatctattaaatcttatcctaatcttttttgacacaactcttatatatgtttataggctaaaatgttgggcaccttacaacccctaaatacattatgttggtggtacataattaaacagcatgtgtcctatgttgtatatacagccgtaataggatgtgttccatatatatgttcgacctgtctttgagcaaatagtggtcaagattatgcatattttacaaattaaattcaaatgtaatgtgaggcccaacttggtcctgtacgttggtctagtataggactgattgctctttttttttccaaaaggaaaaaagggaactcgtgatgaaataatatgtgtgggtctaagtacatagcacgtcgaaatctataatgttatatttttttgtttcataggttacttacaagtgctgtccctatatatttatacgtctgtgtttgaacagcaatgacatgttcgagacctaagctttatacgcatttttgtctcaagagatgcctaaaagtgttgtccctatcatctattcatctctacttataagttactccctccatcccaaaatgtttgatgccattgaattttttaaaaatatttgaccgttcgtcttatttaaaaaatttaagtaatttattgttaaatatacttttatgtatacatatagttttacatatttcataaaagtttttgaataagacgaacggtcaaacatgtttaaaaaagtcaacggcgttaaacatttagggaaggagggagtataacgataccaccgttctcatgcatatgggccacaatttcgaaggttccccgagttagacctagccaagtactgataagctgcccgctacagtaggtgggatattgatttaatcacctccctctaccataaaaccgggtataacatctcctccatatttaaaaaccggtgcaaatcaattcctttagttgtttggaaggtggtttcagctgacgtggcatattgaccgcaattgactagctaagtcagtgggcgggacccatgtatcatcctaatcttatcttcttcctaacctctcctaccctctctctcaccaggatgcaccgacgacgacacgtcccacggaggcagcaaaccggcggcacccactatcaacgccgcactccgatcccaacctttagttctccgggacaggcaacttctccagttaggactatggctttccggtcggggtcgccatgagaagtggcttgggaggatggaggagcataggagagtggagtagcaggtcatcgtaccactggcctcccgccactgcatagtctcccatgggagaagggagaagtggggttgacaagtgggccccaccaattttttattttttactttggggcaattgcgcatctgaccctgttttgagacctaacttccaatttgaccctcttttttcaactttgctcatttgaccctcctatttaaaattgaagatacaatctaaccatcttctattcagggcatgtaacggtgtcaattggaacaaaaaaaataccccttctgcccttgtttatttgactctattttatcaaaaatattacaaaattttggattcgaaccaccatcctcttcaccacggcggcgtcgtcatcgttgccgacccggcggtggcgcttgcacggatgaagat

SEQ ID NO: 28741 - DNA, 17534 bp, Oryza sativa
  unsure (1)..(17534): unsure at all n locations
ttctattttaaattttttatgacgctgccacgtcaacatacttaaaccaagtcaatgtgccacgtcatcagaaaatgctttcaaaagcagcgaaggagtcaatttgcaccggtttttaaagttcagggaggcattatatccggttttacggttgagggatgcgattcaactaagtgcaaaagatgagggaagcaaaataaacttattcctacattaggtaagtttttgaaccccaagagtctagtagcccacaatatatcatttccagaattttttaatttatttttgaaagatttaaaaataagtcgtcgttttaaagttttgcgaaattatactcctcccatcctatgtaggacgtgctatgcgacgtggcacaaggctggaggggcgcaccatggtaattttgcaggcgccccttctcgccctccctgagggtgatttatcgccggagaaggccggctacaaaattgccatagttggtccctcctacgggttccattgcacatagattgtcttaccatatggtgatttatatgccccatcctatggtagggcgggaggagtatatttatatacaactttgaaatggaatttattttttaaaactcttaaaaataaatataaaaataacaaaaaattcatcatttccaatgcttgctttttaaaagagtaaattttgtagaacttcggatttatggtccaaattatagataaccactgaaattttgacatatatcacataatcacatatgttcctttttggtattgtagtttcacaagacctcaccttaattagattttaattatgctgacatgtgggacccgcttagctctacttggtgtaatcgtatagatggggcatatagccggcccaatggttggaataatcgcgtccacacgtactctgtagaaatcgcgagtcgcggcgagaagcacacacgcagccggcgcaattgtcgcacgtacgatcgcctgaaatcagtacaagtatatctatgcaggcaaagttccataaaccaatttatatgtatatataataatctcatttttacaacacactgttaaatgtaattgaatttacatcaaattaattagcctgtcgtcatgtcactgattgagtcatatacaaatcgatagcatcaagattggctactcgatccgtatttgttaagaatcagccccattgactcaatcaagtatgatgccgtttacagcagcaccaggaggggatggcctgatgccggccagcgacgagtcagacgagaagcagggggaggcgacagcagtttaggctggtcagggttgtcaatttgcgtaatttcgcaccctaccggcattcaaataatatccgtcgaaatttttggttttttttaatttggtcaaagtttattaaaattcaatcaaattttattaaattttcaaataatttcggataacagaatgaaaattttcaaaaaattcggtgcaccaaaatttctgaaattttagcccaaaacgaaattgaccacctcattcggccccagcctcacacaaagagaggagaagatagagcagcagtgagagagagagaggagagaacgagatagaaattgactgagtttaagagaaaacttggcagtgatagcatttttcaattttacaaaatttcagtgacacctagctgatattgtgaatagtaatggtatttttttaattcagcatatttgtaatagcatgatcaaattaatccaagataaaagtccgtatactattttaaaaacgatttttttcatggtgccacacttttctttcgctagcggttgatagtgggtcccacctgcgaaggcatatcccgtggggactggggagggggcacggcccactggcgtagatctattatcaccgatgggctacgtaagttaactgccagcacaaatatctgcattttaacggttggcgtctaccatcgcaaatagttatattcactggcctttggtttctgatggcactactaaccacctgcaaaagtccattttggccgactggaaaaacccattttatagagtgatattataattcttatattgaagaccatgctagctataacttactaattattaatttcgaatttttacgttaacttaataagatactaaattgagtgtacaaaatagacgctgctttgaatttattatgaatactccacgaacgagcgaattcactcgttccaaaagacccagtaggagtattttcttgtgatttagtttaaataaacaattgctgctgaaaaaagaaacaatcatccttagatttcatatcaatattttataactgcaatactacataggatcaggatctgaatggtccagcaaggctttgaacacaagtttactgtgacatggatcatgatcctgacaacctaggcagtagtaacaaaagttcagataaaaccctggaatatggcatagcccagagtcaggacatgcactacatactaggtcagagtaaaacatgcaagcaccacttttcaagggaaacaccaatcctgaaaacgtggcatcttgactcaaaaccaaagctacatgtgctcataaaataaatcacatccaggactcttccgttttgattcagactaattaacaagagcttgtgtcagaaaacacccagctaggagacatgcatgtgagcatctgtgattcagatttccaaagcattctgaaatctgggaacaagctgttagctgaccccatatatatatatgcagacaaaagccctcagtttgcattgccttgggcttcaattgacagacctcaactctcttgttttggaacttcatttcatcagcactagtaactgcaatgaagagttccatggtattggcttctgtcatcctcctgatcatggcagcaacagctcatggtaatgtttcaggacaagtaatatctaatactcgttttcatatttgagttcagctacattttgtttctacctctcattgttgtgtatcatgaatgtaaaggtactgattcttgttacatacaatccatttcatcttgtataggacttaggctggacatggggttgcatgcagctctgaacaatgaggtcagtacaatctgtgagcctgaacacagctccactaattaacatgctgaatcgcagcacggaaatgtagtgatcaactgaacttgaacacctaaattgacaggggatgctgaactccaaatggcagtcaactgctaaccgtccgatcgacacgcgtcgcgcatccaacgacaggcgtggcccaggtagaagtagaacgaggccaccgaagatgagcaatccccatgacatggatccaaggttcagtgaggactactccgggcccggtggtcattcaccgaatcaccaccgaacaactccctgcggtccatgctagattgcaagtagcagatagatcatagatgatgaaaacttgtccagttttctctgaagatgctacctccatcaatcttcagaaagatgaactggaccatgtgagctctgtggctcactagtttttcagcacattagttagttctgaagagtagtttttcttgtatgatttgattatgtccaattgaattcagcttcagtctgaagagaactgttaaggaacaggattagtactgttctaggattgtcattcaggcaactgtaccggacggctacatgtcattcgacagtccaatcaaactgtcagttagagtaaactcaggcttaaaattatctttgttttcttgttctcaaggcattcaggttagacagggttgcaggaaacgctgcgcctttttgaaggagagtgtacagtttgtgctgcaaattctgctccctaacaaaactctgacgactactgatgagcagagagatgattgcttatctcttcgaatgtcggatgcttcctggataaagacaggggagacagctgcaattaaaataagaggagagatttctttctcaagcaaggcgttagtggcaaaattatattcatatcacagttgcaggagcttacaaagttactagcaccagaagcaaaatctcaaactgtactcctgagctaaaatttgatttctttggcactatttacacattgaattgtttcctgtagacaacaacaacatatagcaaagcccagacgactgaaaacagttatcatttgattcagtatgatgtaatccatattcaggtgagcatttcgccccgggtgatgcttaaaaaaaaaagaaaaaggtatgatgtgatgcctattattgacaaaattctctaggttatggagatagattcatgaaggaccagcaggatacttctcaatcaagtcgaataattcatctcctataccgaaaccaagcatcctggccatgtcagccgtcttgagtccaggtttaggatgttcctgctgctttagccatgagtaaacaatgaacaccttcttcatcacaaacagctccagcgcctccgggttgaagaccacaccaagcctcatgctcatctgcagatttttgcaaatatgaattcatcttaaactccaaaacgacatggaagtatatgtaggaccaaattatttggggatgcaaaattcaggttatatcttgttacctggtgaggggccagcattgcggcatatctggcaagttcaccagctctccaatcaagcacaacagggaaccaagggtaacaagcatcaagcctcacaaaccatagccttatatcagggaactctgacagctccctcacatcatatggatcctccctctcatagtttatagtaaacccgaccgttcgatccaagagatttcttgtttgagctgaatgatacacataagattcttgttaactataacatggaattgactgttgaaacaatacaatgtcatgactttcattgttgcgcacctggtgtcagggaattcaagtcaccaagtacttcatgaacaggcgaaaggtcgagcgtccggatgatatcggtgttgatgacaatctcaaagcgaccttctgtaggtggtggtggaggctcaacttgtggggcatctacagcaagccgtcgaagattgtcatttgcaagcaaaagaaatggatttaccaaatcaaggaacaggtgcatattatacacacagaacgactgataggcaacaaataaagttttaattgtaacaaattttactaggtaacatgaggtcaacccagcatgaagaaataaaatcacttccacccttgctttgtttcaagcataataacaacttttacccttcagggaacctctagcaaccaataaacagggtttcacataaatgaaccaccctgtggttaattaggcatttccaagccacatccctcccatgcaattgaagtttgagaacatctttgactgaatcaaacgattgagtgaaaagctcaaatgttttagtcataacaagattagtattcttgcaatttgcacatcaactgcgatggttatcaactgtgatggttgatgtaacttcactaagagtcaatcatctcagtcagatactcatatgtagcagattgacggtgcactgtaatagttagcaatggaagaaaaaaaaacaagtcagtagtattgtcttactacagaaaattatatagttttcaaactcaaacacaaaactgaataaaatacggaattttggttttcaaccgctctccatggagaaatttatttccaaattggcagtagtttttactcctagtcgctcaccgtcttggtcggtggagagggagaggtcgaagttcccggaggggttgaacgcgacacggagacgaaacccctcctccgccgccctcctcgcctgcgccgcgacgggccaccgcaacccagagtaccgacccaacgagccgctgccggggaaacgcctcagcgtcagacgttgcgagctggccactgggagttggagtgcggtggcggccatggcggcgacggcgacgcgatggacgcgcggccgccggcggcgaggaagagaggtgaggtcaccgcggcgggagacgcaacgccggcgaacggtcgtggcttctccccgccaaattttattatcctttaattatctcgctttttcttcttctttttttattattattacaagtaatttatatttattttttttatggaacagcacatttgtgggcccatatgggccttttagcttctcccggcccggcccatgaaatgtgcggcccaatttgtacagctcagctcctggtgttgactgtcgagacaaagcagggcacagatcacatgcagtttgacatcatctaactccattttcttctacttcaaaattcaaggttgatgaaatatattaacccatgtgtttcacatacacatgttcgtttcaattttttttttaaactagtgcgtgcatgtgagatgaatcctcacaaaatcaaaagtagtatggcctttcagaacatgcatgccgtcgttttggagctccaactcttgttggtatctgctgtgcgtcaaacgataagacatggaactttcttagctcaaaaaagataatctttgctcgattatatagagacaaaattaacatgcacaaggaggtcgtgacccatcacaccaagtttcatcccagcttgaaaatgatattagttgcataatgccctttattaatgacatgttataatatcacttgatgtgtaaccgagcaaaatttggatgctttcatgcttaggatgttgttgagccgttttccatacatatatatgatatatagtcactccgttttcgaataattggtaataacactattcaagtttaaattttgaccacttgtttttttatgaaaatttataggtattcaaatatactccctccgttatatcatcgagtgtgtgtagcgttataaatataatcataaaacttttattcatcataatatataaccatttaatagtaattagcaaatcattttagtcaaattgttagttattataagcatgcatatgtaacctattaaattttcgtgctttatcatgtgttcagtgtgataaaatcaattaaataggtatagttatatcctggtatatgttgtgtacaatacaaatacaaatatgaaacccttcacaagttcgatcacatgcttctttctttccgtcgttacacttattataattgcgttgacaatatgtaatgattttttaagaccatttaccggctctgccttccattggaaatcacaaactatttgcaacagcgattacaagtggccaaagaaaaacactacgtacgtactgattcaatttcttttccccatttgcggtatacgtaagttgttcattaattcagccggtattatacgaggtgacataaatgtaatcaaaatcataatgcaaacacaagtacccatcaactcatataattaaccaatctgtgtgttactctaaataatcatcgtcgttagctagctgaattaagctgtaccgtactatatatatacttaactccacatgcatatatgtctgcaagacggcaacgctgtatcattgtcctagatcgatgcccttatccactgttttggccagtttcaaaaaaaaaagaaaaaaaaaacactgtgtggcccctccacgtttgcaacgtttctttaactagggctcaacagtataatatgagatgctcatcatcattgacatgctgtctaattaattattaagaagttcacataaagatggagtttaacctaagtcacctttgtaagaggtttttttttgggggaaggaggtgacgattgaagaccttcatctttgcatcaactccaaagtttcttagaatatatgagcatgattcatgtatgctcttgcttatgacacgttttctaacctaaaattattaaccttcgagagcgaatccaggataagattaaagggactcatctcctttttcctccttcagccctctaactttttcacctctcctcttcttcatcctcccctctctccttctacatatcaatggtgatctagtggaatacggaactcaagttctcccagcatctacgcacgttggatccgtcccagaatccagtatgccttgatctcagtggtggagccctgtagccaaatcttatatatatagaatttcgaagttttcgggttttccgtttatacaacaatatatatgagtcgtttatgaacttatttacaaaacctgtgggggatgacttgacatagtctatatatactacatagaacttacagtaattaacaagttcagatataaaatgttcacaacctcatcaggagaagaaattaaagtctcacacgtgcatgcatgcatccgtgcattcccgttcttcttcattcactcggtaaggacgactctgtgcaacttgatatatatagatcacatatatatgatgagcatgtttcacgtagtctctgtggcttacgcgctgtctagccctaattaatctaacttaatcccctttttaactccatctaacctcccacttgcactaatccatcattcccttgacctaataactaccccacatatactgctatagtgctatatatacatatatatagaacccaactcaattttaaagcaagctaaaagaagccgatagacgacgacgacaacgcgccgaatgggtacggccgccgaacaaaatgcagagcctgaagaacaagncaagtttcgtggagtgccgcggggaaacgccggcgtggggttcaacgaggggcggtggctgaccagggtgagggagagcatggcgaagcggccgtggaaggagctcggggcgccgccggtaaaggtgttcaacgtgccgagggtgctgaggtcgacgaggcccgaggcgtacgcgccgcaccatttcgccctgggcccctaccactgccgccgccccgagctgcgcgacatggagcgctacaagctcgccgccgccaagcgcgccgagaagctcttcgccgccggcaagaggttcgacgacctcgtccgccgattctccgacatccacgacaagatcctcgccccctaccacaggtatatatgtactgtgtattgcctagcttccagctgaaactatatacacttgggtttgtaaaacggacactaaccatgcattagtctataattaatcaaatgtttagtgccataaacttgaaattttgatttattgttttaaagaaatttctattaaaagtgttttcataaaacgtactcgctctattataagccatgatcaaactcgacatgattttcaaaattaatctttggtttataatttctcgtatactgtaaagtttgtagcaacaaattataaccgtatgaaacatattcaaatctcaatccaatgatattattttcagcaaataaaaattcatattatttatactaattgttggtaaaatatttttaaagttaatgttgaaatatgtgtgcgccttttatattatttgatggacggagtatcactgtattagagagaaaaataaaacgcttgtaccacaacattttctttttagaaatcacgctcatggatgacaaattgtagaattgattactaattgttagcaaaatgtccctcaataaacataaacaaagacatagaccctgtttggatccggagggctatctattaaatagccctccagaatcttgctatttaaaagtattaaacgtagattactgacaaaacccattccataacccctagtctattttgcgagacgaatctaaagaagtatattaatccatgatttgctagagtgatactcactggtggagaaaggggctttactcccggttcgtaacccccaaactgggactaccaatccgggactaaagatagtgatctttagtcccgagtgaaaaaaccgggagtaaaaattcatctttagtccaggttggtgttaccaaccgggactaaagatagagcctttttagtcccggatggtaacaccaaccgggactaaagacagagctagcctagctagatccgattgctctattattattttattttcttcattttgtttttaatatattgatttcactccatccccatcccaaaatcccaaataaattatccccaaatcctcaaatccccaaatcggccatattcaaatagatcacaaaatcttaaaacaaaattacatcacaacttctacaaaattcatcacaaatatatcacatattcacagacatcacacacaaatcaaatacacagatctgaatcacaaattcttagaaaaaaaagaaaaaaaaacacaggctgctgcagccgctgccgcgccgcccgccgcgaggccccgcggtccgccgccgcaccgtcatgaggccgcgccacagcgccgtccgccgccgcccgggcctctgcccgccggtgcgccgcggcgaggccgccggccgccggatctatcagtgggatgatggggagggaaggagaggagttagaggagagaagttagagaagaggaagaggaagggatgctgggggagggaaggagaggagttagaggagaggaggagaaggaagaggaagagatgggatgaagagataaggtcagtggaggaagaggtgaagagataaggctgctcgtctcctcctcctcgatctcgcagatggcagatgcctcgtactctccgccacgatcttttgttccggttggtaccaaccgggactaaaaatagatctttagtcccggctggtaacaccaaccgggactaaagattaaaaagcagctctaaacttttgaaccgggactaaagataatctttaatcccggtttttattgtaaccgggaccattgtgggttttggccgaccgagcaaagatggtttctccaccagtgactacagtaatcagccgctaattatggattaatatacatcattagattcgtctcacaaaatagcctagtggttatggaatcggttttgtcggtaatctacgtttaataattctaaatagcaagattccggagggctatttaatagcccggaggattcaaacaaggccatagtggtgacatgacactctcgttgaaagccaacactaacaatcagacggaaaatagaagattaaaacttgagaaggagattcgtttagacgacgctcctgtcaaaaccgtttgatctcctctgcgttaattccaatttaagaggtcaagaggatgtgttagtcgtctaaggcgagtctgagattatataagtattatgcccaaaatttatatctcatgtacgggtcttattatatatttattttcatttttatccttgcatctatcctaaaaggcaatagccaataggaatgcagctgagaaaaaacgacaagcaaaaacctttgacatcgagcttgtttttgaccagttggcttgatgtagctttcaagaaacaacaacgaactgggctatctacgtggcatggtgtaatctagcacgtagatatatatggctatataaaaccatttctacataacatcattatcttacgtatacataagaggattaagttaggtagagagaattgacgcgttaacatctcaatgagcaactaattgctagaataaatcaccaagcttgcaagagagcgaataagttagaaagtcaccaagctagccaagtgagaatgagtatcctcttagaaacgcccaggggttttccggctagctccataaggtggtggactagtcgatctgggttcgaagctccatcccttctaattatttaatattagttcctccctaatattcgcgtattttagagcgagtatcctctcgttgtagtggtgtagttgtgggtctacaaggtttaaattctagttagttgtgtgttcatattgttagtccaacctcattgttaatttgtttgctgagtacattactagcaaaaatgttcatgctttgctatggattaaaatatattataatatatgttataaaaatattctatcacatatggcatagtatcacttgtttgtttattttaatataaaatattcacttttaaaataaatattggattacttcataatatcataaattaattttgaaaaatgcaaaagtagtggctaatattgtttttatagtatagatagcaaaagatttttgaatttttatattttctttaccattttcttttctgatcagccttggcttctaagccacttagagctagcggaaatatatagcccaaccataaaattatttttaattgactcgcttattttctatgccttatcaactgaggcgaccattaatgcccaaaggtaagtaaataaacatactccttcatttcatattataaatcattttttttctaatcaaacttattaaaaattcgattaagtttataaaaaatgtagcaaacaccaaattagtttgattaaaactaacatttaatatatttttatagtttgtttgttttgtattaaaaatattgctatatttttctataaacttgattaaagctaaaagagttaactagaaaaaaaatcaaaacaactcataatatgcaacggtggtagcactaaaaaaaaattgaaactgtgtttgtggttagtttccccaattatgggtttgcctttgtaattcaagcagtttcttgtgctaaattaactcaatcaaattaacacataaatcgatgcatgtacgtaggttactggagctgaacgagcagacgctggcatggatgatggccatcgacacgtgcttcctcctcgacttcctcgagagctaccaccgcgacgaggccaccgacatggtctcgtcggcggccaactggatcaacgccgtcgtgcgcgacgccatcatgctcgagaaccagatcccgctcttcctcttcgccgccgccctcgagctccgccacggcaccgaccaggcccaggccgccttcgccgccgccgacgcccttcggggtgttctcggccgcttcatcaccgaggtgtcccccatcaagaccaccgccagcgccgccctcgccgtcgccggcgacgacctcgccaggcacgcccacctgctcgagctgctctaccacttcctcgtccccaccgacgccgtcgccgaggccgtcggtaacgagccgccgccgctcgtccccgaggacttctccgccgtcgacgtgttcgaccaaatgcagaaggagatccccgactacgacaaggtgaagcaggcgtgcgtgcaggtgtccagcctcgacatggcgccgatccggttcatcaagaagaacctcatctcccggccgatgggcctcgcggcgagcctcccggggaagctgatgcgcaaggtgccgctgctctcggcggtggcgccgctggtcgggaagctgtggtcgtcttcgtcgtcggcggcggacatggaggcgcggctcaagggggtgaacctgggcaccatcatcaactccccgctggcgcaggagctgatgatcccgtcggtggcgcagctcgcggcgtgcggcgtgcgcttcgccccggcgcccgagggcatcgccgggatcgagttcgacgccccggctgcgacgctgaagctcccggtgatcaccgtcgacggcaacacggagacggtcctccgcaacctggtcgcgtacgaggcggtggccgtgcgcgggccgctggtgctggcgcgctacacggagctgatgaacggcatcatcgacacggccaaggacgtgaagatcctgaggcagagcggggtggtggtgaaccggatgaagagcgacggcgaggcggcggagatgtggaacgggatgtgcagggcgacgcggctgagcagggtgccgaggctggacggggtgatccgggcggtgaacgagcaccggagcaggagggcggcggttcggctgaggaggatgatgaagcgctacgtgttccggtcgtggcgggtgctcacgctgctcgccgccgtcgtgctgctgctcatgacggcgctgcagaccttctgctcggtgtaccagtgcaaccgctggttcggcaacatgctgcagatgccgcagcctggaggtaaagggccctagccctacggccttgttttgttttcgggagctttctagcagctgcagcttctctctgtattgaaaatatgcttgaacggttgaaaaaaaaatcataaatgttataaatagtaacaaattcagtatctaaaatttcatggacttgttgatgtacatgaatggtataagctgatacctgtaaaattcgcgaagttttgtgtgtgcttttacccatatggtttagtgtatctctactccctcccaccgcaatgctctgcttggcacgatagagccgccgacgaggtgttatgggctggtttgttccatgtcatacgggccgtaattttccgggccttgccccgaaatccctcgagcattagcttacacgggctgaaaacaaggcgtttcatcggcccaccaacctggatgaaacaacaaaaaataagtctattcaccttcctcctcttttgctcctaactgaaccgcctccctcaaccgtaaaaccgggtacagcacatccccatctttaaaaaccggcacaaataaacttattcagtgatttgggaagcggtttctgcttacgtgacaagttgatcgcggttggctcgatgagtcaggaggttggacccacatgtcatcgactatcatctatccccccccatctccctctcttctactactctcttttttttctcctccttgctcctcaacgagtgcagccgagtggcactatggtggctacgggtcttggagatgaagccactggatcggtagcgagcagtggccggaagagcagcgttcgggtgaggacggatcaactcggcgtgtgggcgacattcgggattaaggaggtagcagtggtggaggtgctacagcgaggggaactcagcatgttggggttcacggctatcagagaagcacggacatctagcgatgagtgggcttggcaagaggtggtggggtagaggagatcgagtggtggatggcatcggtggggaaaaagagaaaggtgctggagcaagaaggtagagacgttgttggacctagggggagggggtagccggggcgccagaggcatggagcaggttaacctcttgattgtttgaaatgttcttcatcctcgtcatgttcttcgatccaccggtccaagggacggtcatgacgtgtggcgcaaatcatggtagcaggtgaggcgtgcggcaatacgtagatgacaacgagcatgaccttggcgtcattgatcctggtgaggaatgtggcctcactacctcaatgccggaacgccgccgccgctgccttccgatctcctgcttcctcccacgccactatagcctccccgagcttctgctctaaccgtgactctgaggacatggatggagcctcgtctctaaggccgttcccagtgcatcacacaaatttgaggaacctcgaggtgccatgtaggctagagctacaggtccaacctttgggttcttcacagtgcaagtggctctaggagtagctttaattttgtattttagcccctaacactttatgtttcagttctcatttttccaattantgtgtaggtctaaatttacaaataaacaccctcaaatctagaaaaaatattaaaaccccctttcccctctctctcccttatcttttcgctcatctcgcattctcgttgcaactctccggccgatgcgcctcccctcctccatctccagccgccgcgcctccccctccttcggccaccgcgcctcccccaactcctccagcgccactctccctctccccaccggctgccccctatctccctccccatctccgcgacttagagccaacagtagctcgacgctggcaactccgcgcccctcctcgccggatctggccttgggcgatggcgggtcgacgacggcgggggcggcggtggcggctcgacggctagggcggcaatggctcgacgacgggggcggagacggatgacgatggcggcgacgggtcgatggtaggggcggcagcaagaggaaggtttgcttcgcattttgggacatggtctctacaacgtagtgtcgaccctctctcgccgcgtcacagggtttcttcctgacaagttatgacgaggtttgggtggccaaacgatgctccgcgtacttcataggggctcgctccacgcctagatggctcggaatctctgcgctggtgaggtaaggccgaacgccacctcaccgcactatgaatggcctaaggatacagatggaaccgaaaattcccttgcctctaagaatgcactgccattgcgatctccctgatcttccatctttccatgccatcttctcctccctgagcgttcgctcccgttatgacccacaagcctctcggattatgaagccatcaccaataccatggggggttgtcttcgccatcgcctacctcgacctccatctcacggaccttgcgagggttccaaggcagcatcatctttaggatcatcactgacaacccgacaggccgatacctccctgcggacactggctcctactgccgcttggacttcttggacctctccatcaccctctctatcttcacaaaccagttgtcctcgagttcactgtcctatgcctcgggaaccctctctgccctccctgcttgtctcgttgctactatgcttctcacggtgagacaatgcttaggtcaccctcgaacccagcctcgggcatggggatgactcaggatggaggatttgtgccgctgccctcggggaagagatggaaaatagaggcgaggtggagagagagagaggagggaggttaggagagtcgatgacatgagggtcccacatgcgaaatcagcgagtcaatcatgatcaacatgcgatgtcagtaaaagccattttctcaaccaatgaaggaaccaatttgcaccggttttcgaagacaggagaggcattacatccagttttacggttgagggaggcgaatcaatcaagaaataagagttgagggaggccaaacagacatattccaaacaaaaaagtctatgcaggccgggctatactgctataaatgggctcgtctgtttattggacagattgggcccaaacctgaacctacactagtggcatatggactgatattcaacaaaagccgggccccaccacggtttgtcggaacgtaatcgccagccgcccttccgttccttggcctccacgcccgtcctttctgaaatgttgactttcttctctctctgccgctctgcgttccttcaacgcaagcaaccacgcatcaggtcaaccgacagcatctactggtactagcagcctagcagtacaaagcttcgaaattcttgggccaatccagctgtgctctgcatcccgttgacccgttgaccgctgaatcaaaaaccgaccacatttcagcgtgcagcctccctctccactccatggaatatactaaagaattgataaactcctaccacaagaaagaaaccagcgactcgtttagttagttagattgattagccggtcaagttcgctaattacttgcatgactcgtacttgacgtcccccaatctgaacgcaacagatacgcgcagaaaatctttca

SEQ ID NO: 28742 - DNA, 5287 bp, Oryza sativa
  unsure (1)..(5287): unsure at all n locations
aacgtaatcgccagccgcccttccgttccttggcctccacgcccgtcctttctgaaatgttgactttcttctctctctgccgctctgcgttccttcaacgcaagcaaccacgcatcaggtcaaccgacagcatctactggtactagcagcctagcagtacaaagcttcgaaattcttgggccaatccagctgtgctctgcatcccgttgacccgttgaccgctgaatcaaaaaccgaccacatttcagcgtgcagcctccctctccactccatggaatatactaaagaattgataaactcctaccacaagaaagaaaccagcgactcgtttagttagttagattgattagccggtcaagttcgctaattacttgcatgactcgtacttgacgtcccccaatctgaacgcaacagatacgcgcagaaaatctttcactatagcgactttattctgtacgaaatttcactaatcatttctgcagatctgaattaacgtacgggaggcttttggttaaatttccatccacggatcgaattaataaagaacaaagaaattgttgacacaatgttctactaatgctagtagtaataatgaacaacatgttgagatttgacgaagagatgagatgcactctactatgaacagtacaaaaatctccggcgagaaacaggggcatacaaggattcaaaattgccattggttgagatcgtaggaggcgtgacggattcgcggtttgtgctcatggcgacgaggcggcggcggcggcggacatggcggagaggcggctggggcgcgggcggaaggcggcgcggcggcgctggtggtgggaggacgggcggatgagcgccgccacggcgcggcggacgtggtcgccgtcctccaccgccgcgatgcgcaccagcgagttcgccatcgccgacctcctcgcgtnctcgcgcagcccgccgcacgccgccgncacggagggacgcgacggcgacgccgcgccccggtgcagcgcgcaccggaaggagcccgggtgcgtggtgggcgagcacgcgcactccctcctcgtgctgcgcgcgccgaggccgccgccgccgcgcgacgacgacacgacggcgaccgtggcgtgggggagcgcgacgcggaaggcggacgggaggaggccgccgccattcggctggcgcgtgggcggcggcggcgagcgtgcaccggcgccggatgagagcctgacgcggcggcagacggagggggacgccggcgtcggcgtggtcgacctcgccatcggtccaagcacggcgtggcgtggtggcgcttcggttgcggcgcggccaaacctagcgtcgccgccgcggcgtgaatttataggcgggaagcgggtccatcactccaagcccaagcaagtggtctcttcttcttcttcggtgtggctgcctttgtgggccctgggccgaggcccacatgcattgttcacacttcagagagcttctagaagcattgaagacacaagactacctcaaaggaggagaataatgagagcctcaagtcctgtgatcttgcaatcaaaagatcttgtaagatcattgacaatctgcttacaaatgattatacactactagtagtatttacttgacaaattcattgctttgattttgaaggattgatgtctacaagatttttcaccgtgcgtcttggattctgatctcatggtagctactgacataaaattagtccgaactagctggtagcccgcgcaattgcgcggctagcacccaaacaaaatcatatattttttaagtatgattttacttaaaatttattaaataactatctcattttcttaagactttaaaagaccaaatcttatcatcctcgtgtttctaattatatagtttttaaaagtaacaccagttgctacctcttatgtcatctccttctttgtttgcttgctcgatctaccactatttctattcatttttcttggaacctttaaaaattggattttatagtttttagagtttattgtcacgttgggtttcgtttttataatatctagatgtcctgtcaaacgttgccattatactcctctacggcccatccactgtttcttctctttattgtcattaagattttaaaaatcgaacataatttatcgtttttgttcattttttactttctagaagtcccgccaaaccgtcatcggctttgccattgtactcctctacggctcgcccactgccttccttcgttattgtcattgtgattttaaaatcgaacatgattatcattggtttttttttactttttggaagttccaaacctttaaaaattcgacgtggaggttcattttttttataatttttagaagttccatcaaacgatgccactatgcccttttacagcccgtccggcggctactctttattatcattatgattctaaaaatcaaacataactattgttggaattcattttttattttctagaagtcccgtcaaccgtcggtggctctgcagctatactcttatacaccctgccccctgcttctcctttttattgtcattgagattttaaaaatcgaatatgattatcaatggttttttttttttactttctagaagtcccggcaaccgccctacttgtttgctttatggcctgcctgacgtccttccttttaatcgtcgttaggattctatttggtattttattaataatttttatatatcgtatcaactgtcaccactctactcctttataggcatattacttaatttatctcgtcatgtcgtcatgtgctttagattgttttttctttcaataatctttatttttatcacaaattttagttatttataaattttattcctaattgaaatcttattttcctttttctaatttcagaatttatttttaaaaaaaatttagttactaccatattgtgttcttttaatgtttttattttttcattttcaatttcaattgtttcaaaattgtattcatacttgaactttcttttaatttttctaattttggatattattttattttttttcagaattttaattaatctcgtattgggttcttacttggattcttcttttaatattccttatttttaattccgaattttagctatttttaaattgtatttatacttggactctcctttccttttctaattttagattttattttatttttatttcgaattttgattaatctcgtattgggttcttatatgaaaacttctttcaatattgcttatttctaattccgaattttagctatttttaaattatttttctacttggactctcctttccttttctaattttggattttattttatttttatttcgaattttgattaatctcgtattgggctcttatatggaaacttctttcaatattgcttatttttaatttcgaatttcagctatttttaaattagacttctacttggactctcttttttcttttttttctttttctctgattaatgtgggaatttctagcccccacagcgatcatggtgtcttttttcaaagctgttttaataatataatagattccatgtgaatttaacagtggcgtaattgttctgtttctttactccatggttctaaattccatttcagaattcagttatgaggtgacaactgtcgagatttgacatgctgaactagtccaagccaatatggaactggtttcagaatgggccactcgaattgagacatttcaacaaactgaatctttttttgtttctcacttcaaaatcccaatggcacttagctcacatcatttcatacgctgttagccttatgttagcccacctgctggaaaactctgctcaaacctcaagcttcagcaggacatcaaaacaacaaaagcaacaaaaagtaactgctatatgtacagaatttcagatgcagaaaaacagtgaggctgttgatttttgcagaggaggagggtattcttattcttcagggttcagaatagcagcagcacaatgcacaagcatcttttctctgtatacattgcacttcaatcccattgtgctctgtgactctgtcctcaactccacactgcaaaaagggctttggtgcactggcacatccatgcaagaattattaggcttcttgtttattttttatttggacagacagctgaattctgtttgtgaggagcctcataaaaaaaataccacttcaatttggaaagctttatgaggagattaattaattaactaaaattgctatggatgacaaaggagataactgaatcagcagtggcatgaaaaaaattgctggtcagagccaagctgcagctgctgcagggtttgtatagtgttcttgtattgtacagggttgagggttccaactccctttactagcactagttattattacatgatggaacatgtcatcatctcatctctgctctcttatacttaattaattaactctcttcattaattaatcactcgattaagctataaactctctgggtgaagcagcagcatccatccaagaaaattaagaagaaatgaaacttaattttccagggttaatcattaattgacccttcttgttcttgtcttggatggatcagcagctctagctagatggatacttggatagctgacgccgccggcgatggcgatggcgacggcgagcttcaccttggcttgaggcggtccaaggcgaggtaggcgatgacgcggtagccgacgaggaggagcgccatgacggggacgtcgacccagtggttgttgagcccgacggccttgatggccgggaagtcggcgacgaggcagcgcgcgccgccgccgccgcagtcgtagtgggcggcgccgtcgccgaactggatgccgatgaggaggcggtagcagtagaagctgtagttgagccaccggagccagccgacgaagggcgggatgtgctggacgtagtagccgccggcgatgaggaagaccatggtgatgacggaggcgagggtggtgccctgctttgacgtccatgagcacggcgccaatggcgagcccgaggctctgggcgacgaggacgctgtagaggaccacgaggagggagaggaggaaggggccagggcgcgggtcgaggccgcccatccagtagaggatgacgacgaaggcggtggggagggcgagctccatgggtaggtcggcggcggtgcgcccggcgaagtaggagaagaggcggtacatccccgacgacctctccttcaccagcatggggcgctcgagcgggaaggtgaacacggcgttgtagagcgggaagaagcccc

SEQ ID NO: 28743 - DNA, 638 bp, Oryza sativa
accaccccgcggccggcttgccgatcttcaccttgtacaccacctcctcgaactgcaccaattatcacaaaaaaaaaagcatggtcacgtctcatcaccaacctccctcatgcacatatgtcaacatgctcatgcacgtagctctacaagtacgtacgtacgtacatacatacatacccctccgtcccaaaaaaagatcaacctagattcgtaactaggaattcattttttttgacagagtagtatatatgtatatatacacaaatgtgtacttgtctactcaccttgaggacaagagggtaagagttggcggcggagtggtggccggaggcgacggaggggtgacttgaggtagtggggtggacgatggcggcgccggaggtgttggtggaagaggacgacgcggcggtggcggtgggagaattggtagaagaagaagaagaagaagaagaagaagaagaagtggttgaaggtggagaactgaagtcgcggtggtgaccgtcaccggcgccgcccccgccgctgccagcgggtgtctggtggtggtggtggcggccatgatcatcgccatgcaactcctgaggcggcatggcgatcgatcgatggatgaaaatctctctgtctctcgggtgtttttc

SEQ ID NO: 28744 - DNA, 2275 bp, Oryza sativa
  unsure (1)..(2275): unsure at all n locations
ctctgtgttctttagaaagacaaggaaataatccagacatgacaaaataaaaggcagagtagggatatatctacaaaggtgtttatgtagcacgcactacttgacaaatgcgaggcataccacctgcatgtctaattgtaacagaccagatttttgtaatggagaagttaccctcttctaaattctgtgcatagtaatgaaagtctgaaaccaataattactgatcaaagcaaaattggtcataccttgtttggttcactaaatgaattttcatccagcaagttgctggatgtgagaacagtcacagttgattttgccgtatctacaccagcttgaagtccacttgaagatattgtgaggttcacagcatttggcccgaagtttactatctgtggaagatcatttgaagatcaggatgttctaagatccaaacatattactccagcagtaatacatataaagacagatgcatgttatgcaagtatgcattggctgaatcaattttgtatcgttgtaactaaatcattccaaacaataaggcgcatgtctaatgaattgaaccaaatgcatataagtttagaagaaactggaatggatggtttaccttcactctcagaaaggtattctcagcgtcttgccaggtgattgcagaggcagccaataaatcagagtagctggaactgatcataattggatgaatcatagcaccgcttgattcacggaaatatgtctgcatccaataactaggagttccatactgttgccaggagttgaagacaatcgcatctgggttccagctggttatcacatttatacattagcaatagtcagagaggaaacagatgctagaatccttgaacaaagaaagtataagaccatgtatacaacacgcgatcgttgtcattcacgaagagtggtgcataacatgccatctgaacgacatccctgcaaagaagcatgcataatgagagccaattcaataacttgcaataaggaattactgttgctcaatgtaaatttttacaaattatacatttactcaaaatattttccttgtgnagaagtacaaagatgaggtagtagttgtcaaacaaaaatcaacaatttatccaggaatcccattgaacgatctcttatattcatgcatggtctggatacaagtagacaactctgcgcatgattttatatttactctgaacccaagataaagaattaagagagtatccccagagggatcacctatttttctctaaaccaattaggaaagcagcttctgccaatgatgcaagaaggcttccattgccagcatcctcaccattaacagcatactcacttccaaatacctgcagtgaaacaattgcatagtcagtggttcctgctcacttatattctgtctatccaacatcaaagggtaatgagatgaataaattgccgggccggccaagaaaggccaaccaaatttacttaagattgaagaatatatacaaatatacaaagttataacttcaacaagaagctgtcgaagtaatggaagttgtcaccggagcaacctcccaaaagcaaaagattacactaagggactactctcctatatttctgaaaaccccagcttccttccaaatcgccacttcctctttgattgaaccaaacaggaaaccggctgagcgccgctggttctgaaacacacgcgcatttctttccttccaaaccatccaacaaacatgggaaaaggaagaacagcgtcttacgttttgctattcgatagttaggcttcttctcatgggaaaaggaagagaagaagaagaacatgcttgttgtcataattactaactatgcttgttgtcaatcaataccacagcagattgctctaaagcgatctggagttcaagttatgaagtactagtagattgctctagtttgggatattattcaagttatcatatattctgatcttatagattcagtctcagtcatggaagaagatggaagaaactaatacctagaaacacttttttttcgaaataactaaaagcatatttcattcaagaaaatgtcgaggataatggcgcatgagagaagctgcctttgtaagactgatctaatctaagaacttaatttcctatggagcgaatctcctagtacccaaggtcctgagttcaaatctcctatggagcgaatttcagattgggttgtttgtggggctaagttccaaattacaatggccgcatatatccggttggatgtagaggccgggtaaaaaatacccttctctaaa

SEQ ID NO: 28745 - DNA, 740 bp, Oryza sativa
atggtgggccggaaccttgggggccaacggacattccgaagactcgccacaaaggctctacagccaacaccaccggccgggggcacggagggctgatcttcacgtccgtgtcgaggtgacactctggacgaggaggcgccctccgttgcacggggagtacgccggctattacgccggcgctcgacgttgaggcgggcatccggctccccatgctgatcctcccgagtcgacggtgtcgacgagggagtggcagccgaatgacgtgcagccgccgccgctcgccgcgccctccgccttgatgacacggagccggtggtagcggcgccggaggtcttggtggtggctgaccgtccaccagcacccaggcgctgctgtgccgtcatgaccaagttggccacgtcttccagccatcgttgggctggagactccgggtcatggacgacaggcgggtgtcgtaggagcgcgccagcagcctgaagcgcaccctgaggcgtgctgccgtcgccgtagacgaggaggcgacgctccccatctcgccgttctcctgcatcacctgcgactggtgatgccacggatttgtcgaccctctgaagcgcctccccctgcttagggctttggcgcggaggaggtggaggagtacgagctcgacggcgtggattcggctccccgtcgtcgccgctcacactcggagagaggtcgtgcgcttttccttgctcggccattaggctgaacaagaaaaa

SEQ ID NO: 28746 - DNA, 509 bp, Oryza sativa
taatcttggactaattcacgagatgaatcttttgagcctaattaatccatgattagcctatgtgatgctacagtaaacattctctaattatggattaattaggcttaaaaaatttgtctcgcgaattagctttcatttatataattagttttgtaagtagtctatatttaatactctaaattagtgtctaaatatagggactaaagttaagtccctggatccaaacaccacctaagttatatggatttgcaaagaaagaaagaccatacagtgaagtacatgattacgtagtatgcactcccttcgatgaggaatataagtcattttagtttttgacatggcctttgataactttgatcattaatttctttgatagtttatatcaatatattataaaattaacttcatatgaaatacgaatatagcgtcaccacatgtactatatatctacatgttttggcgtaattttaataaaaactaaaatccatgattagtctagaaaaaactac

SEQ ID NO: 28747 - DNA, 796 bp, Oryza sativa
aataatgcttcaatcaaacaatcaggtggaacccagacgccattgtatttaactcctggcaacaatacggaactcctagttactggatgcagactcttttccgtgaatctagcggtgctatgtttcatccaattacaatcacttccagctactctggttctctggcagcatctgcaattacttggcaggattctgaaaatagcttcttaagagtaaaggcaagaaattttgttataaacctactctacatctgtaggagaattgcgtacctcatggattgatcttgaaatctcctgtgcagattataaactttgggtctgatccagtgagcctcacgatctctgcaactgggcttcaggcccgtgttaacgcactgggatcaactgccactgttatcacatccagcaatgtgatggatgagaactcttttagtaacccgaataaggtaagcaaacatttctgatttcttactggatgtaatgcacatatcaatgtctagtagagtttgtggttttggtcatctgaagccaaagctttgctcatgataaccaatgcaggttgttcctgtcaaaagccagctttccaatgcagcagagcagatgcaagtcacgcttgctcctcactctttctcctcattcgatcttgcgcttgcccagtccaaactcgtggcagagatgtgaagcaggaacacaaggttagcgacagaaacacaagaaatacacgagatgtgatatgcgaataccagaatgcagtccatatatgtgcatgtatcttgaagcactactgtatagtgtaa

SEQ ID NO: 28748 - DNA, 897 bp, Oryza sativa
tattagatatagcactacacgggtcgggtcacacaacacctagtatccatcgtttacggctaggactactggggtcaccaatcccattttctcccctagcttttgtttctgagtgtcaatgttggcctagtagagtgatttcgccattggtgtcctttccgatctcaatgctcaaaccatgctaccatgcattaacacagttgtagataagggtcccttgagaatacgcctcctcaacgatcaatggttaatggcggttaggctagaatagttaatagtgatatcatcattttagaaaatgatgtgaaactgggcttaacaacggtgacataatattttttttgtacccatcaactacgtacatgatgatcagaacatctaaccatttattcatcagaatatttgaacaattttgccatgagatctattccaattacctaaaatatatatatagttggaaacataacaagatcatatgagcaattagtatatatcttattactggaggggagaacattgcacataatattgtgacaacaagataaggaaaaacaattctttaaccatggaaactttctaatgaagcttaactaacgatggtttcatgatcagcagccaccatcacattattgaaaactaattaatatttgttacaattgtgaaactccttacttgataatataatatttataatgtaaatgcgtgtggtgatttaaatgctatatggctcaacgtaaagtgatgctatcatatccttgattgtatgtgaaaaggtgaatgaatctgcttgcttgtatatataatccccagttcgtgcaaaatcaataactgttcttgccacgatttttggcttaaggtttggtggtgcaaggtattctttcatcatatccttccacg

SEQ ID NO: 28749 - DNA, 951 bp, Oryza sativa
gaattggtagaagaagaagaagaagaagaagaagaagaagaagtggttgaaggtggagaactgaagtcgcggtggtgaccgtcaccggcgccgcccccgccgctgccagcgggtgtctggtggtggtggtggcggccatgatcatcgccatgcaactcctgaggcggcatggcgatcgatcgatggatgaaaatctctctgtctctcgggtgtttttcacacacaagccactataccaacaccacagctagctaggctgtgggattggatgctatactactacagctgcagtagtggcagctagtagctagctagcttgatcgagctgagttgacacacaaccttgtgatgatggtgatgatgacgatgttgaaggagaagggatgaaggagagggctttgccttctcctactacttcaactaggctatctcactcccaagtgaagtgctgtctggtttttggcttggtgattgcaggtatatttatcatagctgaagaggagagagagagagagagagagagaatgtgaatgtgtttgtgtgtggagtgggggtgaattggcaaaggcaaagaaagaaagggagggggtaagatggacctaccaaatggggcaggggagcaacacttgttgctgtcactttttttattggctagctaggatggcaattggcaaaccctataaatttattgttagttactacccagtaatatatgtgtgtagttttttttagtgattttgtatatagttgattaacaatttgtgtggcgtattatctaaaaaaagaacaatttgtgtggtgtgcaaggtaacacaccactagatgcatatgctgatgatatccattagaagttacaaatggtggtggtagttattgttgaaacctgaaagggagtttatatcacccatatggtggttttgtagctctagcatggtgtggactgtggatcat

SEQ ID NO: 28750 - DNA, 4079 bp, Oryza sativa
attagtattattgagtatttttcaaacttaaaaaatagatttatttatttttttaaaaaacttttatatagaaaatttttacacgaaacataccatttaattagcagtttgggaaacgtgctcatactaaggccgggtttagttcccaactttttcttcaaactttcaacttttttatcacgtcaaaactttcctacacatataaactttcaacttttttcttcaaacttacaattttaacgtagaactaaacacaccctaaacgagggagagaccaaacgaatagtgtcagagaagtggggacatgggttcccaccaccaactattagggacaccgggggtttctgaaccaggccacgtggcaccaagccacgccagtcataggtgggactgagaactcggtctcttattttaacaagccgaatctagagttcgggatgcgagctcagggcacgcccgagctcagccccgttggctgctcggggcccctgttacaccttaaatatgacagtacctggagtgtcggtactcctcgtcacagagatgctcttgcatttagtctgagggatacgaatccatccactacgcgtggggaatgataagcaacaaaacaacgcatgtcgattgtggaactaaccatcattatgcctaaaaagatgggcatgggatgtcaggggacgtggttgactgttatgtcgcttggccagacccaccacaacatgacacacccagttatctaaggccgataggtgggcccaatagacgtcatctacatcctagtcacctaccccgagctacgcgtcgacgcgaagggcaagtggctagagaggagccgcctcgtgtgaagatagctccgctaggccctcctagggtcctgtagtgagccctacttgcccgcatgccgtaaaactttacctacctaatgcccttctgtgggacccttttgcaacagacatcaaactataagggagaaccaaggccatgcaaggaagaaaaaaaactctagtagctctagctaagagagtttcacaccttataaaagattgaggcagagatctaaggaagaacacaacatgagtagggtgctatggctatgagcggcccgatcctacataaactgtttgtcttttgctctttcacgtgttcatgacttagttcccacggacctgctccttggcccatatccacaaaaggggtgtttctgtactccctgctagaggagtccgggctccgacaaatagctattctgaacgaagcctcctttggacacagtgactttttagattcccaaatgaattgaattgattcttctaaaaatcgtgaaattcttacataaatctagcaaaatccgtatatatcaaaggaggttttacatatatatctttatgtttattttttttagataatagaaatggattacatctccggcctgtacccgtaggtacacagccaaaaagtccagaagtgaacagaaataagttttaaaaaggcgagatgggacaaacccccaacttttggcactaatatgatctactaaaataatgtttctaaagtcacatagattctatcacgaaattctgtagatactatgccatctaaactggaataaaagttccttggctaccaattccaaacgtgtagcaccattgcgcatagtatcctgttgttcctgtgaaagcatcatacaccaagagtggagccaattggaacacatgaagataacctgcatgatgttaggcattttattatggttaaaaactatatcattacagcaacgccagattgaccaacatatagcactagctccaaataaaatcatttttttggggtctaggcactcccttaggcagttaccaaaaatatcttttgcattgtggggaagggggatattgaaggcaaagaagatacatcgccaaacaaaacgtgcaacatgacagtcaaagaaaaaaaagtgttggatggtctcttgtatattacaaaaataatattgcttgtttcccctccattttctctttacgaggttatctttcgttatgattacttttttttaagaaacacataaatactttgattttttgtggtacctttacctctcataagatcctcttgtggatctttacattggaattgatgatcgcattatacatggatttgaccaaaaattggccatttttatgtagcgaccaaataaagcaatttttttttgtcatttaacagggttatgttagctagtcgaaaaatcaaatcattccactcaactaactttggtcctacaattgatcgtcggaatgaaaaattcaacggtgttgtgctcataacctctgccaatatctttatgtttaatgtagcgctatatttatagtatatatacaattgtaagtttaaagtattaaaactatgataacatatgaaaatggcataaactacatgtgtacgtatgcaataatatgaatgatccaagtttttttttaaaagaacatttctagtgatggcaacttatcggttttgatgaagccgttggggacaagtttgtggaaaactaagcggttttagctggtttttcatatagtagaattgaccaaaagttttcagtttttggcaaagcgacaggactggttttcaccttgaaaagggtaatgtaaaccatactacagttaacttcatataacttgtcagattattatatatcaaaatgttcaccctgctccatctacaaatgctcgcactgcatcactacaaataaagtgaagaaatttcaatgcatgcacacacagttgacacaatgtgagcaactcatgttagccatcattaattgatggaagtgtgtcacttgccactttttcctctttattttttaaagtcaagtacaatatgcagatatgttggattatatttggaatacatcacctctgataatttttggatcaggtatctcgaggcaacactagacgaacccttctcacctccaccataacttaaggacatggatcctctgcagtactgcatttgtattagcagtggctgacaggtggacccgatcccatatgtcagcggctactactgcaggtgcagtactgcagacaatctccactgttaactgaagccccttgaattagggtcattttatggtaccttacgctagtagcctctatgcagtggtgacgggaacgtatttatagtttctcggcaatggtgattaggctatgccattacacaaagcatgtttggtaaatacgtacaaagaggatgtataacatatgtagaacataaatgttgcattttgggacctgaaaacataaattacacattggacctgcaagcctagttacactagatgagacgcaatacaaacatatacatgagttcatgtcactatattatcatataggtaatcgcactttgtcttgtagaggtgaaacggtagctctgctgctatatgtattagccttttcagctttaattatgttatgacccattgacgacgagagtactgaatttaatctcagtgggctggttgtggaggctgacacaaagagatctagatcatccctcgttttccaaatgctagctagctaggaaaataagagctcatttgtgtgatgtgtctacagaaacttgtgtttcctctttctggttttactattaggatgttacatgcctatgctttagctataactatatatcctaacctataacgctatctgctatcaaagaccacagttttagtggtgcgataagtatttatcctaatggcctcgcaactgaaaccggtacatttgtgcagacggtctataacccgttttctcagacgtttatgcaaacttcctgcaactaagggcctataaaaatcgaggattatttgtgcagtcgaattccacgacagccaccatactaaaaatattatggaacttgacatcagcgaatgaccatactaaaaatatattcaaaaaaactgttaactaggaaatactgtaagaatcccatgcatagaactttggtttacttcatatcgggcttagtatatatgaattttctagaaattttcaaagtttggattttctaaataatccttgtaagaa

SEQ ID NO: 28751 - DNA, 603 bp, Oryza sativa
cctcagatacatggtccgtctcgactttcgagcgaccaataatatggcagagtacgagggactccttgccggactcagagtggcggccgggctggggatccgccgcctcctggtgttaggtgactctcagctggttgttaaccaagtctgtaaggaataccggtgctctgatccgcagatggacgcctacgtgcgccaagtacggcgtatggagcgccattttgacgggatagagcttcggcatgtgcccagacgggataatatgattgccgatgaactctcaaggctcgcgtcctcgcgagcccagaccccaccgggcgcctttgaagaaaggcttactcagccgtcggcgcgacccgaccccttaggggagacggatgcgcctgaccggcccccgaggcccgtcggagtccaggcctcgggacccgaagggagcgctccaagctcctttagattgattgcttggatctctgagatccaaacatacctcgcagataagactctacctgaggaccgcgaagggagtgaacgcgtacaacgcatttccaaacgctacgtgttggtagaagggaccctctatcggcgcgcggctaacggaatcct

SEQ ID NO: 28752 - DNA, 2006 bp, Oryza sativa
ttcagcatttcaataaaagcagtttcaattttctaaaggttgtgtctgtgccgttttttccttttgaagaatcttgacttgaaataatgtcactcgtgctcaaccttgccctcgggggttcggttcggtcagctaaaatcgccaaacggggcccagaaccgagccgtgccccggggcgtggtgaactccgggggggaatcggcaaaaacccacaatcgggtcacccataaccctcggtcaccacgttcccggtctggccagtctcgacatgcggatctccccaggcattagcctcgacccgcgcttttcgaggactgggacttgggcacgggcccttatttcaagctaagacgcaaaaagaccacggcacagatcatcctcatctcatatatagcaaaataaagctaacacaaaaattttttcatcatttctcattgcagattaagttaaattgtacaaaaaagaggcatgaaggccttagaagaaagaacaagaaaaaagttaagattggcgggggcctgggggctcattcaaatgcgcccgggtcgccggcctcgtcgccaccgtcgtcctcgccgctggcgtcgccctcctcgtcggagctgggggcgaacgcgagccgaggggccgagccctcgaagccgttgacgatgtggtcagcagcatccccgacgcgcgcgcgcgcgtcgtcctcggtcccgggagggaactcctccagcgccatccagggagagaaattggggtcccgggcctggtaactcgctagcacgagttcaaccgccccccgggcgaggtccctcgaggatgacttgatggtcttctcgagctcctcggggagtcgttcgaggacccaggccatcctgttgaggtgcggagcgaggccttccagattggtggggggcaccgtcgtctggcctctccagaggcctgcttgccgaccggcgcgcttcatgcgggagaccgcatcccaaagcatgtcgggcccaatctcgcccgccaagcgaagggcctcggcctccccggtggaggagtccagcgctcgctgcatttccgcgacggtgtgttcggcagctgcgaggcgggcggctaagtcgttttcgcccgcggcccccccgccgataggcgccctagcgtccagctccttttcccgcgcctcgaggtcagcagcccgctgctccagtgcggctctctcggcgcggacgcattcgagattgcggcgcgcctgctcctcctgtgccgcctcgcgaagggacaggctgtccgccagccgtttggtcgtggcctcagcctcctcgagagctcgctcccgctcagcgagtgcgtcctcgcggaggcggagcgcgcactcctcctcggcgcaggcggcctcatgtgccgccagcgtcgcctctcggagaccagcggcggcctcgcggtccgtcaagcccctctccacggcgccggcgtgttcttccagcgccatggcacgggcctcaagggcctcctcgcgccgccgaaacgccgcttcagtctccgttacccgccgctctcgggcagcggcggagtcaaggaccccttgggcggcgtcgagctttttcttcagctccgcctcccagcttgcgtgctgaaggcggagagtgtcttgcgcctcgatcatcgcggtggtagagatgagggcggccgcccgctcctcctccacctcacgggcgatctccgccagcgccgctttccgggcttcaagctccgagacatgacggcggtgagccttacggcccacctccaccatggcgtccaccgagcgccgcccctcctcaacacgcgcccatgcggcctcgagctccgctcgttctgcacgcagggcctccacttgggtgttgaacccatccagcactgcggtgtttgcagcggccagggcctgcagaaggggctcggcgctcagcggggcgacacaagatgaggagaagagccgccttggagaaaaggcgacgcggcttggccccccggaggatgcgctgggctcggggatg

SEQ ID NO: 28753 - DNA, 8582 bp, Oryza sativa
ccctcctcccgggcagcttcttcggcttggcgagcccgggcggtctcctcccgagcagcttcctccgcttggcgaacccgggcggtctcccgggcggcctcttcagcttcccgaaggcgggctgcggcttcacgccggtcagactctcgcctccgctcctctgcggccgctggatcttcggcctcggactggccggatttggggtggcgggaggaatgcgacgggacatcgctgaagcagaagaaaaaaccaaaagacgaacaaaatgagtaagaaaaaacttctctttgggagaaaggtggttgcaatgagagtgagacgaacctgcgagggggtcggttgaatgaccaccttggaggagaaatcaggttcccccggcatggttccgtctcccccgtcttgcggagccgtttcttcttgcgctccccctcgggctgcgacgtcagcgcagccccctccgggcgccgactgctggcacgcgccgccccgccccctcggggaggagatgggggaggtgttcctcccagcttcctcttcccctgggcgtcggcagggcggctgctccccgagcccccggcgcggggcccagaagcacgaccccctcctggggcagattgttcccctcggcggcgctcgcccgcgccgtcgtggcccttaggggctctctcctctgaagccccgacccccatcataatggttagaatggaggcgcggtcgggatcgctgcagagggggaggatctcctgaggaatgcgagacgcctccgcggagctaagattcagcaccctttggaccacgatcttgaagtcctcgggagcccaatcccatctggctccctggtgggtccgcatgtagtctttaggcccagtgtactcccaggcgctccgggcgcgccgttggagcggcgcaatccggcgacggaggtaatcgccgtacaccatggccccggtgagcccctgggatcgcaggcccgccaggcggtcgaggacggcgtcgtagtcctcccccagatctaccggtgcccgccagctggagacctgcgccgggggctggcttggaagtcggaggcgcgcttcgttggcgaggggggtgtagaaccagtcgctcttccagtcgtcccacttcttgcgaaggacgcaggggatgtagcggttcaacaccggcccccgcggctggaagtagcagccgccaaccaccgacggcggtgacaccgactgcacggtgaagaaccaccggaacagctgaagagaggggcgcaccccgatgaacatctcgcacagatgcgcgaagatggccaatgtcatcaccgcattgggggtgaggtgcgccatctggaggtcatagaactccaggacatccatgaagaaatgagaaaatggcgggaccagcccagccatcgcgaaggggaggaagaagatggaccgccccgggtagtctggtgccgggcgcccctcgcccagcatcactatctcccgaccggtggcggactccggcatgaagcggcgcggcagtccggcgtgcctctcattcacgatgcgggaaggcggtagtacactgccgtcgagcagagcagagccccgtgccatggcggcggaggaagagatgattgagaacgagcgcgtgtggcgaaagtagggcgtagcagagaaagagttagagctcaggtggcgaaggcaagagaaacaatggcgaaaggaaggaagcaaatccttttctcgatgcttttatacccttgccatcgctgggcctgactcctcgtttctcgcgcccactacctcgctccctcgtatctcgctatctcgctccctcgtttcccgtgcccacgcttccactaatcccattcgcccgcttacggcgcattgagtggatatgcggttgtggcaatcgaaatggattgtatcgtgcgcgcgttaattacgctcgccgaccgaagcggcgttaccatatctccgggcgagacaaatctgctcacccagattcgcgcgctgctcaagtggtgtggcagtcttgaatagaccgcccattatggacaaccaaagttaccaataccaatgtgcatggattgagaccgttgggtattttgcccaactacggagaccggtcccacctgtcacagggtggcgtcacacctgaccgcttcccttgggaagggaaattgctctggcataacgccgggggctactgtcggtgatatgggaccgggagtatcatgactagaggcttgaggcagacacaatcgcccacgtggcctggcaccttcggggacgtcgggcccgagggtgaggtgtccgccctcctcctgattacccccgagggggggtcgggttgcgcttgccccggccccgagggccgaggcaccccgacccccttaaggaagtctgcgccacatatatgggataagtgagcacagctgtgctcacctaacagcatttattgcagtctggtcaagcgtgtcacgctgcatacagcgcagtacggcgcgttcctttatccggtctgtgaccagtcacagaccggtcagatcacgggttaggtggcgactggcggtctgacgcacgccttaccccatcccgtcaaggtgtgagcttctaaacactcgtccccagctggagctagcgtgttacatcccagagatggcacgttaaccccgatcgatatataccaggcttcatcctaaccattacaggcaaggtgttacacaaggaagggcaaacatgcatgttgttaaactgacgcgtggtgaacaagaatgaccggtctggcactggtcgcgtcagcaacgggcagccacgatcccacgttgcgcctgtctccgccgggagtggaggtaggtgtgggctgtcccatcggagtgtcattcggacagcaaccataccaatctccgtccataaagagaagaaaagtccagtttggaaaggggagggtgcatgtggtatccccttgaagtataaaaggaggaccttgcccatagagagggggttcttcttttttcttttggattcttttccagatttagagctgagaacgggggagaagttggctgacacttggtagctcactcatacacaaatccacaaaaacacaggagtagggtattacgcttggcagcggcccgaacctgtatacatcgccgtgtctcgtgtgttttgcgggcagacgatctttccagatacagagggagagcgagagcttgagatttcaccctaagccccgggcggacccgaccaaggggggcgtgcccggtctcccggtaaagagccacgagctccgtcagctaccattaaatataatcatgaataataatgtagtatatatgattcatcccattaatgagctaatgtttctaagcatggctaagcaactgtaaataacatttagctgaaccaaaccaatatataagattcaagctaatcaatttattacccaaggtatcaaggaatagggcattcaatgcaaattggccataacaaaggaataggttcacaccacccggtgacatttgaaaataaatgcacagttgaaataaatagagaatttaaatataggatcaacatgctcaaaggattgtgtttaggatcagtgtgacttgccttgcaataatcggtcttcaattaatcttcgtgaatacttccgacgcactcacgaaccttcgcaacgacggaaacgacaagctaacacgcaaaacgaagaaaaagactaataaaaaccaaataaacagtacatataaagtaaacaaacatgtagatcatgattttagatgaatttagagacttgaacggcctcattccgacttcatatgaattagttatgaattttacaagattaaactgattttaagatttatttttagaagggaaaagggctttatgacatcacgatgacgtcatcaccggcgggacatcacggacattacggtcaccggcgatctaggtcacggcggcgagaacagagggcaccaacgcgacgagcacgacgcggggaactcactgaggggcggcacgacgacgaacgacgacgggagacggccggcgacgagctccgaacggcggcgaagtcgggacgacgacggcggtggctttccggcgacgagcagcggcaacggaggggtggacgggcttcttctcggtgctgctatgccgagggaggtggcggcacaggtcggggacgaccgaggcgacggcacggcgcggatggaaactcgacgacgacggcggcgctagggtggaagcggctagggcgctacgggcgacggcgagctcgggcgagggtggaaaacgaaagaggagagggaggggactctatttataggcatgggagagagagatcgggcttggaacgcaaggaatcgcgccgggaaaacctagggtttggtttagagagataaacacgaatcgagctcgattccgcgttgatttcttcgggataaagtccgattcttgggggaaaagatagaggaggataagaggaatatttcccctcatctaattttgaaataacacgagagaggagaccggatttggaggggaaatcgagggcaatggcggcatcgggctctgtctccagccggctggaggttgaagatgccactgtagcgacagggacgagaagtagacttctggctgggcttctacttcttggcccgattgaaagagggacacaaagcagacttcagaaaagagagggagagggctgcagactgagaggagactgggccgagagtgagaggacttttccaaattcggcccgaaaaggaaaaggtgaatttaattacttttccaattaaattaatcactgaaatgatctttgaattgttaaaaatacttccaatgctcaaataatttcaagaaaaatcctgaaaatacttgaaaactataaatatttaaaacaattataatcagaccatttaatgattaatttaatatgtgaataattactgaaatgttgtttgtattattaaaattaaaaattgagctccgaaaaatccaagaaaattccagagagtataattaaccatggataatttaataaaaattaaatccatccatgctttatatttaggaaattttatttccaacatttaacttcacttgtaaattaatgaacatttaatataaattctaataataatttattaaataatttataaatcctgaaacgaaaatcaggatgtgacagtttgatcatctataatggctctaatcccaatatagatctgttatatatgtcaagaaatctataacggatctaaataattgacctactacaaatgacttgataacatctatatacaatttagaccttttaatgatgtcctcatctttccgcctacccatttaagtctcttgaagtctcgattcatctatctaataaacataataaagtccgtgaatccctcatcttcttcgcatcctcctctgcttccatcacattattgtcggacaccattgcctaccctacatgtaaatgacacctctcccacaactctaactagtagtggctaagccactcatcgacacgtatccaagcggttgagatggtggcaggttgcgatttgtagggcaacgatgacgatgacagtgaggcagccatattgacaaagctatggcctcaccatgttcacctggctaatcctctcctccacctcccaagctccgctcctattgcttcttccgctttccatggccaccgtgaccttggtgcacttgatccgggcaccagatccgaccgccctgatgttggggggcaccagatccagtttcccccaacattgggctggattgatttggtgatatccagtaactgttctaaggttggggccaggcaggctgggtcctggggcagggccagcagggcgaccgccctgagcccccaagagttaaggggccccatcgtcagtccatatacatatatgtagtataaactgcatgcttatttcttagtgaatttagctcaggaactcagctggtagttatcgtcaatgagctaggagaagcccacgagtcactaaattgttgtcgtttccacaactggtgttgatgccgcctcggtatacctcacattccaaaataaacacgggtgcaaatactgttgcttcactttcgcacaacagattccaatttcaagaattttaacccaattaactaaccttcaaatttgcaagataaacaccaaatatttcatccttgcatggttgaataaaacatcatggttcaattgataccaaatattagatcagtgctttcttgcttattttattttccggagttgactaatcttccttgtagctttacactaattttctaaaaaaggtaatctgccctttttctttgtttttttttattttcagtacttctcatagtacaagcaaagtcttctatatattctcctctgttctagagtttctatacaatcatcaaatctagttgttgttcctttcttagtcctaaaaatcctatattattattggcaaattatttaagtttttttcctgataatgtgttgtatttttcttgtacatccagataatattgataagcaattggattgtcatgattaatatgtaattggtgtttcatggtgattaaacattacttttggaagtgcaataaagaaactcatttaggtatataggccatccgattttatctcaccctaggcccgcgaaagttcaggaccggccctggggcgaggttcactggttcaattaacatctgagacccatacagcaggctatggcagagctgtgttcaaccaagacaccattttttttctagttattgttggaagatagattgaacagtagaaatttttgttaagaagaagacataattttgagtgacctgactaagctgtgttctcatgtactgcaagctatgaaactcttcagcatgatcatttttgcttgtccttttgctcaagacttgtggatctatatatagggacaattgcttatttgaccctattttgaagcctaactaccaatatgaccctactttttctagtttgtttatttgaccctacttttttaacacgaacgctccgtttggctctgttttttttagcactgttaagttttcattcaaaaaagaaaaaaatataattacttttcataatgactaaaataccctcgaccaaaccctatccatatatattcccttctctccctcgtatcccgtctctctctctcgccgagtgcttgcggcggcggcagcgacgggtggagggagggagcggccgtgagcggcggccgcgaggcggggagggagggatccgcgcggtgctggctcgctgagggagggagcagcgacgccggcttgtggagggagggagcgacggcggcggcctaagaggaacttcctcccgccgccctccttgtgcaacagctgccgcgcggtggtggctagatgaagaggacggtcggcggcggctcgacaaggcggaggagtggctgcggcggcggtggcatgggagggatggtggcggctcgacgaagaggaggagcggtggtggcttgacaaggaggagggtcggcggcggctcgacgaggcggaggagtggcggtggcggctcgacgatgaggaggggcgacgccgacagggtggatccggcggaggttcggcgatgaggtgacggatccggtcgcgccgaggcacgtgcacggtggatctagcggcaccgagacgcgcgcttcggtgggtcagcgaaggcggcgcggcggtagtggacttcggtggggaggcggcggttctgcagggagagagggagcaccggcggtggcggctgctccacacgaatgggcttgggagttcgtcgtcagtggtgaggtgtcgacatgttctttttttttttgtttttggtagacataaatctgtgtcacaagggtataaatggaatttttgttttgagttaacaccgtcacgttgacttcacgaaatagggccaagtctcatcttcgtttgtaaaaaagagggccaaatgatcaaactcaaaaaagcaaggctaaattagcagttagtcctcaaaatagggtccaaaacgcaattgccccatatatatatgcccaagtaggagatttgatctgtcggtgatggaagtgatggagggtctccaaacagttgtaatttttaacttatacatatatattcactataggaacttctcctacagtatttttttttctttaaaagaaggcattgttacgctacattctactactaacgagtagggtagtaaaatttaaatctaacaatagattttcttcagtataaaaaatattttattcaaaactccgctaagatatctaaattttccctttaccaaatcatctattgtaacatgctatatggcatgcaaagttatcatggcgttatatattttaacggtattgctaactttctgccgacagaaattgcatccccaaatattgcaaattttgggccaccggatgagcttcgcgattcgtgctccaggccttctccaactctatagcgacctcctcttcttctccgacgccagcaacaccctagacttcggcagagggctctactggttagggtcccggttggggtgggggctggaggggt

SEQ ID NO: 28754 - DNA, 18167 bp, Oryza sativa
gactccaggccgggccctgggggggggggggtcgacctgtcagtggcatagggccccaaagtgaagggaccaaaccccatcagttttgctatatatttgtcgacaattttcttcctaaaaatttaacagatgtaattccagtacaattgtagtgtaattacactaacttgcatgtaattacactgtaactatagtataacttgtatgtaacttttaaaaatctctccgtaatatgttatttcggtaaaatagaggtcgtgggaacaaatccttacacatatgtgtatgctgtgttttttttcttcctcaccaaaataaatcttgtaatagatctaacgattcaaaattacatgaaacttacatacaagttacactgtagttacatacaaattacagtgtaattacatacaaattacagtgtaattacattacgattgtactataattacatatatcaaatttttagaagaaaatttgtcgacaaatatataggtggtcccaaccccatatatgctgtacataatagcctatagaggaattagaaagcccacccgcccaagagaggaagagacacatccgtcgtccgtcgatttggcttccttccgcgatcgcttgttctgttcgcctcatcacctcgcctgttcgctgttctgctgccgcggtgcaccgcttccgcttccagtcgcgtcgtcttgttccgagggtttagggcgcgtcgacggggtcgtgccggcggctgcgtcgtcttgtgtttagggcgcgacggcgtcgtgctcggcagcagccggcaactggttgcaatctctccgttcagttccgggaggtacccactgctctcccatttgatgtatgctaagtttatatgtttaaattttgggatttaaattttactccccaattgctcctcttctaatttctgaaattctgattttggggtttagggatccttacgttgcagctgtgcaagtgtgcgtctagggcagtgaataccagcagtcattttaattataatgttgaattgaatttagtatgaaataatttccataattacttactaatttctaaatttacagtgaatgttagaagaaatttttaaggtaagatatataacttaaatgtttttttatgcattacatttatcagaaacatcgttatattattatagttgtattaaagggcccatttttctagctttgcttcaggccactaaattgaaaggaccgggcctggccgactcgagcaacccgtacacaatcatttcccatcccacgccgcgggcggcagcagcggctgcgacggcgacggcggcggcgggcggtggcggcagcagcgacgacggccacgaagatggagggatccggaagctcgagtggatctagccttcatcagtcccagcaagcttcctccatcccgaggttgagatgtgcttgccaaaaacgtgcggtgaatagggtttgcaaaatgtcagcacaatatagcccacacaggcagaatgtaaacacatttaatatttttttttttgcaaattgtaagcacaatgtagcctcacagtcatgatgcaatcacatttgggcacaacatatgaaaagatttgcatttaacaaacataatggttctggatagccatacagccagcttgttctgatagcaagcatatttatgaagtcatagcttcattacagccagcttgttctgataacaagagcctcaaaatgatataactaggcacaatgcagtcttcatcaacttcatcaacttaagatagcagcaaaatgagcattcatgtgccattacagccactacttgtactgtcacttccatctagctacacaaaatagacatcctgaaacacgtagtcgccgtggccgtggccgtggccctcgtcgtcgccgccgccgccgtcgccgtggctgtggccgtcgccgttgctgccgccgccacagctagggttagggtttcaacgaggaagagagaaatggactgctgcatcagctcacggttggtataccgtatatccactcacacaagggcatttaggtcaatatgagaaacggttgcatttctcgtcaccatattcaaattaagcccgccgatattgtagcgcgtggtctgcatgcacattaaagaaataatcaagttgtttaatgtaatttgttacacagccaatgcaagtaagttcaaaatacagagatcaaggccagcatattgttgcagagacaccaacattttcacgtagttgcagtgctcggctagtcgtcgtcgtcgtcgatggcgaggccgcacgccgtggtggtgccctaccctggctccggcaacatcaacccggcgctgcagctcgccaagctgctccacggccatggcatctacatcaccttcgtcaacaccgagcacaaccaccgccgcgcgctcgccgccgagggcgccgccgccgtgcgcggccgcgacgggttccagttcgagacgatcccggacggcctgctcgacgcggaccgcgacgccgccgactacgacctcggcctgtccgtggccaccagccaccggtgcgccgcgccgctgcgggacctcgtggcgcggctgaacggcgccgccgccggatcagcggacggcggcggcggcgctccgccggtgacgtgcatggtgctcacggcgctgatgagcttcgcgctggacgtggcgcgggggctgggcttgccgacgatggtgctgtggggcggcagcgcggcgtcgctgatggcgcacatgaggatccgggagctccgggagagaggctacatccccctcaaaggtgagtattaaccaagcatttgatcgataattaagctaattaatcgaggatatctaatacaccccgtttcatcagcgttgacaatttcgaaattggattttatgccggggaccaaaattacagaaatttcggaaatttctggccgaaattatttaaaattttgaatgaatttgaataaaattggatcaaattcacaaaaatttgcaaaaaaaaaccccggaaatttcatgtgagatttgagcatgccgatgggggagaaattaccgaaatttcaaaccctgcgttttatatagcctccacacgtgtgcctcaaataagtacatcgctgaccatgagagaggtagattaatattgctatagtaaaatgaactcttggtgcctctaaaatttgtttttccactggctttggaaatggaccactagttattaagctagaaatgcactcctcgtaataaaacttttaaatgctagtgtgcttattctggggcatacgaagagagtagttgttgtttcatgtttatttttccccattatatttatatgtctagatctaccactctaaacccacgggtgatatgggtttgtgctaaattaaacagttcattttgttttgtaccatttttagttaactatatttcactatgtgcttaatactttctttttgatcgatatttgcaaaaatgtgaggttaatcatgaatcaatttcctcccatatctaaatacctcaaactagctgaaaatcaccccctccccagcaattttgtgctggtgtggaccttggcgggaggcaacacgtcacccacgctgcattccggtgggattttgtgagctcgtgtttgttcgcatcaacgcaattacgagacgagagagtacattaattaatatgcagtgcacatctggaacagaaaaaaaaaatgtaacgcaataacccatgcactgcacatgatgattatcatatcgcggttgcctacataaactaagatttgcatctcttcctcgcagcttcgcttcttgagattggagacaatgccagttgttttttatttacaggacttacatttggtgctctacagtggtctctaatatacaattcctaaggcaataactaaaacaacggcctccagtatatataaactacgttgcaaatattgcaatggtaactaaaattaattctggatcgacataaaagaaaacattgatagcacatccaacaaaattattattaactagttttgtcaaaacattgatagctagtggaagtgatcaattcttcaggcttctgctgaagcctgaagaaaccatgtcagttgagaaatcagtacagtacaatcaagctagtgatcaatttattttcatgaataataatggcttaaaaaacgacaaataacggctagtagctgggctatgagccaggaaaaaaactcatcagctggacttggttgaggcagggtttggaatttcgttttcaacaaaaatttttgtagaaccgaattttcagaatttttggtatttttggaccgaatttttctgaaagtttgacaaaatttaactgaatttgacataattttgaccaaattcacaaaaattgagaaaaaccaaaaattttggcccagatattttgaggtggaattaatggacaaattaaatgggctgcaaataaaaaaaaaagaagtaaattagaaggaaaaaaaatcaagaatcccaattttgagtgggaaattgtagcttcaataacacgatttttattaatttgatcattgctctcagactagctataatccgggatcaaacatgatttttttttcctttttagtacaagccacgtaaatgccttaggggccttgttgccgaatgccgacaacttgcccattagatcacatcactacctgagcttctttcgtcaagatcaagtcctaaactactcctaatctccgagctctgtgtagcgtgtatcttcctcaccaaatcacttccccaacgcacgcaacacgcgaggtattttctatctattatcataatgtagcggatgatgaaaattaatggagtatttcttatctcaatacttatgttattattatcaattaaccccatatcattgggattgggaggcatatgcgccatggataccatcaccaatctatctataaaaccaaggtggtcgtcgtctccaaatgcagacgacgccattgcagaattgcacacacacgaacatcacgtagttgttgatggcgagaccgcacgccgtggtggtgccctaccctggctccggcaacatcaacccggcgctgcagctcgccaagctgctccacggccatggcgtctacatcaccttcgtcaacaccgagcacaaccaccgccggatcgtggccgccgagggcgccggcgccgtgcgcggccgcgacgggttccggttcgaggcgatcccggacggcatggctgacgccgaccacgacatcgggaactacgacctcgcgctgtccgcggcgacgagcaaccggtgcgcagcgccgctgcgggagctcttggcgcggctcgacgacggtggcgccggcgcgccaccggtgacgtgcgtggtggtcacggcgctgatgagcttcgcgctgtacgtggcgcgggagctcggcttgccaaccatggtgctctggggctctagcgcggccgcactagtgacacagatgagaacccgagagctacgggagagaggctacatcccactcaaaggtaacgaaattaaagatgatagggaccggactgtctaggtatcattttaaaaagaaaaaaaatagtttactctccaaactatttcgctatgatattactccctccgtcccataatataagggattttaagtttttacttatactgtttgaccactcgtcttattcaaaaaaatttgtgcaaatataaaaaacgaaaaattgtgcttaaagtactttggataataaagtaagtcacaaaataatataataattccaaaattttttgaataagacgagtggtcaaacagtgcaaacaaaaactcaaaatcccttatatcatgagacggagggagtacttacataacactaaactagcttggtccgcacattttacacggctagctgccaatgttccttattttctattccaaattttctttttttctaaattgtatttttattgaaactcttatttcaatatttcttattttttaattttataaaattcagttataaacggtatttctatatacactcaaacgtctacttctattttcttttttttaatttcgaattttaggtagttctaaattatatactgatatggattctattttttttcaatattctattttttaatttcgaattttagctatttaaaattgtatttctatatggagtttattatttctttttctctaattccatattttagttagttataaattgtataccagtatgaacgccttctcttccaatatttattatttctaattgcaaattcaactattttaatttttttctatatggacttcgattaatatgagaattcgtagctcatgagagcgaacgtgacttcgattaatatgagaatttgtagcacatgagaacgaatgagaacgaacgtggagtctaattttcctattacttaaataagttaatggattagttcttaatccaattacacttgctctgcattggttaaattagaaataaactttgtgcatgtggtttgtttggtcgtttccatctcaaacttttttacttcgattcctataccttactttaagcttccgtaaaaaataattctattagttatataactattatattaaatctaaactattataatctggatctactatgacgcaatgcttatttttttctctttttcttgattaacattggaatttctatttttcttgtatgttttcactttttttctatctttcttatctgtttccgtttttttttgtctgtttccaattttttttgtccgtttccattttttatcccgtttacactacacctaatctaataccattctctttttttttgtccatttacacaaaacctaatcctagtacccttctatttttattttttttcttattttctttcgattaacgtgggattttctagaccgtgagagtcaacgtggaggctttttttattactttattaagttaatagattggtgtcggttggaaactcgacataaacactggatttcccacttagcaccccaatgacaatggtgaggaaaatcaaatgttccagaaataataataaaaaaaccagcttgatgcataggttgatcgagccgatgcttggagccaagaattaggtacagaaattgaatcacaaaatcatcacaattccaactatacaatcaccttgaaaaactacacacatgacattcataaaaaaaactaaatcacaaaacaatgcatggctccattacctcatctcatcggagaccaaggcggccatcgccaccgttgctactcaacaaaggctaaggactccgctgtcgttcaccgctactgctcaaatccaaaagaccacgatcaaatctagggatggtaggagagatctggaaggatggggaatgaggaggagaggtaccttttagtcatgcagaccgcgcgcggcactgttgctcgtgcgcgtggaatctggcccccctaagctcgtggtggccagatctggtagccctacccccaagctcgtggggaggtagggccgaggggagggtgtcaccgcaatagggaggaatccgccgctgtgccaccattgggagggcttgccgccatgccgatgaagagggagctgttgccgaggggagggcatcatggccgatggaccacctgccgaggggatggtgtgctaccgaccgctgcttgactcaagaggagacatagaagtagaggaacaaggagaagagagaaaggttaggacagattggcacactaggaaatggatgagtgaggaaaaacaaggagatgggctggagaaaaaggataagtacgggtggaggaccgaggcggcttggatcagctggtctgatgtattatttgtgtcgtttttttttaaaaaaaactggcactagtaatattactacatgcgtcgatttttaatgaaaacaagcacaaattacgtggcgactttttatgtgcctatttcattaagaaccgacacttatatatgctgctttttatttttagcctttcctaagatttcgatttcgagtttcccttattaggggttctatacgcgtgctagatatcttaatctcgtaaagtattttttttactcatttcaccctctaagtgcttcactctatctcttaataacattttaccttttggttcctctttatataagttgtattctaagctaagacattttggaaccataaatgacaccattattagagttgacaaatattttcaaaaaaatttcatgaaagtttgcttgaactttcaatcctcgatattttccaaccatgcgaggtgtgattaaaaaaaatcaaaaaatatattggtatgtaaagtcgtatcacatatatcatcataccaaaattaaagtgtaaaatataactaatataaataatagaaaacataaatattgttagaaagtagagtgaaccgttttcaataattcacagtataaaatgagcagaaaagaagtgtgtggggggagtaaaatgggtttatatgggccaaaatccagccggtccacgtgtgccggttttttactggaataagtccactttgactttcttaaaagtgatccaagtctaatccgtaaccctcaaccgcatagccggataagacaactccccaaactattgaaaccagtgcaatttgactctctcagcagttttggagggtggttttgctgatgtggcgctgacatggtgatgttgacctagttttcgtcccacgtggcgcttacgtgacatgagaattaaaaaaaaaatatgtgggacccataagtaattcacactaaaaaatattgtggtccccactgacatgtggggcccacatgtcatcctccctctctcttcttctacttcctccctccctctctctcccttctctctttctctcacgtggcgcaatcggcaggcaggggcagcgacggcgacagcgggcgagagccggagcggcatcgggcaagcagagacgtcagcgagcggcggagacatggtcatggcgcggaagcccgcgagcggcggagatgcaggagtggcacgacgttgtggacgatgatggcggtgctcagcctctcgctggtgacagggcacgtgtggcaccccgcctcgatctccgccgtcacggccaccgctccggctcgccaccgaatcgcgccaccgctgcctccgtcgccccttgcgcgcccacctcgtccccttagcgctcgcccactacccagccctctcccgcctcggtctctccctctgcccacgccgtccatctccgccgtctacctctcccgctctcggggattcactgccgctgcacccgtcgccgcatgcctgaactcaatggcctcgacctcggggatgcggcggtggcggaggtggccaaggcacgccgcctgcagaggctctcgcggttgccgcacgccgccggagccgccgcttgacccgcctccgcactcctccacctcaccccttcccacccacgccaccggggtcgccgcacgccactggagctgccgctcaacccgctcgagttcctctcttgctcatggagcgcctccgccgtcgacgtccctcacctgccgctgccatcgcggggttccatgatgcccccgccctcggcctcggcgacgctcgctgccaaccggctccaaatcaacatgggaagagaaagggggtgagagaagggggagagggggagcaagaagagagaaagagagagaatgacatgtgggtcccacatgttagtggggccacaacatttttttatgtgaatgacaaatgggtcccaccgatatttattttaattgtaatgccacgtaagcgccacggtgggacggatacaggtcaacaccgtcacatcagcgccacgtcagcaaaaccgccctccaaaaccgttgaggaagtcaaattgcactggttttaatagtttagggagtctttctatctggttttgcggttgagggtcttttaagggagtcaaagtggacttattccttttttaccagtgaatgggccgacaccaaggcccaactgaatcacgcatttttttccatttcgcagatgagagcttgctgacaaatggccacctcgacacgaccatcatcgactggatccccggcatgccgccgatcagcctcggcgacatctccagcttcgtccgcaccaccgacgccgacgacttcggcctccgcttcaacgaggacgaggccaacaactgcaccatggccggcgcccttgtcctcaacaccttcgacggcctcgaggccgacgtcctcgccgccctccgcgccgagtacccgcgcatcttcaccgtcgggcccctcggaaatctcctcctcaacgccgccgccgacgatgtcgccgggctgagcctgtggaagcaggacaccgagtgcctcgcgtggctggacgcgcaggagatgggcgccgtcgtgtacgtcaacttcggcagcctcaccgtgctgacgccgcagcagctcgccgagttcgcgtggggcctcgccgcgacgggccgcccattcctgtgggtcatcagggagaacctcgtcgtccccggcgacggcggcggcgacgcgctgctgccgacggggttcgcggcggcgacggaggggcggcggtgcgtggcgacgtggtgcccgcaggatcgcgtgctgcgccaccgcgccgtggggtgcttcgtgacgcacagcgggtggaactcgacgtgcgagggcgtcgccgccggcgtgccgatggtgtgctggccggtgttcgccgaccagtacaccaactgcaagtacgcctgcgaggcgtggggcgtcggcgtgcggctcgacgccgaggtgaggcgggagcaggtcgccggccacgtcgagctggcgatggagtcggaggagatgcggcgcgccgcggcgaggtggaaggcccaggcggaggcggcggcgcgccgcggcgggtcgtcgtacgagaacctgcagagcatggtggaagtgatcaattctttcagctctaaagcctgaagcctgaagcctgaagaaaccatgtcagttgagaaatcagtagtacatcaagcaagtgatcaatttattttcatgaataataatggctagaagccgctgggttattagccaggaaaaagactcatcagctggacttggttgaggtggaaataatggacaaattaaatgggctgcaaacaagaaagaattaaattagaaaggaaaaaaaatcaagaatcccaattttgagtgggaaattgaagattcaatctgttaacatgatttttatttgatcattgctctgagactataatctgagatcaaacacgatttttttagtacgtcaaccacaagtacacctacgagtcgtgggacatcggccactcggcctccagcttggtgaggaggtgagaagagagcaggtcaccacacaagttgcaggtgatggagctccaactatagatggccaaatagaccgtctggcatggctctgctagggcacaaccaaggcacggcccgaccaactcgttgtgccctgccgtgtctgtccacaggctgtacctatggcctaggctcggactgtgccgtgccggcttgaaggcatgactagtccaccgtgcttgtccttcaataagtctaatttgtctccctcatctctttgggctgtacattatatggtggtaataagtctattttacctccctcatctctatggctaggtagatttagatgcagaatctctttggctaggtagatttagatgcagaaactagggattgcaatgtatctttcttatctttaaaaaaaaagaagcaggtaatggagtcggaggagatgcggtgggacgcggtgaggtggaaggctaattaaggcggaggaggcggcacgcgtacaccccggcggatcatcttacaagaaccttcagaccatggtggaacactggaagtcatccgttcttttcgcctccgattccaataagcctgaagcatgaagagtattgttcagaaacaaatgtattcaagcaagtgatcgcgcaacttctgtgtcatgaatataatggcatcaaatcctcacgaaaaaaaaatcatgttgctgaagaagttgttcgtaatgtacttactattaatgaataagagacgggaaaccgttttagaccccctcatttatctaaaaacgattcaaatagttataaaaaaagtaaagaaaaaaaataattggactgattttctcccctttcatgcgagtactactgttctggttcttttgagtgcaactagctagcattacttatttgcaacgtttttgccatggatgatggccagttaaagattgtacagttctcattacgtgagcaaatttcttgtgctgtttgcaaaacgtttgttatttatataaatgtgatttgaagaaaaatcatcagaatccattgtcgtctagtccggttaggatacctggctttcacccaggcgacccgggttcaaatcccggcaatggaacattttctttttctgttacaccgaactcttaccttctttttctgcaccaaatctgcgtgatgtgtttgttacagatttgcagatttccttgttctgttctttggcgtttgttacagacttgcagatttcctttttctgttcttttacaccgaactcttacttctgaaccaaatctgctttgatgtagacttcacggaacaatggcgtttgttgcagacttgcagtcaaatcgttgtagccttcatctcgaaagagggtgcacgtgactgtgttcccggtgaccatcgtcaccggcgcgccgctgccgatggaatattggaatggccacactgaaatctgtgtccaattctccgagagctgtggggttcagagaggaattctccgacatgccacaacctgcctcagactgcattcgagagcagcagacagagagagagagagagagaagagtcgtttttggcgcgtatcttttcttttttttttctttttttttagaattacacagtataacgcagacactcacaacgcacgcgcactcacccctataaacacacgcacgtaaaccctacctctatgagcatcttcaaagactgggccggcaaatcttggagagattaacgaaatcaccacaggtgcctcgctgtcgacgagtacgtcgcctaccactgaaagcacaacgtcgttaaatcctggaaaaattctgaattactaaaatgtgtgtttttaaaagattcatatgaaaagttaattgaaaaaatatagtgatatatttttttaagtgtaaaataattaatacttaattaattatacactaatacctcacattgttttatgtatgttctcaattctcttctctattggatatcgaggtcaagtcggtagatttcgaggtctatccatgtcaggttccctccgttgcaagatgcaacgatgatcgaaatcacacggctaaaatttgtttttttgtttaaattcgagttaaaatgggtgccgacaattaactcatttacttcatccttaatggttatcataagtttgtaagttagctagcgctcaacagatttatcctcttatatattttttttaacatgacaagagagacaatgcagatctagttagccaaaaagctcatacaaacaaaggcaccaagaaattcgagcaaagcagatagtaaattatagtttgggtcaccttttatcagcaatgtttaactttgaccatcctttcgtttggattgtataaccttaccattttttttttggttagaactactcaactctctttattattcatgtacttcaatttcgtgaaaatctgtcctgcatatagatggaaaagttcacatgcgtaccaaaaccgatttgattgagattattaatgagtgctgaagaagttgattgggtggtccaagccaaaaaaaaatttataaagttacctgatccaaaataaaaagattattttaaaggagatccaaagtgaaacttggataataaaatatgacctaaaatgaaattcatacacacactacactgccttgaaatcgtttcagagtttcaggattttcatggtcaggtcttctccagcgtcgtcacggcgtggctgccgaagcccagggcatacgacggcaatagtgtggagattatggataccccatatctacatgacagttataatttagtcagatatacggtaccaaatataaatagaatatctttatgaggactcgggttagttttgaacttgtatgtcaaggaaatacccgagatcttagtcggttacgattgtattttatctgtaattacatattccgttagggatatggactgtactttgtaaagcggaccctttcccctatataaggagggtccgtgtgcctctcggggcacgattcttttttccagtttatacgatcaataacacactcggcggaataatccccggacaggagtagggtattacttcttgaataagaaggcctgaacctgtataaaattcttcgtctccaaacccatccactttcctagcttgatagccacccccttttattattgccgaaatcttgtttcgacagttggcgcgccaggtaggggtagcgtcaagtttttgccgactaagtgcgatgggttctgtctccggcatcgacgacttcgccttccctcccgggcaggcgttccggttcggcagcctcaacttcatcaccaacgacttcggcaagatctctctccttaacttggattcgaaccagtcaggaagagatcaggtccccgtgccgttcggcattccgaactcggccgaggcctactccaagatcatctctcctgagtcggcttcaaaccactcggacgagatccaatctactcctccgcgaccagatcaagacgacgggtcctatccctcaatcctgatgaaacttcctgatgatttggccgctatcttcacagccaagacatctcccactcgaagatcttggcgagctccggcttcggccccgatccaatctagatccagggaggttggcgttatactccaacctcttgggacagtcttgacggaagagttggatggctacctcagctcccccggcgtcagttctcgaccaaccgagatcctcgactacgacgacttcggctaccactatgaccacggcgaccacgacaacttcgacgacagctatgaggataactacacgcccctcttcttcggcgtattcatggctgacaacgaaacggaggaacagcgccgagcccaagaagcggaccaagatcgcgcacggcaagaagctgaacgtcgccgactggaggaagagcgatagcgacaggagcaagaacgactacagcgtgagcaacaagatcgcgaacggattgcaaaggaggctgaagatcgatggcaacacgccttggaatctgggcggtgagcgagagagctcattgggcaacaagacgtcaatggaacagtggtctttcgcaccccctagcagaacgcggttgcagcaatcactctcctcgacaccctcctcaaggaagacgcactcaaccaagctgatcatgttgtcaacatcttgaaccagacgaagaccatgatcgctgcctcggttccagccaactccgcaagcacccgcaccccgactggtagccgagtccctcatcttcgatctcaagactatcaccagccaagcctcagcattgccggtgccggatctagtcgcaggagcaggggacatgatgaacggtctgttcgttcgcctcccgaacgatatagggagcgtcgagttgaacgaccacactccccacatcgaaggcgccccatcgatcttcgcgacaccatcaaccagcgccgcgcagcaagaggctatcattcaccggatcgctacgacgacgatgtggacggagttgctgccttcacaagcgatctgcgtcgagtggattgcccagccggctttaagccgactggaatcgagaaatatgacggcaccaccaaccctgagtcttggctcaccgtctatggtctcgcaatccgcgcagcaggaggagacagcaaagccatggcgaattatctacctgtggccctagcggattctgcccggtcatgactccacgggctaccccgcagcacgatcggatcatgggcagagctacgcgaccacttcatcgccaacttccaaggcacttttgaacggcctggtacacacttcgatctctacaacatcattcagaagtctggagagtctcttcgagattacattcgacgcttctctgagcaacgcaacaagatctccgacataaccaacgacgtcatcattgccgcctttactaaaggcattcgccacgaggacctagtcggtaagttcggacgcaaacctcccaagacggtcaagcagatgtttgaaaaagccaatgagtatgccaaagccgaagatgctatcacggcgtccaagcagtcaggcaccacttggaagtcaaagaaggatgcgccgacagcataccatgctatactaggacgaccggctctagccaaattcatggccgtcccacactacacctacatgatgatgaagatgcctggtcctcgaggggtcatatcactacggagcgacatcaagcaagccgtcacatgtgacaaagaaagttgcgagatggcccaaacccacgagatcactctcgctcgtgaagagatccgactggctgccaccacggcaagcgaaggagaggtgcctgcgaccaagctgtcaaagatcgaaaaaggcgacgacaaaactaagaagatttcactagatccctctgatcctaccaaaactgctgtaataggcaccgagttagattgtaaataggaaagcacgctcatcacctttcttcaaaataataaagatatctttgcatggaaaccattcgatatgccaggtattcctagagaggtgattgagcactctttacatgtcaaggaagacgccaaacccatcaagcaacgactccgccgttttgcacaggacaggaaggatgcgatcaaggaggaattaaccaagctattagcagcgggcttcatcaaggaggtccttcatcccgactggatggctaacccagtcctggttcggaaaaagacggggcaatggcacatgtgtgtcgattacaccgacctcaacaagtcttgccctaaagacccttttgggttacctcgcattgaccaggtggttgactcaactgccggctgcgagttactcagtttcttggactgttactcgggatatcatcagatctgactaagagaatccgactgcttgaagacctcgtttattacgccctttggggcctactgctacatcaccatgctctttggattgaagaacgcaggagcaacctatcaacgcatgattcaaagatgtttttcaactcagatcggttgcaatgttgaagcttatgttgatgatgtagtcgtcaagaccaagtagaaggatgacctgatcgcggatttagaagaaacttttgcaagcattcatgctttcaggatgaaactaaaccctgaaaagtgcatcttcggagtaccgtcagggaagttgctcggatttatggtatctcaaagaggcatacaggccaacccggagaaaatcaacgccatcctcaacatgaaaccgccaagctcctaaaaagacgtccaaaagctgactggttgcatggcggcgctcagccggttcgtctcacgacttggcgagctggggatgccctttttcaagctgctgaagaagactgacaatttctagtggggacccaaagcataaaaagcctttgaagacttcaagaaacttatcaccactccaccagttttggcctcaccacatccgcaagagccgctactgttatatgtgtcggcgacctcgcaggttgtgagcacggttctagttgtcaagcgtgaagaggaaggccatgttcaaaaagtccaacaaccaatttatttcgttagcgaggttttagccgactccaagacaagatagatatcctcaggttcaaaagttattatatggtgtcttaattaccgtcaggaaattatctcactactttcaaagtcactcggtcacggtggtcacatcgtttccactcggggatatacttcataaccgcgaagcaaacggacggattgcgaagtgggccttagaattgatgtctttggacatatcgttcaagccacgaacttcgatcaagtcacaagctttagctgatttccttgc

SEQ ID NO: 28755 - DNA, 847 bp, Oryza sativa
cctcgcaggttgtgagcacggttctagttgtcaagcgtgaagaggaaggccatgttcaaaaagtccaacaaccaatttatttcgttagcgaggttttagccgactccaagacaagatagatatcctcaggttcaaaagttattatatggtgtcttaattaccgtcaggaaattatctcactactttcaaagtcactcggtcacggtggtcacatcgtttccactcggggatatacttcataaccgcgaagcaaacggacggattgcgaagtgggccttagaattgatgtctttggacatatcgttcaagccacgaacttcgatcaagtcacaagctttagctgatttccttgccgagtggaccgagtgccaagaagacatgccagaggaaaagatggaatattggactatgcattttgatgggtcaaagaggcttataggcactggagctggggttgttttaatttccccgactggagaaagattgagctacgtattgtggatacatttttctgcgtcccataacgtggcagaatacgaggcgctactccatggattaaggattgctatctctctaggcattcgccgattaatcgtccgtggagactctcagttggttgttaatcaagtcatgaaagagtggtcctgtttagatgataatatgaccgcttatcgacaagaggtacgcaagttggaagataaattcgatggacttgagctcacccatgtcctctgacataacaatgaggcagccgacagactggccaattttggttcaaaacgagaagcagccccttctgatgtgttcgtcgaacatctttacgaaccaaccgtacccagaaaagaaa

SEQ ID NO: 28756 - DNA, 696 bp, Oryza sativa
ttcagactttcaatacgggttccaaagaccttccgctcatcccaaatatctatctgtaattttaaaaataaagttttttttttactttttgggctatggccttgtgatagagaaaatgaagtaaatagacttttccaatgtaacggaattaagaataacttactaatcttccaactactttctttccatcttctcccccattgacataaaagtctttcaataatccaggaagaaccctccaaaattcattcacaaactcccctcccttgcgtttactattttgcaggatatcatttgacaggtacaggaatgatactttcttatccttatttgcactgttatactgcttctcccatgtatcaacaacctttctggctctctttcggtgaaaaatgcaccaatttgaaagtgctgcttaagaattaaggaataaaaaaggcatgctattgtaatctagatgctattgttaaaaatatgctgtgggaatttggtatcatgactgtgtaaatgatttttacggcattgacatcaaacacaggaaagcaagtggtaagactcgttcagaagatattacatagggattcgagttgctaatatgtaagcaaacggacatgacacaaccatcacataatcccccaccccctttgtagcgtgaatttatggatgcaaatggataaatgctatatatatccttct

SEQ ID NO: 28757 - DNA, 671 bp, Oryza sativa
atgatattttgaataaccacatctgcatctggttgggaagtcattcatgatatggattgtatggttttaaataaatcacttatggtatgtaacttaggatcattagcaagtaaaggcaagttctccctaatcaattgaagcgcctcaaccattttttttttcaaaatatctttagatctggcttgtaaaaagtctgtctcttgccattttagtatatactcagatgctttcatttaggatgaacctttacatgttcaaaagtctatcatttcatccattacagcctagaaaagtaacttgttgtccagtccatatacttatttatgctagctttctctggttcatctagccgaggcatagataaattagcatgggattcttcaggagagcgcttggcattatcattcaaagatggtaatgaaatgtatcatggccttgttgctgtctatgatgtgaggagatctccacttgtctcagtttcactagtgtaagtgcagtcctctaatttaccatgttatcttggtcatgaacattgaatcttgataattttggaccattgtctgacgaatttccaatgtgcatatacagtggattcataagaggacctggagatggagcaaagccacttgcatttgccttccatagcaaatttaagcaaggaccattgcttt

SEQ ID NO: 28758 - DNA, 645 bp, Oryza sativa
atagggcgaattcgagctcggtacccccaatcccacagcctagctagctgtggtgttggtatagtggcttgtgtgtgaaaaacacccgagagacagagagattttcatccatcgatcgatcgccatgccgcctcaggagttgcatggcgatgatcatggccgccaccaccaccaccagacacccgctggcagcggcgggggcggcgccggtgacggtcaccaccgcgacttcagttctccaccttcaaccacttcttcttcttcttcttcttcttcttcttcttctaccaattctcccaccgccaccgccgcgtcgtcctcttccaccaacacctccggcgccgccatcgtccaccccactacctcaagtcacccctccgtcgcctccggccaccactccgccgccaactcttaccctcttgtcctcaaggtgagtagacaagtacacatttgtgtatatatacatatatactactctgtcaaaaaaaatgaattcctagttacgaatctaggttgatctttttttgggacggaggggtatgtatgtatgtacgtacgtacgtacttgtagagctacgtgcatgagcatgttgacatatgtgcatgagggagggtggtgatgagacgtgaccatgcttttttttt

SEQ ID NO: 28759 - DNA, 824 bp, Oryza sativa
  unsure (1)..(824): unsure at all n locations
cacatgacagagtcgcgaatgccacacattagactcatcattctcgctaatatggttcacagcattatgattattacacatgtcattcaaagaaaagcggaacaagccttcgctgtcataacattttccaacaaaagtcccatatttagatacgacacatttattggactcaaacacaagtctaaaaccttctctacacaatagagagccgctaactagattcttctttattaaagggacatgctgcacgttcttcagctgcacggtctttcccgaagtaaacttcagatcgaccgtaccaacaccatgaacagccgcaagcgacccgtttcccatcaacaaggaggaacctcttcccgacctgataagaagaaaacagagaaatgtcagcacatatatgaatattagcaccagtgtccacccaccaatcaggtgaatgataaacagagagaactgtaggtaacattttaccgtaccccgatgttcctccgccctcgctaatgaccatgttggcagacttcctatctttgcgctcaggacagtccttggcccaatgcccagacttgccacacacaaagcaggctccctttgcctttcccttgcctttcttcttaaaattggntgcagccttgggtttgacatcaggcttgactttcttgttgttgggggatgcatgagggttcttcttctgtaccatattggcactagaaatttcctcaacctttttgccccggacgtcctttgccctcgctttctcctcaacacccaaagagccaatgagatcaggaacactgaactcttgtctcttgtgctttagagaagtg

SEQ ID NO: 28760 - DNA, 729 bp, Oryza sativa
gttattgtgtgcctcggctgattcctggacgagggttcacacacatgtaagcgtttggaattttggatagaaattccgggcgtgacaaagggtaaggttttggcactccattgcattatcttgaacccttgcaagagctctcacacccttgtgcacttagtttatctagtgaggtgttagagagtgagttaagccaatccaagtgcattgcttcattgttttagctagtgtggcacttgatcatcctcggcaagcatcctagacttgttactcttggaggttgccgcctcctagacggcttgtataggtgttgcccggtgacctctccgagaagattgtggaggaggcccggcaccgtttgtgagtggtttggagttcaccaccttcggagtgaaggaagaactaccccgagtgatcgaggcttggatagtcctctccgtgggtcggctcccgccttgcccaccccttgacgaagggggcgtgcggtggcttcgtgattgagcggtggagttgggctcgcctcaacggggattaggaaaccggcgagtttccgaacctcggtgaaaaatttcttgtctcttgtctcatttatttgttgtatttacatttgtgctatttacattcatagagacatatttgagcctataacacataggtttgcaaaacttaacttagttgcttagttaaccttgtaccttaccttgcctagcaacttaggttagttttgtt

SEQ ID NO: 28761 - DNA, 791 bp, Oryza sativa
ggctttttctactgcttccaacatttcttttacacattcagggacatggttttcgcacagaactaatatctatgatgttggacttaaaaccacgattcttgagattccctggtatgagctatattttccaattgaaaatcaagttcttgatatctgcacatatatgtcagacgtgtctgggataattgacttgatttccattcaaacaattgtaggaggttgcttcgtggagggtgaatggttaagaaacgcattcaggtggagggaatctattggtccatgggaagagaggcctggacactttggggatgtttggcattactggactgatgatggccttggatattatgagtttcttcaggtaccagtttagttgacattatttccgcccttcattttcttatcactccctaatcatatattggctttgaattctatttttttttctaatgaaaaatttgaactctacatcaaagctttctgaggacctgggcgcttgcccaatctgggtgtttaacaatggtaataattgccatattttttatatctttatcgccacagctgacctccttaattgctactaaactcttttatatatcaggaatcagccataatgatgaagttgatactgctgcaattgctccttttgtaaaagtatgttctgaactccctggtttattttctgttaagtcagatgcaccttgattcgctaaattgtttccactttaaaatttacctgcaacatcctagctatgactgggcattactatggatatggaatgtgagaaaat

SEQ ID NO: 28762 - DNA, 1127 bp, Oryza sativa
taatttagtcacataaaatctccatagaaaacccttacaaggtgacatttgtttcttacactatttcaattagtatataatattaatttttttatgtcatatgttctttttcctcttttatactcacagtaatatacgttgttattttttatcgttgcaaataaagtaggattagtaatacataaaaacaagtcctggaagcaaaaactactaaaatgtggttattttcattattttttaaaaaaattggatgcaatttttttatgtttgatcataatccccaatggtactgcacaagttttacttgaactgtgtggagagcaactgttgagttctccttttaggtatatgcatgatgttctcttatccgttatacaggtaattacctcaagttttataatgctataagggaggcctatccggacattcaaatgatttcaaattgtgatgcttcatcaagaccacttgaccatcctgctgatttatatgacttccatgtaaactactcatcctctggagttctgttatgcagtacttctcattctgtcaccaatgtcaaggtttttcccatttattaaattctaataattcctttttctctaggtctatactgattctaagactttgttttcgatgaagagtgcatttgatagatcatctcgtaatgggcccaaggtatgttgtatacctggactttcattgctgtgtgaaccttttcatttatggagatgcttgtaaaacagcactgtgaatctcccatctttcatttatattttacattaataatccaggacttctcttggtatattcgtaggatgaccttggccatctatgttttaacaacaattcagtaacatccacagttcatctatgtcacgtgtgatgattttttccatgttttggataattttggaatctcattgcttctcttgcttattcacttctatctttacagatgtgctgcctatttatctcttctcatccctattggccattaaatatatttcttcatatatgttttggttgcaggcttttgtcagtgaatatgctgtttggagaagtgatgcaggtagaggaagtctacttgcttcattggcagaagctgctttccttactggactggagaa

SEQ ID NO: 28763 - DNA, 758 bp, Oryza sativa
aattatgataaataagttagtacttacatttatgtacaatacagatggtggaaagagcttaacgttgaatccaacttaagcttcattcgggatagaatagtggaaatgcatttttggatgacaggagcatgctcggagccccattattctcttttacgaattatacttacaaagatgacagcatttatcaccattctagatgatatatttgatacatatgctacaaccgaggagagcatgatgcttgccaaagcgatatatatgtaagccttcattataatatgtggtaatattaattgcatctttattttgtagtagctagtttatactaagtgtgaaatttctagttgtatgtggaatcaatttcacaatagactaaacacataaaaagtaaattataacaaaatcatagtataaaggagccaaataactctatgaaattatatatatgcaatgcacatgtatatccgtacatgttctgatacttgtaatctattcaccatgttgtattaatatattaatcccatgtatgcctcattaattgagaaaaagagtaagcatattaaattttctcctatatataattaccaaagatcaaggaaaacaattttctcttagaaaaagaaatgcaaacatttaacctatctgggcattaattgtaacggttacttaaaacctcattgtaatattaacagttggtcatttgctgccatgcatgttttatgcaatatgaagttgatacataagttaaatcataa

SEQ ID NO: 28764 - DNA, 45975 bp, Oryza sativa
ctgggatgctatatgagggggtaaatggcagcaatgggtgaagtagtgcttgggaaataatgtgaggcagccatataggtgatgacgacgactatattttgttgaaaaaataaaggccatcagaccctgcttttcattgatagtcacaatggtttttactaggataccaggctaccaactaccgcaagagtttgtaagcacaaattgagcctgttaagtaaccttgatggactgtggctgcagctataccaacagtaactacaacaatagcggtacatgagtgctattaccgttaaggctatgttcggtatccccttttcctaacacctctccctcgttttttgcgcgcatgcttttcaaactgctaaacggttcgttttgtaaaaagtttctatatgaaagttgcttaaaaaaaatcaaaataatctattttttttaaaaaaatagctagtacttaattaatcacgtgctaatggatcgctccgtttccgtgattactgatccagatgggaacaaggttgtgcgaacacagcctaagggcctgtttggggagctttagattataagaagcatctgtttggtagtcagcttctgagaatctggaaaagctctgaaacccagcttctccagcttctggcttcttagttcatttttcagaatctgtaactacaaattctcagaatctgtaactacagattctcagaagctgtggactgtttggggcagcttctagcagaagcagcttttggaaaaagctacaactgggacaagctcccctaaactgggcctaagtgcagttgcagcaacaggaggtaccgagtagccccatcaactggccacaccctagccaaccaagtgaaacatcattactagaacctatggttaaactaatactgattacaagtcatacggcgcatattagcaataaaaaaatttataagtaaaacttttatatgagtcctaaacgatttaacagctcacattggaaaacaaaatgggatgaaaagaattcaaaatcaacatcagaacgaggttttaaattttaattctaagcagctgttataggctgtagggcaaattattgcagctctaaactatggcagaaccatctctagaaatacttagccaaaactccaagggatgactgcttgacgtttgtttctggacattactgttgccacggaagttgcagtctagaattgacacatcattctcctggctaacaggctcgggcttcctagctctatgacttgtaattgtcacttaggataaatccattgcgaagacacctgacggccgtcggcctaaacattagctgtacaggctatatgacacgtatatatgctcgtatcctataggtcgctagctatattgatgcaatttgcaaacctatcttgcacggaggatactagaagcacctgcaagaatgatgacgtagattcctgctattgtttgttttatcaacccatcgatacactatctgacagagtaaatttctgcagagattatctactcattaccgcacaaggatatctcgttcgatcattccaattcccaggtgcctatcattaccaaccaccgttccatcatatctactccttcagtcccataatataagggattttgagtttttattcgtaacgtttgaccatttgtcttattcaaattcttttttgcaaatataaaaaacaaaaagttgtggttaaagtactatagataataaagtaagtcacaaataaaataaataataatttcaaaatattttgaataaaacgagtagtcaaacgttgcaagcaaaaactcaaaattccttatattatgggacggagggagtaggttttttgaggagtatgtatggtggctccattgtagattttttttttggttgttgttgttgcaatggttccatcaaactagtatgggagtgtaatatttgtaaacacaaggctgatcgagcagcactcggttgaggtctgaaacaagttgaaatgtggagggatgcatatacatggatcacaaaccatttttttaaagtaaatttcagaaaactgcaactttaatgacaaaattatcagtttattgcaatattagcggcatgtttcagtttgctgcaataatagcgtgggaattatcacaaaactataacttttacgtcatatggtgctacatttgtcatctatatgtactgtagcaacatataacgtaaaagttacggtttagtgataaattctcacgctattgttacagtaaactgaagcatgtcgctaatgttgcagcaaactgatagttttgtcacgaaagttgcagttttctgaaatttactttttctttttacatatcttaacatggaaatatgcgaggatatagacataaattttcatatacaaaattttactagactggtagggggacaaggcacattaaagttccacgcatatatatacaccaacacaagattttcttttggatatgtataaaaataaattgatcaagaagcatgtttggcagttaaactatggatatatgatttcaccaatcaacttttaaccataaatattttaaattgctatccacaattagcattgtttttgtaggatccaatcacaagaattaagctaaccagaggggggtgaatggttggtatatctaaaaaccgaaaaacttttagcggaaataaaagttaccctcgaaatcgacggaagtcggtctgaccgagattgatctgccggtctgaccgagtggatgctgccggtctgaccggtgttgaatctccggtctgaccgccgaagtcgcctgccgcgcctgccgccgctgccggtctgaccgccgtgctcccgccagtctgaccgccgccttgccgccggtctgaccgcctgtgagttgccggttagaccgccgaaacccggtgaaacacaaatcgaagaactctcaaagtagatgacaactttattgcttctctctgtgtttacaaagtgcaacaacagcactccttacaaaaatctcgactaaactcgaaaccctaactaaactagcaactcaattgctctcaaaagcaatacaaaagcgataccggaaagcctcacgctccccctctatttatacatgacgtaggcagcctaaagccacgaaccaaactcatactaagagtcctaaacaccttaggaaaccctctggtacaagaaacaaactttacataaccaatcataccaaatttgaactccttccaaattcgactctgcatcccatacgcacacaatacctccattgtatgccatatggaatctccatcaaccacgtgcatcaactctagtcttagtatccctcatgatatctgaccaccacggacatcgtcttaccaccaaaccgactcccggtccatcaccgcaaatactctcccgaggcatcgagtcacctacgcatgaaacaaacaaagaaactatattccgagatcaagctatccccaacttgactcattgttaacaaacaacagtattacatatgtatagtatccatctagaagccataactctgaaacaatcacggatatctaaagaaacaacccgaaaccaaaaccgacacagcgtcggccggtcagatagcgggccggccggtccgaccgcacacatagcgccggtctgaccagcaacctccgcccggtcgtaccggacacataaaataacagtgaatccgatcatcacctgaaaattgattatctccaaaaccacttcgacgataatctccaaatatcaaaaccaataatcacagaataagaatcaaaacacactttgatcttacagttttgataagattttcaggcttacatattttatttaagttatttgtttgtcaagcgtgcatgcattaaaaggtcacgctgatggttcatacgcatccttgcaatgaaaaaaaaaaagacactcacgaagtttgtaaatacatgtaatttataatattggtttatggcatttttgtggcatgaaccatttgccacattttaaatgcgcacatggttttaacatgaatccactatttagtactccgttactcgtagatttacacgtcacttgtaaaatcaaatcatactgtgaggcatttccacacttgtaacctcgaactcagtggaaatgcctaacaaagcaggtattcggtgcagaggctgtaacaaacgcctaacgaagcagaagtctgtcacaaactcctaacaaaagcagagtctgaggttccactgagttgaaggtcataaaaaataacatcaaattaagcactatcccttacaaacttactgggagtagataacaaatttatgatattttaagattaccttgcattaatttttcttaactgttggtgatataccctagaggcaatcatagagatgattgtatcacataatatgtttacatatttattcgacattgttccttgaaatagataactaattattagttaatgaatatgtgattctttcatgagactctttatgtttaatgaatatgtgattctttcatgagactctttatgttgtatgttgctatttctaaatgatccctaatcaaatatcatatgtggaacaaacatgtttagttgatcagtatatgtattaattgattatcatgtctcatggatcatggtatagagataccaaattaataatgtggacatatgttggggaacatgttgttggatagacccaacatgagacactgcaagagtcatatgcgttgtatcatcagtaatttcatttagtgttggtattgaatccttggacctgagattatcatggttcccaacatgtgtagtagcttgcttagggattgctaaacgctactccgtaattgggtagttataaaagtagttttcgggtatgctatgaaacatgtagtgggatatgaataatcaagatgggatttgcccctcctatggagagatatatctgggcccctcgatgttatagattatggaagtgcatggccatgccaaaggtgattgaggagtcaatcacaagttatataatctatcacaagttcgagtgaatgattaatctattagaggatggcacatatctagccttaagcttaatccatgtcgtgaggcagaggggttcatacaagtatacactagaggttcaaccgatatgatctttgtgtatgctcggtcggtcaatacgttccgctaggggccactgttgacacgtggaccgaaaaggaattttcgggttacaaccgagtgtacatgaaactgcagggtcccacgtttaaagggccggaataaggggattggatggagacccaatatgagcttaactcggatagggatccgaataggagtcctacgggcgttgaaggcccgaatcatgtatcctatatattcgtaaggggtgtgaccggcggaggcattgcatcacgcgaggaaccctagccaccactcccctccccgagcaaaaccctagcagtgcatgggtgctagcatatctgcgcgtggcgtttcgtccctgtacatgtagataccggcagaggcgcgctgctttgcggtgctgatcggcgtgggagtacggcgaggagaacgcacgaggaggagaagatcgagccggtgcgatcaactacttcctctacatcgacgcgctacatcacgaaggttccttcgccttcttagcgctttctttcgctgcgcaacgcatcgagtggtaaccatctatgatataacactttgcatggtttctggtttacgtggtagaaaatgttaatttatgctatcgtagcctacgcatatcccaatataccttgcattaatttttctcaactgtaagaaacattttcacatcttccatatatcccgaatccgtagctagacaaatccactaaaaaggtgcgtactatgcaaatgtgcagttgacagggtggtgctccgattccatgggttgatccccaagtgccagaggcccagagctattgacattcagtaagaaaaagagctaattgcgttccccaagaatggacatttggaagatatatgtaagacgtggaaatgtttccacatcttccatacatcttacatcgttccacactattgtgatttctgaaagacatttcagttaacagtacttcataatcttaagagttaagagctccattatggtgctctttactggtagtattctgctagtagtataaacaatctaagctatcgatttagaagcaggttataaacgtattttatctctctataccaggggcatttcatcattgacatatttcttccaaaatatctgattagatctatacggtgcctaaagagatttcatttgttgggacctcccaccgatgtatcagccatcactgtagtgtgcaaaaatatggcttgtgatgaagaaaacaaaacatatggatataagaatgaagccctcctcctctctcataacccacttaattaaggagatcctttgtttctcaatgctctgttcccgtttcagtttgagacattctgaatgcaccccaagtgtgcgccgccctgctgaaacaagctgtcatcttgccgttgcggcgtcgtctttttgattcatctgatcgggaacgagacatgcctcgccccacttgtgaattttgaaccggagggacaaatattttgattctccatatacccttctctattggactattgcacccttgctagtttctactaccactaatgaaggtgatagtataaatagagctagttcatcggatagaaaaaggtctacgatatagattaatatctactaatagcacaatagccaagcccccttcttaaacactcggtaaatacccaaatacattttacacttcaatccatttcagtatttcaatctatttcaggccccttttgattcaaaggaaattcgtaggaatcttagaggatttcatttctataggaatttctcctatatagccctttgaatcaaagtaatgaatcctatggaatcctataaaattcctatggaatacctaatgccatgcatgtttttagaggaaaattaacattaggttctacttcatggaaacttttctttgagtctttatctctcctctaaatcctatctttttcctacggtccaatcaaacgctcattcctgtgtttttcaatcatctattttacacaattacacttacaaccgtatcaaaatcctatgtttttcttattcctgcgtttactcaatcctgcaattcaaagaagccctcagtcttctagcagtgggccctcagtcttctagcagtgggattgggtgctcatggagcttgtattcacggacactcaacatccttcaaagtgcaattgtttaatgctgtcatccgccaactttggcagaaatatacatgaccaaatcattgtaattaaccaatgttacaaaaactaaatatttgagagaaaaggaaaaggaaaaggtttatagtgttcgcgaaaaaacattctaagcacaggcaccaaattaatagcatatgcttttccaaaacaaaatagtagaaaattattgtggaaagccaagatgctgccagagtgccagtagcaaaatgtgactccaatgcaaaccaaagccatacatgtggttactcatatcggtagtgcactatcggtagggcactaagattcaaccctactcgtcagaacaattaacttcctgatgcatcatcttcctgtattttggattacttggattacagttcgagtgctgaaaagatgaacagctacaagggaactcacaatattatattgtatcatttgtcgcaaatttctcatggatctgagattagtcatatgttgatctttgcttgcaaactccatgaagtaatgaaggtgcagcaatacatatagacggcgtaaacgaagtagtaaagctgttgcaatatatgtagacagcgaagtagtaggtaagttataaagatggcgagcaatggtatatactactaccaccatttcaaaatgtttgacgccgttgacttttttaaaaatgtttgaccgttcgtcttattcaaaaaatttaagtaattgtaattctttttctatcatttgatttattggtaaatatacttttatgtatacatatagttttacatatatcacaaaagtttttgaataagacgaacggttaaacatgtttaaaaaagtcaacggtgtcaaacatttagggaaggaggtagtatatattatgactttcagtctttcaatacatgcagatcatacgaaaaaatgaaatatttttttagtgaaataaaacattattgtgtttcatggggcatgaattactaaggaacaacaaatagattttattgctttatcagagacggttaacaacgatcttacatcttctgcccttaaaaatctttatgcttgaagagattttttttttctgcattgtaaacctcctacggagcgatctggtggtatgtgattaatttagaaacttttcatattggtttaattgatgagggtgatttttatataaagtttcatatttgtaataaattaaataagtttaaatgagctttagattttgtgtatgattggcacaaaatgaatctaaggaacaattttttactgaattagttcatatgtgtagtcatgaaaccttaccaattattattggtggtgactttaatatattacgcagctctgcggaaaagaataatgataattttgataatagatgacattttctttttagtgctattattgatgatcttagtcttagagatctatcaatgtcttgtaaaaattataattgggcaaataaattaccaatgtcaacttatggaaaattagatagagatgtctcggatcatgctcctttactcttaaatacaaattcatcttctatttgtaatagtcatcaaaacttatcttctgtttgtaatagtcaacaaaactttaattttgagttagatcggttattaagagatggttttgtagatatggttcaggaaatctggtcaaatgttgttagataaaaaagttaaatctggtcaaaggaaaagaaggacttgctgaaaatttagattttgttagataaaaaaagttgaattaactctattgagtgaggatgagattgatacaagacgttttttaggaatatgttagctagtttgcttagagaagaggaaattaaaaggtatcagcgagctaagactaaagatattttggaaggtgactcaaatacctaatattttgcttagagaagagctttttttgtcttcgtgaagcttcttcttaaactttgtatgaaagccagataagtgatatcccccaagtgtctcaattagaaaacaattctttagtagatgaatttacggaaaatgaaattaaagatgcaatttctcaaatggaacataataaagctacgggtccagatggattttctgctaagttttatcaagtgttttggaatgttatcaaacctggtttggtagatttatttaaggattttcatagaagtctaaatctttaatcactcaactttggtactattattttacttcctaagtgcaaggaggctattaagattcaacaatataggcctatttgcttacttaatgccaattttaaaatttttactaaagttgctacaaatacaatttctggagtagctcagaaagttattagtcctacataaataccatttatacctgggagaaacattacgaaaggggttgttatcctccatgaaacagttcatgaattacatcagaaaaaaaatgaatggtaagtttttaagattgattttgagaaagcctatgataaagtggaatggtcttcctggtcaaaaaaaaaaaagtggaatggtcttatgttcaacaaactttgagaatgatgggttttttgcaaaaatggtgtgattggattgcttctttcattcaagggggtcatattggtattaaagtaaataatcaagtgggggcaatttttcaaactcttgtacatttggtggatgattgtttatctattttacaatatactgatggtactattatttttcatgagcatgatttagagaaagcgaagaatatgaagttgttactaactgcttttgaaaaattatctggcctaaatataaattttcacaagagtgaattattttgctttggtcagttaaaagaatgttatgagcactattcaaatattttcggatgtaaaataggagagtttcatgttagatatcttggtatcgctatgcattataaaatgcttagtaataattattggttaacaattgagcaaagaattgagaacaaaaacaaacgagttggaaaggtaaacatatgtctgttggacagagatttgttttgattaattttgtgttatcaagtttagttatgtttatgatatctaagtctaagaggttcttcaacaaattaattttgatagatcccgcttcttttggcacggtgatgagcataaaaaaaagaaatatagactgactagatcggacattataagtcagccaaaagatcagggtggacttggtatcaatatttagaaatccaaaaccagtgtttattgagcaaatgattgtttaaattaataaatgaacaaggtgtgtggcaagacttgttgaataggaaatatcttagtagtaaatcaataatctaggtcgaaagaaaacaaggggattcccattttttgtctggtcttatgaaggttaagagtttatttctaagtatggattcctggataattaataatcgtgagcaagtcagattctgggaggataagtggttagggaatttttctttaaatgacaaatacccgtcgttgtattctatagttagaaggaaaagttcttcaattgcaagtgcgctatgcgttctgttccgctcaatgttttcttcatgagagctttagttgatcagaatttggtcaactggcataatttgtgtgcttcaattgtgcatattaattgaacagtggaggatgatatatttagattgaactttcatcaaaatagtcattttttttgttagatcaatgtatttagccataattaataatgggtatatagagaggaataagatcatttggaagcttacgatgcccttaagattaaaatttttatatggtatttccttaaaggaattgtgttaacaaatgataattcggcaaagaggaattagaatggtagtttgagatgttttttttatgaaaaatgaaaaaatttaccatcttttcctatattgtcatttttctagatttctttggagatcaattcaattatcatttggttatacccaccacatagtgtttctcatatgtttgggaattggctggtgggtgttaataaaaagttaagaaacctattcctgtaggtgcttccaccgtatgttgggttctttggtttattagaaatgatatagtttttgataaaactccatcaaaatcttatttgcagttacttttcaaggcaacaaattagcttcgggtatgaactcatctacaacggcatgatgatgatatcaagctaataaatgatgcaagtcaaaacttgagtcaatgattatgcacctttttgccaacttcgaatggagattctcgaatagaattcagtaattcagcgttcttttatcttgtgttggtgtcttttagtttatgttttctttatatcatgtcagtgtgttttgaatttgtttatgtgtggactgtgtaatcattagctttagctcgttgaccaaatgacggaatgttattccattatttaaagaaatggtgcatggagtatattgagcccaaagagtaagttttgacgggtacagtaggaaaacacacaaatgcacaaaaagggacggcaccatatgtaccggaaaatccaaaactaacatatataatgcttttccagtctgaacgcgcgtcgacgaagcaccatttgggaaaacgacacctacgtgaggacataggtgctggaaaaactgacacctataagtttgtcatgttatatatgcattttaaaataaagtgtcacatataataaatttaggtgttgtttttttaaaaaaaaacaaaacatatatagatgaacagaccaagccaagctactcattgggctcatccttatctcctcctcctcctcctcctcctcctccctctcgagacttcttctactctctatctgtatgtgtgtgtgtgtctctctctctagctcgcgcatcggtgctcgaccctcaacagcgctcgctcctcagccaccttttattcaacggaagcccccctctctaaacattccttccacctgctagatgcggcagtggctggcgaagatggtgtctcagcagaagaagggaggtgcgatgacggaggaggtggctacagctaccggcgtggtggtgggagaccgccggatctagcagcctggaggtcgagggccaccagatctagatgactccgaccttcatggtgatggtttgggaggtatgatggtgttggcgggttggagctgcgacaccatcagcggctggcggatgcgcatcttcccctccctcattcaattcttgtgattattgatgtttattcatgttatctagggtcttcatcttgaggatctggatgtgttgtttgtttggagtttattgattgtagttaatgtgttcatggatttggggcattattttgggtgatttgaggcatcatttgggatccggggtatttcaaggatatgcaaccttgatgtatcagcttgaatgcaccgagccgatttttttaagctcgtgtgcacctcaaaggtgtcatttgtgaaactggcaccaataaccagggttcatcagcgccgcatcggtcatgcgttttctataatagtgagagtcttttgtctataaatgaatgcacattttaactttcttaaaaaaaaggtgaagtacacagtctctaaagttgtacggtgtgtcatggcatgttacacttactacaatacatagtaggtgccaccatggtacgctacgtccacgcacaaagcgagttggggcctgtttgaacctgtataatattcagaataataagtttgaggattcgaaaaatacattttgagattatatggacgacacaatacaagcttaattgatccaataagagtacctaatttcccggaaaaaaaacaataagagtacctaattatcatagtttcacatttaatttttgtgctgttcgttacaagggaacatcatatattatattgttcattcataacgtatcctggttctaataatatcataaccccaaagagaaaaaaaatgatacgagaaggacctgatcagcaatatttttttctgtattttcgtaatgctaagttcctttccataaaaaaaatctctaaaccatgttcggctaatccccgtgagagagggattagagaggattattttcatgcctaaataggtataaaatcatttctctctaaatccttctcaatcatcttttggatggtattaaccgaacaaggcctaaggagttttatggatttttctgaatgtttattaacttagtgtgaaccaacgaataggcctgagcaattgcattacatattgctaagtacaaaaataattaaatttgagattgtacaaatatattgtacactgtaacgtatacaaatacgtactgtataattgcataagcaaagcaacatgcacatttgtagagaccacaagctagatatataggccaacagtagcagatccagaaaatcgattcattggtgtcataacgtgtctatcggtgtcatagtatgctaattatgcttagaatatgatgctataatatatgaataagtagttttgctataggttttaccgaaagtcatcggtgtcgcctgacaccgatgactatactgtagatccgcccctgtaggccaatataatccgaacgaagtaaaatatggagctattcaattcgagtacaagacgaaccctgaatcatcacacgctgagcacgcacctatacatagatttggcttcagagttcagacgattcagtaacacacactagaatgcaaaaatctgcataaacgctcacgaaacgttgctacattagtactatagtactaccggcatcggtagatcttcaagcaacccctctgcggcaagttggacctccctggcacgcacgaccgagcgcacacgggctgattcggaatgaagcctttgtaggtgaggccgttcggcgccgccgcggccatgctgccggccgtgagcacggccgccattgccaccaccaccgccaccgccacgccgaagacaaagcggatggcaacgcggaagcggccaatctgccgctccggcgccattgatggatatcaaaccggtcattctggtgcagactagatgtctagattcttggttatttatgcgatgatgggcagcggttggtgggaagagggtggccaacagtattgctatggtatgtacatgcttatcatttacttcctccgtcctgtaaaagccaatataatattggatgtgacgtattttagtactataaaatggatatatatatgtctagatttattgtatcagaacgtgtcatatataattttagattcgtttttttagacagagggagtgctggtcactgagttcatggaagcttgcgttgctacgtacgagagggtgttcagggtgcgtagcgcaatgtttgccatcatcccaatcatgttgtacggctagttgactagttttgttttgccttatgtttggtgcttgcaggagacaagagaggccctcgtgatcaacagtacacaacttgacagcttggctcggctgctttggtcggtgagctgctgagatatgtgggtttacatcgtccggttggaaatatttgatggttgtgataacatttggctaaagtcttcaaatatttgatggttgtgataacatttggctaaagtcttctagaccatcaataattttgcaaacgtctagtaaaaaagatacggtatggatatatatgttccaaagaatactattaattataatgttatagcataataattgatgttttgaatattcgaccaaatcgtgtgaaatggactcctcttggcattagtagaagtaacgttaagagttccgaagctagatcgcattgatatggtgtatcataatgcatgcatgatatgtgctgttgggaaattttgacctagccagtagcatataaacagggccagcccaggggggtcgagcggtacgaccgctttggccccccaaatcgcaggggccctcacccaacaccaccccccctccccccgcccccgccccacccaggcctagcatcaaggcgaacagacgcgccgtgcgcagaagccggaagcggaaggcgaacaaaatgcgatcccgcgattgccgccgctcttctaatcttttcctcctcacggcaccaaaatcgcgcggcgcaatggcgcaaggccacgcatcggcgcgccggtggccggcttcccctttttcttccgctgctccgtacgacggtcgacggcagtagggtacgaggtgcagtgcagctgtgactccgtgagcgcctggcggatgcagccgctgccgcctgccacctcttgaatcttgattcaggtattactattagctaggatcctatgtgcctgtgcatttacatggtagcagctggattagcttcgtctggttcagttatgtatagtcgtcagattaaagaatttgctatacaagctttggctgttaaccgatcgtcaaataaaaaattgaaatttactattgtgatttttatctattaatatgtaaataagcatttattgatgtatagtcgtatgttaggtttattcagttgttccaatagttagacatgacgaagacactagtgtgtatttctgactcacttgcggtgtgcatctagacgcttgtgatcaactaattggtacgattttaaattttgatttgtaattttgatttgtaattttgttatgtaatttatatgagttaaactactatattttttttgaattatcaggccatgtcgtcgagaaagtatgcaacgggtagtgagagaaaagggaaaaaaagaaaagggtggatgatatgatagaatcgcagaagaaacttttaaggtaacatgtgcattattgtctatttaaatattatttctaaatattgggggggcgccacccaaaaaaaaaattttttttttttttttaaaaaaaaaaaaattttggggtttttttaaattaaaggttatttaaatttcaagtatatgtaactattgataatagtatggtaagggtctctaaatttagtttcccaccaggaccctaaaaagtcaggaccggccctgcatgtaaaccaggagatcacatatggtcgttctcacccattacatgtgggatccacatatcagtttccataattacaaattacatgtattggtcggtataaccaacgccttccaatacaggtggtgtcgctctgtcatcatcttctcctcgagacactaaaccgatatagcatatatctctggactactaaattggtggttttgtatggtggtcatgttgactatttgacttgatgttcattccttgtgacgtctacatgacaattaggtgatattagaagaaaactaaaacatagaaaactcaaatggacctgcatatcaatcggtaaaaagaattgaaaacgtgggctcatatattagtctgccctcaagtgtgctcgcttgcgctgcatgcctctcccgccggcgttggcgtcgatgtccctgcggccagccacagcggttccagtggttcacgcggagttcctccactcgctcatcgcctccaagggctgcgcacttgcgcacccatcgttatccgcctcactcaccctctctcgttgtgttttgctcgatcgtacgggggttcatggcgatcgctcgagtgttggattgagccagacggggatcgagtcagtcggtggtcatggaggaatgcacgccgcattacttggcacgtggtggggttcacgtgagccacacactgagtgcacccacaagggctgactgcactgtagagaggatgacccttgtcaccaccgtcatgtacgaggctgctccaccactgcctcactcgccaccagcgtctcccgccgcgtgcaatacaagaagaaacatcgaacggtcatataaggtaagacccactaccgatttaacctatccttcccacaatctaatccactcatttctcctcccacgatcttattctctcatttctcctcactatttttgcatttgtaggaaacacaatgacaccgtcgaagaaagctggtggagcaccgtagccagcaatcaccaaaacacagaggggaggaggtcggcagcggccatgcggacggcgacgagacaacgtgacgcaaagagggaggaggacgttggcgatcatgctggtgttggcggaggaggtcactggccacgcggatgacagcggggcagcgcaacacaaaaaggggggaggatgccggcgaccacgctagtgaccatgaagcaagatgatgtgaaagggaggaccggacgagggttggacctctgctgccgacatgaagagcgtgatgtgtagaaggagatgttagaccagatgccgacgcaactagccctggcaaggtcacccgactgatatcgctgcttgcccttgtcctcatgtacacaatcagcttgcttatctctcccatactggtcgtttgtttcccgtggccgaaatagaagaagacagaggtaggttttgttagagaattttagtggtattgtagcctatttgtaattttgttgtactttattgtattaatcaataaaggtgtttcattctattttgactcaatgttgaatccattgatctcttggtgttgcactcagtatgttagaatattacattccgttgaaacaatcttggttaagggttggaacatttttatctgttcgtgaaacatccgtaatattttcgttgaaacaatttttatcgacagcaccgtccaacaatttacaccaatttggacgtgtgatacatagcagtccccaagtgaaactgaccaccagttgaaaggtatacaaagtgaacttattcatctaaaagaccgcagagatgggccgtgggccgtggcctgcgaaacgcagcgttcaggcccatgagcatttattttttaaaaaaatatttcacaacaaaaaagagaacggataaaatccatcgaaaaaaaaaactttcctacgcatcctctcctatctccatccacggcgagcactcatccaaaccgtccatccacgcgcacagtacacacacatagttatcgtctctccccccgatgagtcaccacccgtgtcttcgagaaacgcctcgcccgacaccgtacgtggcgccaccgccgcgcctgccgcctggacacgtccggctcctctccacgccgcgctggccaccgtccaccggctcccgcacacgtctccctgtctccctccacccatgccgtggcaatcgagctcatctcctcgcctcctccggcttataaatggcggccaccaccttcacctgcttgcacaccacagcaagagctaagtgagctagccactgatcagaagaacacctcgatctccgagagttttttttcagctttagcttaagcaggatggagcaccaggggcagcacggccacgtgaccagccgcgtcgacgagtacggcaacccggtcggcaccggcgccggacacggccagatgggcaccgccggcatggggacgcacggcaccaccggcggcatgggaacgcacggcaccaccggcggcatggggacgcacggcaccaccggcaccggcggcggccagttccagccgatgagggaggagcacaagaccggcggcgtcctgcaacgctccggcagctccagctcaagctcggtacaaacattttgcccccaattctttacccccccagtaaaaccttgcgtacaaattcgttgaaaaattttaatgtctttgtgacagtctgaggatgatggaatgggagggaggaggaagaaggggatcaaggagaagatcaaggagaagctccccggcggcaacaagggcgagcagcagcatgccatgggcggcaccggcggcgcctacgggcagcagggccacggcaccgggatgaccaccggcaccaccggcgcacacggcaccaccaccaccgacaccggcgagaagaagggcatcatggacaagatcaaggagaagctgcccggccagcactgagctcgacacaccaccacaccatgtgtctgcgccgccggcgacggccgccacgtcaccttcctgaataataagatgagctagccgagcgcaataaaaggaaaaaaaaaatgttactgtcgtgtgatgagtgtgaatgtgtgatggcgttctccagtacggaccgtgtctgcgtgttgtttgtactgtgaaagtacgctgtgtatgtacgtcgtatgtgtacaattccgctttgttgaaatacgtataaatatatactgtgtgtacattatacggtgtatatctcatcgtgcatatgtacacaacgttttggtgatcgttataatgttcatttttttccttattctgatcaatctggatcataggctcgagaaattgctatagatcaacggccggaaattgcagaacaagaaagtgatcctattgagtattagaaatgattgatcgttactaccttataagaagggccccggacttttgttctcgaataagtaaaaaaaaaacgaaatgattgcgcgtcatcccgatagaagggcaaatactccgtaattgtcctcgccgtaaccttaaaaaaaggcactcactgtggaatgaatgtacaaaattagtttattatagcatccaaagtttcgagtcttccccggtcggctatctttcctaaaaaatcataacttgcatatgcatttaaaacaaaatcaatctgttcaaattgaagacatgaattcaggtaagcatgtttaaccataaaaggatattgcatcgcgcgttgagcacaggtacgatcggtctatccctttctatatttgatgagtaattttacccttttctaaggaggtaccactttttcctttttttatacctctcgatatatatttaataaggaggtaccattttttctattataaatttgatatctcttaatatattaatatatatttgatgttctattataaatttgatatctctcgatatatatttaataaggaggtaccattttttctattataaatttgatacctcttaatatattaatatatatttgatgagtaattttaccgttacgaggaggtaccaaattttttattactagaaaaaatatccattgtaacgggtgaagcctattttatcttattattgttatttggtttagaaaaaaatatccattgtaactggtgaagtatattttatcttattattgttatatggtttattattattatatggtttagttaagatgcgatttactgtagcagttcgcttgggatatatttttagaaaatcatgagctacagttaagagtccgatcatctcaaattagcatacgagtttttttaaacatatttcttatatgatttcttatgtattatcaaagtgaatgctcttaaaaaccgactcaaatatggagatatatttccaaaagcaaatgaacttaaaaactgacttatacacggatgacgtaccaaaataccggcaaaagcatcttcaatttttatatttatagtagtagagatagagaagagatatagattaccgactcaaatacgaatatgtatttccaaatggaaacgaacttaaaaaccgactcatacacggatgacgtatcaaaataccagcaaaaacatttttaatttttataatagtagagaagagatatagactaaaacaaaaacataaaattaaaaccaactcaaatatggatgacgaatcacagaaacatctttaatttttataatcgactcaaacatagatgacggactgcataaacattttcaatttttataatagtagagataaatttgatacccctcggtaccgagattttatgaggtatcaaattttggtatctcatgttaccaatggtacctcttcacgctagaattgctcattttttattggtttttgctagacttgatccgtttcccgttttgtagattttgtcgttttgttaccatcatgcacatatgtggtcctagactagagagtgtaaaggaacggcctaatatcttttctcttttttttatttttatgacatttttctaatctggtttaaaaattttatgcatagagtttctatacctaataatttctatttaagaactagggtagccctcgtattcgtgtaggcatgcatattagtttgtcttgtaaataggtttaacaaaataaatccaaattaaatgaggcatttttcctttttaactgaatgttttctcttgtaaataggcttaacaaaaataaatccaaattaaatgaggcatttttcgtttttaactgaatgttcatcgtcactcttttttaaatctcttcgagaaacttttattgctattcctctctttaattgattaatgcatggatgtgaattaataaaaatagcaaagttctttaaaattatattttttttattttgaatttagtgagtgagtgattttaatttcattttttttatttttttataaatttattttgtgggatttcaaaattgtattgtgttgtgttgtatttttgttcttcttttaaaacttattttattatttcgaatttcaaatatttatatatattctacatggactcttattatatttttatttacaattttagtgaagattttattttatcttttaatgcttcttttaatttttttctgaaattaattacaaattcctcgtagtagatctaccatcgttgtttacctccgaaattttagatagtaaatagctcagcgctgaattgaatggcgttgactccttctgacctggccaatttttgctagctcggatgaaatatcagcgttaatatgtatggcgctaaaacgttacacctctgagtcaacggcctatttttataataagtttttggcatggtctattcttaaaataagttttctcaaagggtcaatttgtcaaaattacggtattcatctcacagataatctcgctgacatcctcatcgctgagcctctttcaatgcattggctatgatgtgatgaagcatagcacggagataaagtcgtcttctggtctttgtcgaacacgctgaacgcctccatcgaggagtccttgtccttttatctaatcatcgaatgcgccattagggccacaaactctgatggaaatcgatgttgccactgtcgtcggtgtccaccttgttgatcatgtcctgcagcctcgcctccgccggattctggccgtggcagagctcgacaatggagatgaagccggcttctggtttttgttgaagacatggaaccattcctgcagctcttcctcggagtccttggccatctaatcatcttgaatgctattaggctcaggaactctcctagaagccgatgttgccggcatccgcttccactttgctaatcgtccagatctgcctccgtcgggttctatcctagagtacctaacatggtttcgaggtctttgctggtggtagaacctggactatggactcaaatatttaaattcggctattgcttttaaaatacaaattttgttctcaaatttattacagtgtcacgtgtagcttaggagcgtttgcaggattttatgtcttaaattgttgagctaattataaataaaataatggtccatacatgcatattcataattgaatatacaacttaaaacatatgggacttaatttaaatggagggcactacgcgtcgggcgcccgatcttgggtgggaaaaatcggacgctcacgtcagctgacgtcagcacgcatgcatgcatgcatgcaaaactattttaactattttttcttttaaattattttaaccaaattataatccgattgcaccattaaattcgttgcaattaaatctttaaaacaagactgcacatggatatattccgatgaaaatttttttagcttattattgaattatttttaaatatttcacgttgtttcaccaagtatatcagaattgtttcactaagtagatcgaaaatgtttcaatcgtttaaatcgaccgttgtttcaccttatataaaaacaatgttttagcaaatagcgaaaaaatgcttgaattcactacaacatttaatctatatatatttaaacatcacgagtacactaggtgaaacatttttggtgcaacaaaggatgaaacagattttcttaatagagggtttccataatatgtgtgtgatttgttgaaaaaaaagtttcaattcactgcaacattttattcatacatagtgaaacattatgagtgcactaggtgaaacatttttagtgaaacaaaaaataaaacgaattcccttaatagagtgtttccaaaatatgtgggtgatttgttgcaatggagtatgtggtggagacacgtggcagggggtaggggcactggtggggcccaggaggcagagcccgtcgcggggggagggagcgcccaatttttctccctcccccgagcgaccgacgcaaaggattattgaatttaaattttgattgtttctttgtttgagtttatcctagaaaattagaaggaaaagagaggcagaggccggtacgtatgtgtgttcaattcttcatcgcacggggattgatgtgcctgataggatggggtactttgggttactttgagtttctatttaaatagatttaatctaatagtataaaattataggaccatttatttaactgaaaatcaatgattatatcaataacctttttgcttcttgtaacttataggacttgctctaatttattagtgtgccaaatgacggcttaagagcgtttaaataaagtttaataaactttgtataataaatataatatatgattgttaatagacttaacgttttgttttttctaatattttttctatagaaaattatttaaaaaattcatactgatctatttttatatgttaactaatacataattaattatatgctaatctatctcatcgatttacgtgccatgtgccagaagatatacgtttctaacttatggtctgtttagttcgcgaaatgaaaattttttagctatcacatcggatgtttgatcggatgtcagaagagattttcggacacgaataaaaaatcgcctgaaaaccacgggacgaatctttttagcctaattaattcgtcattagtacatgtgggttactgtagcacttatagctaatcatgaacgaattaggctcaaaagattcttctcgcgatttctcttctaactgtgcaattagtttttttaatttaagtatgtatttaatgttctatgtattaaagatttgtgcaatggttttgagaaaaaaattttgggaactttaaacctggcctcagtcatacctcaaaacacatccttgtcgacgagtcgtcgtccttccccgatgcggcgatagtccaccgggcatccgtgaactccgtatcatcacgatcgctcgttcccccaccggccacaacagatatcgaacacgtgcatgtcttcttatccatctctatccatctgcatggatatgatggtatgcatgcagcacgcgcggtcatctcccccacacagataacaaagtgtccagaagaacccaacggaaacacagtacgtggcagcaggttgccgcgtggcaccaccgacacaacgcgctactgcaggcagctcgtacacgtccctcctccgcctttattccctcgatattgccagctccgcctcccggctcacccatgcgtcacacgtacccccatcttccacggcctccttcctgatgaccaaattaagcttccatttttttttaactccagtagagagatcacacgtacacaacccacagtctcgccgcggtataaatggcagggcaccccggccagctgctttgctgcatcgatcgacggctttgacacaagtcatcttactgatagcaacaacactagctggaacacttgggtacacgagttcagggatctagccagagctaattaagcggagagttattagcttttaatttgcttgagaggatggacaactaccaggggcagcacggctacggcgccgaccgcgtcgacgtgtacggcaacccggtcggcgccggccagtacggcggcggcgccaccgcgcccggcggaggccacggagcgatggggatgggaggtcatgccggcgccggcgccggcggccagttccagccggcgagggaggaccacaagaccggcggcatcctccaccgctccggcagctcaagctccagctcggtacgttcactgtcgtccattcataaatctaattaatcgcctcgcttctgaattcctttatttaatttgagttgtactcgtgtgcgtttgtgcagtcgtctgaggacgacgggatgggagggaggaggaagaagggaatcaaggagaagatcaaggagaagctgcccggcggcaacaagggcaacaaccaccagcagcagcagatgatggggaacactggcggcgcgtacgggcagcagggccacgccgggatgaccggcgccggcaccggcgtgcacggtgcggagtacggcaacgccggcgagaagaagggattcatggacaagatcaaggagaagctgcccggccagcactaaattaataagcttatataattgacagccggggcaacacgtcgtcatgtgtgtagtagtatctatcgttttaatctgcggaataaatgacgtgcactgcagtgtatagcgtcctcgaagagaatagtactactgtttgggcgttcgcacgtgttgggttgtacctatagcttgtgatgccattgcaagctttgtatggtgtgtgtgtacacaggtttttagtgaagtgtgtgactttgttttggaattttcatgtgaatttcgtaatattctacggtacgccatgcttcgagtcatcctttttgattggaactcccatgtgtaagtgtttcttgattataagattaatttggagcctatcactgtgctctctactactcttttctggtagtagaaattaagcaaaatgaactgtcgatttcgtctgattagatcatttgtactatctcttatactaacccaattagcaataacatgggtattattggaaaaggaaagtagtagaaatatggagggtattattgaaaaaagaaaatacgaaagggtataatcgctatttcgttatttatgtagtaactaaacctttttccctctctttttgcttttccgatgattttgcgatgaaatatgagtgatgctaaccatcatagaatcatagtgccaacacatctaccatagtttacacgaagctaaatctgtcgggagatctcgtcgatccctctcgataaggatctcgtcggtatcgcggctttatatgttctctttgtactctcatataaactggattagtgctattaccttacgtgggatctgaaccaatataatatctatttttctcggttttgatgtcgtatcgtgtagatcctcgtatcaacgtatctcaatacttttttatccggtctacggctatcccccgtcgacaagtaaataacaccagaccattgtactaatagcaccagaacatcgctctaagatttcttaacattctggatagaagttttcatatttttcacacattgattataattattgaatgtattcttattgtttcactatttttttaagggttgtatttggtattattcggttttaagtagtatctactttttatgtaaatattgcatggtatttttatgagctttatatttgttatgttttagtgattactatttgtttcgatttttacggagagaggtaaagagaatggaaggatgcatgtagctcagtcaagagcacgcatgatataattactgcttgttgtatttgggtatatccagttttaagtagtatgtagttcgtatgtacatattgcatgatatttttatgatctttatatttgttatgttttacggagaaagggaggtggagagaatggaagggtgcatataggtaatataagggcacgcatgatacaatagctgcttgcgaacgcagcagcgtacgtgtccaaccgtagtcatatctcgttttacaagaccatttctaccatatcatggttgatccgtatattttaatcaagatgttatttagatcaatcgaacttataaatcgcacagttaggttctaaatatatccatgatcctgatttaatgtgtcacatgtagtctaactcgtctttgatagatctaaggaccacgtgcacgtcttcacagtagtaaactcgtttgcatttaacccctccaaagctcacaatggcgaaaaaaattactcttagccccattgctctattttttttcagggagggtgtgaattttactggctaaatagagtgattacaatcccgtgggacaagatcatgaatacaagttggagcatcaagtcttcacaccgcattatgtctagtccttctggctaaccgagctagttcatgaggcactctattatcccatcttccaacatgatttagacagatcttaggaagtaaaccaacaaaactcttcgctttcaccaacaaggcacaccatctcgatttattttgcccaaggggcatgagtttaatcacttctgtgcaatcggtttcaaggacccacatgcacgtctccgcagtagtaaactcgtttgtatttaaccccttcaagttcacagtggcgaaaaaattacacttagccgctatgctctcaattcttgccaagccaacttctctctactctactctctctctctctctatcttttcctctattgaattagggagggaaagcgatagcaacgtaaaatccggtggggggggtagagagagggcacaaagagcaatgaagaggagggaggcgggcataatgggaaaaaaattctatccggcagtgccgcaccaagcctctcgtgcggcaccgcgcgaactagcgatgcgtgtccagctatcgcccgcgcgagccgcgtctattgcgatttcgttggagccgagccgatgcctatcgcgacgagtccaagccgcaagcccgcaccttgaagtcgaatcgtcgctctcatctgccgcttcgtgcgcccaccgcttgtttcatcagagcgacctatgatcttccttctttcttgttcataacaattgatcgatctagtgtgtttccttgcctgctgcaccgacgatcgagccatgtttgccgtctctgcttgacgattccgctcagagcatggacgaccctgccgtgcagccggccataggcggcaggacctcgtcgcatcccgtgctacgatcaaccctaacaccggagtcagatggcatcgtcgaaatctcaatgttggagccgtgttctgctgatgcaattgcccttcctttatcctcaattcctaccatcgagccaatggaagatgcttcaatgggttcagcagagccgatggaagatgcttcgataggttcagcaaccacaatagctccaacagaggtaaatagctccgaacaaactttcttgttcacaacaatctgatatattatcggtatatgtaattcgttcaaaattttcttattatactgttggtggataacatgaatggtcaatctgtaatagtacctcaagttggaatgtctttcaaatcagaaaatgatgcgtatgatatgtacaactcatatgccaggaaaattggttttagtattagaaagagcaccacaagattgagaccagtcaagactatataccagaagcatatagtttgcagtaaccaaggagaacgaggaaagcactcatcacatgtcacttcaaaagaaaatgctactacaaggacgtgttgcaatgctcgtgttcaattcagtataagtcgtgagggaatttggacagtgcaaaaggttgtcctcgagcacaatcactatcttgctagtccaaataagaaacacatgttgaggtcccaacgtgatagaggcggataaacttctaatcagtcaaatacgagaagctggaatacaaccagcccaagtgtatgagtttttcaagcaatggtatggaggagctgagaatgttccattctcgcggatggattgcaataatttgattggccgtgagcagaagaagtacttgccatccaatgatgcacaaacgctactggagtatttgaaaaacaagcagttagaggatcctactttttttatgccatacaagtagatcaggaggatggtcggatagctaatttcttttgggcagatggtcaagctatcatggattatgcatgctttggtgatgctatgtcatttgacaccacatttcagactaaaaagtttgaaatgccttttgctcccctccttggaaccaaccatcataagcagacaattatttttggggctgcactgttgtatagtgaaatgattgaatcatttgtttggcttttcaacacatttctaacagcaatgtcaggcaagcatcctagcacaattttcacagatcaatgtgctgccatggcagcagcagtaaggatagtatttcgaaacacaaggcaccgtctttgtatatggcacatttatcagaatgctgctaaacatcttagtcatgtaattgctgaccatcctcaatttcttgctgattttaagagttgtgtttacgaagaaaggtctgaggcatacttcgacaagaaatggaatgagttgttgagtagttataagcttgaggagaactcatggttgtagaacctatataagttgcgggttcattgggctgctgtctttcgtgattcttttactgctgatatgacctctactcaaaggagtgaaggtatgaacaatgttttcaagaaaaggtttcgtagaaagctttccctatctaaactcctagaagaatgcgacaagtgtgcaatgagtcttcgtgataatgagttggatgcagactacaaatcacgacactctacccctgtcacttatattcgagatttaccaatgctgaagactgcagctgagttgtatacaagaaggctttattcagaatttgaggaacactttaaagagcagttttctttctcatgtaaattcctgaaatctgaagggtcaatcatgacttataaggtgatgcctatggaattccaggaacaaaacaataacatgttcttgtcacatgtatgaatgcattggtatgtacaagcatttttcaattgcactatagttcacaatatattttgcttaaagtatttctacatgtttgacaggtatattgtgcaagcatgctctccgagtctttaatatcaatgaggttttcatctttccgaatctttaatatcaatgaggttttcatcttgccaactcagtatgtactaaatagatggacaaaatatgcaaaaagaggtttttattttgagaagaaacaaataagtgacaatgaaactttgagaacgcatgcagcgcgcatctctcggaaggcgacatctgttgcacagtatcaaaaagaacttcttgatgatatggaaaaagctatagacaagttggacctagaagcagataattcactgagcaaaatacacaccaaaacttatgaggtttctgaaagttctaatggatgtgttggagacatattaaaaggtaaagtatcaatcagagttcctcaggtcataaaaggtccaaagaataaaagatcaaaaactgtacttctaaagaagaaagggaagaaaggaaatgctgctaagaaaaaaggtagtgcttctcacttaaaaatatttttttacatctctcttgttagctagtaatattgattcccttttatatttgtaatctaaaggagaagatccaaagaaatcaacagacaatggagaaatgattcaagatccagatgaattgattgtaagattaatgatctggctttccttccaataattcatttagctgcacttggcctgaataatttcatttttttattagggctcttttgatgcaaacattgatgataatatgcatgaagatttttcaactatggttgctcctccgatccatggagaatatacaagtcttttgtttggactagatcaagatgccatggctgctcggaagttacattttgattaaataggaaattatggaacatgtaaggtgtagtcgtgctttggcaattatttattgacatgagactgtagttttgctgtgccagcagcctagaccttctttgtctctgcatctggatacccttttagcagcctgctgagagccttggtgctccttgtgattggtttgaaagctggaattctggaaaccccagcagtttgtattttccttttcccttttgtttctttaagtactgtatgaactcttatgctttcaagtaaaagctggaaggggtaaccgtcttttgtctaaaaaaacaagactgtagtttgccattccactgttttggaggtttataataagatgttgggctttattttgtggagatttcctatgttttggagatttataaccagatggatgcaaatcttgatgaaatctggaaatatgtattcatatgagatcactgtatccaatctgataagtagaaattacaatgtgctcattgacaactgtttacaacaccatatattcacagcatgcaagaccatttggtccagatttcagaagaaaaagacaaccaaaacaatgcccttcaggagtagtacaaggctataagctaatttagctatattggccatatgcacttcaagttccttatctgcagtggacactggacagactatcagagtctccagctcctcctttggcgctgctaccttccatttctcttttcctggagagataacagatgtgtagtaagtcactgttcgcagtaatattcagcaaattagcactgcaattttgaagagctttagtgaaacaacaaatattcagaaatagctccatctcccaagtggacaaaatatttgcagaaggttcagatagtgagtaatatgattatgtcgacagaaaacttctacaatttccagttgtgctagattattaagaaacactaattttacatccttcatgaacaccaatccgtacatgagagaaaactacgctaatgcatttaatcattccaaattttcaatcaagcaattagaatcgaattgcatattttcaaaaaacataccttcttgctggcctgcagctgctactgctccctgtagacctgctcactcctgcggcgctgctgctgctcggctgctcctgctcacgcgcagcgagctcccgcgccgccgccggactcctgctgcactgctgctccggctcacgtgctcccgcggcgccacgctgccaccggcctgctgctcgcggctcgcgcggccgctctgacgctccgttgtccgcctgcctgtcggctgccgcctcgcggccttgcgccaacgcgccgtcgcccgctgtaggggggactcaactccgaggagcagcagggcccttatagtgcgccgccaccgtttcagaagcaacagcagcagccgccgccggccgttgccatagcagatgagagcgacgattcgacttcaaggtgcgggcctgcggcttggactcggcgcgataggcgtcggctcggctccaacgaaatcgcgatagaccggcttgcgcgggcggcagctggacacgcgtcaccagctcgcgcggtgccgcacgagaggcttggtacggcactgccgcatagatttttttccggcataatgtggtgtcctaatttttataatcaccatcaaagcttgtagtagtaggctggaaacacctatagtatgggtgtcattactttaataattattattatgatcactgttctagagagtcgaagtaatgtaatcgatttgggagtaccgtatgtaagaaactaattaaatacagatttgttaccatggtgggttaggtaggggcagaatataaacgctttataagatgttcttttgattttgataaggttaaaatttgaagattttaaccatggatcagtacacatccaaatataatttacaaatagaaatttataagagttatagacataactttatattccccgtaattattgatttcataccggtgacaatatattttaagccaaaataagggttacaaaaggtgaactgtgggagcatgtgccgttttctaattctagatagagcccgaggtaaacacatacgtggcggccggtggccgcatggcgtcaccgacccggcgcgctacacgcacacgtccttgctccgcctttattcccttctacgcaccagctccgcctcctggctcaccccatgcacgtacacgtacccccctcttccgtacccttcctgacctacacttcggtttttttatgtacttctccaacctccaagatcagtataaatggcacgtacgctacccttctgttcccctgcatcgatcacaagacacaagatttttcactgatagaatagcaacacttgggtgagagatcagacgcgtgtttgagaagatggagaactaccaggggcagcacggctacggcgccgaccgcgtcgacgtgtacggcaacccggtcgccggccagtacggcggcggcgccaccgctcccggcggaggccatggcgtgatgggaatgggagggcatcacgccggcgccggcgggcagttccagccggtgaaggaggagcacaagaccggcggcatcctccaccgctccggcagctcaagctccagctcggtacgttcactgtcgtccattcataaatctaattaatcgcctcgcttctgaattcctttatttaatttgagttgtactcgtgtgcgtttgtgcagtcgtctgaggacgacgggatgggagggaggaggaagaagggaatcaaggagaagatcaaggagaagctccccggcggcaacaagggcaacaaccagcagcagcagcagatgatggggaacaccggcggcgcgtacgggcagcaggggcacgccgggatgaccggcgccggcaccggcaccggcgtgcacggtgcggagtacggcaacaccggcgagaagaagggcttcatggacaagatcaaggaaaagcttcccggccagcactaaataagctcgaccgggtcgtcaccaaatatgtcgtgatgtacgtgcagttttatatgttgttgaataaactagcgtgaaatgcgagtgatggtgtcttctgccttgggacggatgacacattgtctgttgtgttctcgcgtccgtgtcggttttacccttgaaatgtaatatggtgtgtgtacacactaaggttttattgaagtgtgactttgtgcttgtgttatttggccgtacgtctgtggtgcttgaaagtagtttttcttccattgaaatttctaagagtacttgactctacaacttttctttgaggggtacttaactgtacaactagagatgagtaatttggccgtttcctcgcagttagattcggccagtggcccgagttgattcgttaaggagggacagttaactttgagtgcaaacattcagggaagcggaaacatggagcgcttattcagagcattggattagagatgagaatgagaatgaaaaagggtgataatagaactggttgggagggatgctccagcaggcctcacaaatcgtacacgacaatgtgtattaaaccaaagcgtccaaattcaaataaaaacactatgctaagattttgttaatagtgtggtaaatgaaggcattcaggatagctcataacactgtgtagggtcggattgtaatcaaacaggagaaggtatctgagaaaccgcattttcaggtgccctgtttggatgcttggcctgtgtggcgcagccagagccccatgggcttctttagttgccgaaaaatcatgggcttctttagttgcccagaaattttcgcccctcatgttacatcgaatatacggattcacatttaaaacattaaatatagtctaataataaaataaattacagattttgtcagggaatacgtacggattcacatttaaaatattaaatgtagtgtaataataaaataaattacagatttcaccaggaaatacaagacgaatttattaaacctaattaattcatcattaataaatgtttaccgtagcattatattgttaaatcgtaacgcaattaggcttaaaagatccgtctcgtaattttcccgtgaactatgtaattggtttttttctacatttaaaacttcctacatacatgtgtccaaatttttaatgcgacatcgtcaaattttgtttggaaactgttgcgtgctgccgtagccacagctgcagaaccacctacgatctcctctctggaaaagcgactctagggtgaaaaagaacttctctccggccccttcatttgaatgtgcggtgacattcaggtcgctgccttgagttgaggcggttcggcttcttctcgctgttttagttccaacttttttcttcaaactttcaactttttcatcgcatcaaaatttttctttttttgataatgtaaatgtgttatatctccagcctctgcccgtaggcacacagccaaaaaattcagacgtgaacagaaaagttaaaaaaggcgagatgggacaaactcccaacttctgccgatgatatgatctactaaaataatattttttttcaaaatcacgtagattctattatgaaattctgtaggtactacgccatccaaaatggaataaaagttcattggctactaattccaagcgtgtagcaccattgcgcatagtatcctgttgttcctgtgaaagcatcatacaccaagagtggagccaattggaacacatgaagataatctgcatgatggtaggcatttttttatggttaaaaactatatcattacggcaacgccaaattgaccaacataaagcactagctccaaacaaaatcatttttttgtaggtctaggcactccccttagccagtcaccaaaaatatcttttgcattgtggggaggggggatgttgaaggcaaagaagacacatcgccaagcaaaacgtgcaacatgacagtcaaagaaaagatgttggatggtctcttgtgtgttacaaaaacaacattgcttgtttcccctccaatttctctttatgagattatcttttgtcaagattactttttttgaagaaaccacataaatactttgatttttagtagtacctttacctcccataagatcctcttgtggattcttatattggaattgatgatcgcattatacatggatttgaccgaaaaatggccatttttatgtagcgaccaaataaagcaatccttttcatttgacagggttatgttagctagtcgagagattagatcgttccactcaactaactttggtcctacaattgatcgtcagaatgaaacattcaacggtgttgtgctcataacctctgccaaagtagaatgtctttttcggaccacattgtacagaaaaggatattgatatttgagaggttgcaagcccaaccatgtgtcttcccaaaatcttatttccatcccattaccaggtttaaaacatccatactgaaaaaattgatcttttactttcattaggccagcccaaaattgggatgttcctggtttgtgtgacatgtgggagaggggtttaccccttaagtacttgttgcgcaaaaggttttgccataggccatcaccattaagaagcttgaatagccatttgctcaacaaacatctattcatgatatcaagatttaggacacccagtccaccttgatcttttggccagcatatataatcccattttgttaacctatatttctttttctagctatcactgctccagaaaaagctcgatcggtagtaatccagtctttgaagtacacctcgaggtatttcaaaaaaaagataacatgaacatgggaagactcgaaagaaccgagttaagaagaaccaatctcccaccataggagctgtttttgcccttccatgtgctaagttttctttgaaacctatcctccacacatttccaatcagaatttctaagttttcgatagtgtatggggattcctaagtatttgaatggaaaggaaccaaagttacaaccaaacagttgtctatattggtcctccatttccttggctcccccaaagaagaaaatttcacttttatgaaagtttattttcagccccgagagatgttcaaacacacaaagaatggctttcatgttttttgcttgttcaaaatcatgttcaagaaatattattgtattgtcggcatattggagaatggacaaaccatcatccactaagtgtggaattacccctctaatttggccatcgactttggctctttcaataagaatggctaacatatcagccactatgttaaaaagaattggggacattggatccccttgtctcaagcctttgcatgtccggaaatttttttctacattatcattgactttgacacttacagttcctccttcaacccagttggaaatccaattgcaccacgattgtgaaaaccctttcattcgtaatgtctgctgaaggaactgccatttaactttgtcataagccttttcaaagtcaattttgaatatgataccatccattttctttgtgtgtaactcatggatagtctcatgcaaaatcaccaccccttccatgatatttctatttggcaaaaacgctgtttgggttgggcgaatgactttgtgagcaaccgttgtaatcctattagtgccaacttttgtaaaaattttaaagctgacattcagtaggcaaataggcctatattgttgaattttgatttgcatcagccttttttggcagtagcacgatgatcctaaagtttaggttataaagggataatgtccctttatgaaattctctaaatagagccatgagatcattcttaacaatctcccaaaagacctgataaaactctgcaggaaagccatctggacctggggaggagttatgatccatttgaaaaattgcctttttgacttccttttctgaaaattcaatagtaaggatgtcattttccaagtcggacacttgaggaatatcatcagtccatccctctatcatggatacatgattatgatctggaggaccaaataatcctttataataattggtaatgtattctttgagattcccctcacccgttattatagtgtcctcttgttccaactggaaaatcatctgcttacaatgtttaccattggctatcaagtgataatatttagtattactatcccccttggagtaaatgatttgtcttagatcgctggtaccaatacaactcttcctcccttaacagttttgccaaatcatttttggcctgcttcaacgaagctaactctgtgttggagagagttatgtgttcggcttttttgtttagtgtgtcaattaaagctaaaagctttattttttgttttttatatgtgccacttaaacttcgcgcccaacctcttaaatgttgcctaaggtggacgatcttgtgtttccaacgttccataggattctttcccttgtttacgctttgccactctttggctaccatctcaaagaatccatcccgctctagccagcctaattcaaaacgaaatggcggctgattgccgaaatgtgcatgcgagccggatctcagtataattggagagtggtctgaaatggctcgaggtaaggcttgacacgtaactaaaggatatttttgctcccagtcagtgttcattaacactctatccaacttctcataagttggattttcgaggttattggcccaggtgaattgtctccccgaaagatcaatctctctcaaattgagactattgatgaccgcattaaaaagaaaaggccaacgagggtcaaaagaattattattcttttcttcgggtgatctaatgatattaaagtccccctaccaatagagggtatgactccttaccacaagtctgagctagttccgtcaaaaattgttcttttaactcgggttgagcaacaccatatactgccattaaaacccatttgaaaccatcctctttatttcttagaagaaacttcacatagaagtccccttctgaaatttcacctatatcaaaaacatttaaatttactcctaaaagtattcctcctgattgcttgataggaggtttctcatgccaaagaaaatcttttccaccacaaaggtttttaagatttgaagggggtgaatgatggttttctagtctcaagaatagcaataaaatccaaattttgctccttaacacattcagatataaatctaaatttagatgcatcaccaaagccacaactattccaaaatattcctttcatttcttaaacttattagctttcttttttgaccagtcaaaagaggacataccactttatgtttgattttggtcaaaatcttcctcatttgaggtatggcctgagatacataaatttttaactttttatttaatcattctaattttcaacaaaacttttaattttggttaaacacacccttaagttgattgtttctcgtggtcaagtctaatcatctatttttttcccattttttcctgggctggccggagtccggcaaccatgtcccggcgacggtgtagctgcgttgtggttgcacactgttgcatgttcaggacgcccatcgacgcagcgatttgagtggaggaagtaatcaaatttagccagaaaacttatcaaaaaccgatttataaaatttaggcattgtttagtttctaaattttttttcacaaaaatatcacattgaatctttagacatatgtatggagcactaaatatacataaaatgaaaaactaattgcacagtttgcatgaaaatcacgagacgaatcttttgagcctaattagaccatgattagccataagtgctacagtaacccacgtgtgctaacgacggattaattaggcttaataaattcgtcggtttctaggtaagttttgaaattagtttttttatacgtgttccttccaatatctgattaattatccgatatgacacacatgaactttcttttcgcgaaataaatggaggaagtacgtttctagtgtttccagaaaaagtactagtttgacttgtcaacatgaagtaagtatcaacgaaactagtggttgcaatgccgtcgacgcttagaaaaagtactactagacgcagaataaaggagggaacgtccggaaatccacgtcgcactcctggacacttgaatcagtggcaaccatcgtttctattattgtaatccagatcccacacactattaattactcgtacatcatattatctatccattacttccgttgtgtctcatcccttccagagaattcgcatgctgaccgtgtacgtacgtggcgccgcgctgatcgacatgcatcctctcgctgatcatgctcgatcagcattgtttagctttacgcccacctggatcacaatgtgccgtgctgtcctcgtctctgacatgatccggttgcaatattttatccctcgccggagcagcataaatacccagcaaaaccttgcagtaatcggaatccattcagtgccaatcaggtaatcagtgtgagagtcttttcaaagcgaaggagcaaattagcttttgtgttgtagatcgagcaggctaggtatagcgagaatggagtaccaggggcagcatggtggccacgccagcagccgcgccgacgagcacggcaaccctgcagtgaccaccggaaacgcacccaccgggatgggcgccggccacatccaggagccggcgagggaggacaagaagaccgacggcgtcctccgccgctccggcagctccagctccagctcatccgtacgtcgtcttcctcccaagtttattgtattttttcggtttgatttcagaactgttcggattgtagccacttttatccatttcaatatttgatagtgtcaaattttgacatattttggtactaccaaattttaataatcttggttgtatttagtttaatatcttaccaaaagataatagaattttaatttaagaatgaaaaattctaaaattaccaaagtttggcaggatagcattagcacgaaggtatttggtttagtgtctttccaaaatttaacaatgctaaaattttatatggttaaaattggtaataaagtgaacaaacctttcgtactcatggtctgaataatgaaacatatatactgccaattgctgaccaatttgcagtctgaggacgatgggatgggaggaaggaggaagaaggggatcaaggagaagatcaaggagaagctccccggcggcaacaagggcaacaaccagcagcagcagcaggagcacaccacaacaacgaccggcggcgcgtacgggccgcagggccacgataccaagatcgccaccggcgcacacggcggcaccgccgccaccaccgcggacgccggcggcgagaagaagggcatcgtggacaagatcaaggagaagctccccggccagcactgagctgctgcatgccatgtgtgtgatcggtgtttcgatccgacgatcgacttcgatcacaaacaacgaaggatctccctcctgaagaataataatattgtgtgtccttgtatatctgtgtgtgtgttccgggtaaacaataaagtcgtgatgcagccacggcatgtgtgcgtacgtgtacgtagcactgtatgtaagtgcgcgtgtggtatatggcgtgttggttaattttcgtatattatttggctcaaattatatattttaaacatctatgtgaaatctgtttatcgtgacaaacggggctacctatagatttctagtttcgaatctagaacatttttcaatcaatgaatgtagcctattttaaatgaaaaaaaaacaatcatgtcaaaaatcatcaatctagagaaagaaacggttgtcaaatttggttgtcaaatttagttttgttgacggagtgtaaatgagtgtaactataaattgaaaatatataataacacgaatcttggtgtaagatctcgtagacgaaaaattaagagataaaaacgtagaaatttatcgcaagtgaaacagaaaaaccgcttacatattaagcagcacctccccgtgatcgtaaaatactactcctttctcataaaaaccaggactgaaatgcttcctatccctccgtttcatattataggactttctagcattgcccacattcactttaaaggaataaattcactttaaatctctcatttatcgaagagtctaaattagtccataaacgttactaccagatataatgcgtctttaagtcctaaaattagtataaataaggtcttaaaatagtttggacagtggtttcgattgacatggcgcttacgtcacaataacgtgacacttaaaatcataaaaaaacagtgtgacccacatgtcaatgagtgttatgttaaaaataaaaaaaattgcactggggacccatatcacccccttcccctcttctctcccttcctcataaatctttctttacttgtcatctacgatgcactccgattctgtggcactgacggtattgatgagaggcagggcgtcagcatgggaggggggggggagttgctagtggcgcacggggccacaggacgtaggtggcggcggtgtggacaagtgtgtcatcatcggcggaggagagtgttggcagcgcgggagcatttcctgtggccgcgtgcctcattcccatttcttccccccgcgcccgtgtcggagttgtaggtggacaacgatggcgcgggggagcatttcctcactcccgctcgccggctggctagatccttctcgtgtgctcagccgtctgatgagcttctcgtcctgcgcgtcgggcgccgactaagtcctcctcgcatggatgactcctttcgtctttgtcctagtgctgcggcacgctgagcaggccatgttctcagagaaacaatggtaataaaatgtggtctaaagtgagatttactcatttaaaaacaaaacttcacaaattgacgtaatactactgatttacatatacaacttctaagaatattgaatgatatttgtttggtggtgtgcacagtgtgtgcaagtgaaggcttcattgtatagaatacttctatttgacattaataactccacaaattgttcataatgtcctatgatgatcatcattatcatcattaattactattattattattattatcattattttctgaacaatttaaattatagtagagttgtcctcctcccacactatcgttgatcccccacggcccacactaagaaaataaccttttccctattgatcactaaaaaaaccattgttttacgcgaaaatcaatcctcagaaaaaatggatacaaaaaactgaaccccataatttccgaaccaatatcatacagtatgaaactagccacaactcattttctcaaggattaatctcaacaacctgaagtcatatttcaatttgggttttgtcctactcagcacgaagattttctagcagtattgtcttactcaatctcatctctgaattgactacacgagtcctaaaccaccaaattacaagatcccaccgaataaaccaacttgcaaaatcttgtccaagaaaatgtaaggcgctgtcatttgagtcaaaatgagcagttgaatcgatgcactgaacaataaaacaaatgagcagtgagtgattaatcacctcaaacaaattcaataccaagtacacgttgttgaggcagtgagctggacggagtggcagagaacggcgatgatgcagatgaggtgaacgacgacggccgcggcagcaccaaggacggccggccggccggcaatgccctcaacggaggaccggcggcgccctagatcaacaggatgccgcagcctggacggaggtggtggcggaggcggagcaggacgacgtcttcgaccgaagcagctggggaacccgcagccccacaccctagaatagcggcacccaggcgaggattccaagcgcggcgttgtggcgagtggggagaaaaagaagacgacagtgtgagtgtggagtggggaaaaaaaagcgcggatgaagaaaaaaaaatggcgcgaggctgccgagattggcgcgaggctgctgagtttcccaaaacctgattcggattgacaccgtttttgggcaagagttaattttaggttcactttgggctatctgttggagggcttcttttttttttcaaattaccaaaatttgtcttttgggaatccttttggccttatcttggagatgctcttacaacgcacgggcttggcacactaaggagttttacgtactaaggagagagagcaaaaatctgaaaacgcttggttaaacgcaagagctactccctcttttacatatatatatatatatatatatatatatatatatatatatatatatatatatatatatatatatatatatatatatatatatatatatatgttaaatgtgggcaatattaaaaagtcttataatatgaaacggaggaagtagtacatacgtggcaaatggcagattccctctagcgcactatataaaccaatcaccgagatagaggtagatgcactcgagcactgttctctttctcttcctcggacaaaaccctctctattcctgagctacccactatttctccagttctgttcacctgcgcgcacgggtgacaggatgagcagcaggccttcggaactccatccgcttgcgtacctgtacgggtaggcgggcgatcaaattttcgtggagcgtctcggcgtgactacattgcgactcttctttctctgcatcgcgatggcttccattggagagaacagtggcatagcaggtgctggagggaacggcggcgtttcaggagaaggagggaacggcagtgctccaggagataacaccaacggaggcaatactaatgcctcaacctcctctgcaccattttcctggtatatagctctatctctaattgatgttctttcagttatttatatgttcatcgtgctatcctcaggattacaatcctatgtgaatgttgatgatgtttgtgcttatgttgccaaaagcatgctattgtgaatgtcatgtttattatcttgttattatgccgaattatggccaaatttccaacattatatattctgtcttgatccaacaaatgcaatggcgcctagcctggcaaagatggaggcctgcttgaggcatgacactggctggcctagtggataactatgtcgaagcccattagcttagaagcagcgtttggaggcagcggtcgcctccctcactacatttccctctccctgatggctagcttgccgggtcaagctaactggaggccgaggaacacgggaccggccgcctccaaccccaccaccccacatatctctgctgccaattgccccctcaatgtccatgccaagaagaagctctcaatcgcctacaccactctcaggggctgccacaagctccccatgcccagacctggccactcgatgttcggggccaccatgagcttgggcgtggtggcatctggccagtgtggcttgaaggagatgatggatgcagcagcaacttgagggagatcaatgacaacgccgttgtctctgctgggacggcagtggtgaatccaatatggtgttggtgttcttgttctgttgaatgtgtagcttttgtccatggcagcacgattttgatctgtgatgtgggtgttccagtagtgttgatgatatttgctggataattgaatgaatgtgaatagcttgttcttggtctgtgttgaccgtccgtagcgaacagtttcgaccgtcaatattaccaaaatagaggaagactagttatgccttgcgatgcata

SEQ ID NO: 28765 - DNA, 2738 bp, Oryza sativa
accaagcagaggttggtaatcgctcggttaaacgcatgaacgaccacgtcgttcacatatatacgtgccgatgaaccttttcttgaggcaatcccaaacctccctggtcgcaacctacatgtggagaacctctaggagcatctgaaaaagatggaacttgtacttctttgtgcggcgacgccctcctaccgttcaccttgccaccggtttgatcgcctccaagatgcctttatcttccatcatcacttgcacctaaaaagtaccctgctagtctagtacactgtcatcagatgaggatagtggaaggcactccctgtgctcccactagccacgtccgatgtcacgatcgatatagctctgataccacttcttggcgtaggttctcaatcaaacaccttgatggcctactgtagctaatccggcatggcacgactcacatagctaaaaaaaacagagctaagaacatgagtacgctaaagagatttgtgaggcaattttctggtttatgatagtgcttatatttctcgatgcaaaatcattgataacataggcatataaattggatccaacatagccttttctatacaaaatggtggctaggctattgaatctttcttgtgacattgctgatctcatatagtttttcaataatctcaactctgaaaagattctttcaaacaaatatttctaggcaaagatgacagtggatatggattaaggaacaaataacctggaatcaagaattgaccttcagatgtagcaagttcagccggatatctagaataagaaccaacacatcacagactgttggaatttcctaacgatattactagaaatataattcccagcaatggcgcagaaatactcctgatatattatggttacagagttcatccgcaagcgcacggatataccattgtagcatttcacccgagagtattcgaagggtatcatatttgtttaatcctgtggaaagatcatagtagagagaaccggactaataatttatatattacttgtcataatcatagtctaagcaggggttaagataaatcaaagggtagattgacacacaagcagcgagctactcattctcatactaaaacatctaagctaagtggaaagaaaatataaagagaatatattcctatacttctaatatacatagtatacatacattctacttatctaattaactagctaataccctctttctgatgccctcctagtacttcgagaagccacccctgcctgccaagtttcttacgacagcccgtcataaccatacaaccggggctaaatacggaggagtaccctccccaaaaaattaacttaggactatatacatgcaggaaggaatacctgtactaagctgtcaccatcagtggcccacctctcatccacagcatataaccccaaataatgatatcccgtaatctagacaccacacataaactaccagatactaatctaatatcatcgtcatgacatagagtaattgcataagtaaacattatactcgtaccgatgtatctcccaaataagctagcggtataatcagtataacatgatcatactgtaaagttggcattcatacactcggaaagtatttcaataccataaatgtataaagaatagtattctaataaaagtacaaagcttacaaaagaggaaaggagagctactagagccatacccgaactcttccgaaggcttccggactccgatttctactctattcctactccattagcttaagactactaaactaaacttgagagaatatgaaagagctttgcttgaggtgtgtgttgaaatggagagagtgagctccttaaataggcaggtaatgacagttatggtggttggaatggtcgaaaataccctccaaccaccatagggagtgaatctccaccgttcccccaaaaccctgaatccatcagcactggcattggttcggccgaaccccctggttcggccggaccctaggctggcccaaccatcccacaagttggctggtggcctcctggacttctcctctccgcagacttgtgaattttggcccaattggtcgtgtcatttctatgttcttggccctttcatacacaagtctgattctcgacatcgtccgattgatttatcgtctgatttgatattgattcttctccactttatagttattctctggaaaaggttagtgaaccaaatactagtggaatattattattctaacacaaatatgcatcgcaagcataactagttctcctctattttggtaatattgacggtcgaaactgatcgctaacgaccgtcaacacagaccaagaacaagctactcacattcattcaattatacaacaaatatcatcaacactactggaacaaccacatcacagatcaaaatcgtgctgccatggacaaaagctacacattcaacagaacaagaacaccaacacccattattgggattttcaaaccccaacctttgggccccccggggttttccccccccccccccaaaagagggccccccccaaaggggggaaaaaaagggaaacaacggcgttgtcattgatctccctcaagttgctgctgcatccatcatcttccttcaagccacactggccagatgccaccacgcccaagctcatggtgggccccgaacatcgagtggccaggtctgggcatggggagcttgtggcaccccctgaaagtggtgtaggcaaatgggaagcttt

SEQ ID NO: 28766 - DNA, 9818 bp, Oryza sativa
  unsure (1)..(9818): unsure at all n locations
caaccagcccgaatatggtaacagggtaaaacaaaagcccaaggggccacacccaataatgtgcctggtgatcacttgtatcaccgggtcagcaagaaaagctaataaatgattggcctcttgtttcaatcatatatgttttgatcatctgccctctgtaaaaaaagtttcttgatcagtagtggtgatggcgtgaagttacaaaatagatagagtcacctaccagtaatatttctctgcaatttgttgatatgctttgaaatacattcttctataaaaatgtaaatttttttgataaaaaaatattaattctgacacaaatattaatatattccagaaaaactgacaacggttggaaataccaccacaaccattcttgcttacatttacctactattttttatagcgtggcaaaccttcatgcatgttctactctttggcgtgacggcttgccacctataaaaaaactattttgtcctaaattattcttgtagttcgtaaataacaaaatattattttgcactattgtagatattgctgtagtgacctttcctatagtatttgttcgtgagaaacctatatgatataaatgtgccaatgtaccgacaatgtcaatgtgatacgtcatgccatacagagtgtttctaactaattcaaatgcgacatagtttatctggcacgccatgccacacatagtgtttataactgattcatataaaccatattccattcaattaaaagtttataacaaaaatatgtacaagaatgtgacatacatccatttatatcctcattaatgtggagattatgggtatcccatacccacacggcatggttatccgactagttataggggataacttatatctatggaatatgtaacagatcatgacttgggtattacgtttccttgtatattacggaacggcctaaagtcctggtttgataagattgtaaagtagatttaggaaaccgataccgtattggttaaggtttctatcttataatcctgcccccatcctgtataaggtgggcaggaggccctctagggggcatgagacaacctgattgtcagatcaatacacacccggcggattcaaatccccaaacaggagtagggtattacctctcattgagagggcctgaacctgtctaaatccttgtctctgcatccatccacttttaggtctcgtgcgctaccccttgtctctgccaaattcatgtttcgacagttggcgcaccaggtaggggttgcgtcaaattacccgtcgaaaagtgcgatggaatcaactccatgagtcgccggcttcgtcttcgcttcgggattgtcgcttcctcgtcgccgacgacttcaacaagctctcgttctctgacttggattcaaaccagtcaggagagattcaatctaactaagaaggagatgccacttttaggagttatctccctgacgaggcctcatcagttccgcccgaccggagaacgccgccgccgccgacacgcgaagagggagatcgtgtgctgcatgtgcctacaacggtgtcagcggtggcctcgcatcgcgctcgcgatagtgctcgtggtgacctcacgctggtgtcgcaaggcagcaagaccgatctctccctgatggtgtcctcggatactccaatctatcatcattagattgatttctaatcagattaatttgctctgttgtgctttctctgtttttgcatgtactggtgacgagacgggcagcatccaactgaggtcatctttgccatgtattaatccatgcgtgtgttgctggattaatgccggccaaatctccagtcagtcatgctattggcaaacgaaccaacatgcatactgcatatatgcaccgacatgtgcattatacctaattgctaattagatttatttataattgcaacttaactgaagcttgtgttggctattttgtttgcatgtttggagattccacacgcctgggggctgcgggccagcaccgcctttgcgtgcctaacgcggcccgactgctcctagggcacgcacgacctggatgcgatgccgcacgtcgggggcttcggtcttcgcccggccaacacagccagactacgccgcttccgccgtgggctcggggctttcgcctttgtgcgccgccgcctcatccgctgccgattggtgtttccgcctgcacagttggcctattatgccgtcgtttatgggcgtccacgtcttcactgaccggctggcattcgtcaccgctgactggtgttctcgcctacatggttggttggtcacaccactgttcatgggcgtccatgtcttcaccgaccggctggatttcaccgccgccgactggtgtctccgcctacacggctggcctattatgccgtcattgttgggcgtctacgacttcaccgtcggcctgccttcgtcgccgccgactggtgtcctcgcctatacggttggttggtcacaccaccgttcatgggcgtccacgtcttcaccaaccggctggatttcaccgccgtcgactggtgtctccgcctacatggctggcctatgatgccgccgttgttgggcgtctacgacttcaccgtcggcctgccttcatcgccgccgactggtgtccttgtctatacggttggttggtcacaccaccgttcatcggcgtccacgtcttcaccgaccggcttgcctttgccgccgccgactgttgtctctgcctatacggctggcctattatgccactgttggtgggcatcttcgctttcaccatcgactgccttcgtcgccgccgactggtgtcttcattgttattgatggacgacttcgttcccacatcggctacttctattgtcaccaagggaatacgaaaaagctaagtcatcattaattttctttatatgatattttccttttcctctgcctcatgacatcaactggttcgccgttgactagtgagtcgagggctacagatgttatatcatatttttttcaacaatttttataatatttatcttgatagctcgcgacataatctgagtacaaaagtgcctatcgagttatggagtttaatctttctatgctttccgtttggtttaccaatggatagttgtctttaggccgattcctagcacctgggggctcgttggatggaccgaataacacaaggtgctaagtattaatcggaataaatcaaaagcatatagataagataattaattttctgctctttacaattgcaaaagtacccgagtagtaaattctgattcgtgaaactttgttccattaatgacgaactcatgtcactcatatgcatgtttgggaagtgcctaggccgactcccgatgcttgggggctatgactagtcggacagagtgtttaaatgtacggagtcatctgctcagggaaatcaaaattgacaagaggagaaatacatatttataaatattttaaaatacttgaatttttctcgagtattatatttacatcagatactactcatcctatatgtttgttctgcaggatccagatccagatatgcataaaagggattcatggctttaagcttatctcttacgctccaggaatggatcagtcagaatatcaccaccggcttgccgtcgtcgccgccgactggggtcttcacctatacggttggttggtcgcaacactattgttaggcgtctacatcttcaccaccggcttgctttcgccaccgccgactgctgtcactgcctacatggctggcctattatgccgttgttgttgggcgtctacgtcttcaccgaccggccgcctcgtccgtcgctgactggtgtttccgcctgcacggctggcctgttatgacgccaactgatgctatcttcttcacggctggctacgtcgtcgtcaccgctaataggcgtcatcatcttcaacgcaagctgcctacgtctgctgctgactagtgccgtcacctctacggctggtttataccgctaccactattgatggacgtcatcgtcttcattgctggtcgccttgtctgacgcagactggcttgttcgcctccatgcctgcacgttttcgtcatcattgactggcattatcgtcatcgccggttttccttcgtcgctgctcatggtgtctttactttcatggttggcctattttgtcgccgttcaaggacgtcttcattttcgtcatcattctacttcttccatcgccgacaggttatgccgccaccgactaatgtttttatcttcacaactacgcgtcttcgctaccggtttgcttctgttgccgccgactcgtgttcacttcatcacagctatgcaactttgtcatcatggtggagcgacttcatttttattatcttcagcaccggcaaactctattgccgctacttcacaagttttgctacttcaccaaccacgacgtctacaagagcttcgacatctcagcatgcgtcaccaaatatgatgccgtgttattttactacaacaagtggtgttccaatcttcaatatttctactcggatatcttcaacatgcatcttcactcaagcaatgactactcgacgacaagaagctatagcttttgactctatgttcagttgtttcccaactaaccaaagagtcgggggctacacaaatacacggctcaaaattcgataggttttatgtcaagatgaagaaatcaacaaatcagccaatgagttctatggaatctacttcgggagtcatcggtttcatcttcgcttcagagcagacgttctacttcagcaactcttattatttcaccggcaatttttggtttctacacgccgctacaatctactccaaatttctcaattgtcaagtttgagatttaatctacatgttcgggagttggacaattatcaaccaatcagctcagttttaacgagttggacaacagcatatactttcctctaagtgaagcatctgcaacagctatagcaccaagttctactgccatcttcataaatcaagcggcattgcatcaatctttgtcatagacatgctcatgtcaagaaaactattcgagcttcgccatcttctcaacaatttgaaggattattgtcactgacatcatcaccaacacctctacttcatcggccctgacatctccgccgttgctaagggcagctgtttcgtctgtctccgactgattatttcgtcaccaaggctacaaaactctatcgctattgctgggtgccttcatcttcactgctagttgatctgactgctgcctactggtttcttcgcttccatgccgattgcatcagctataaccgatgaacaatttcaattactccaaaaagataagctatatgctcaggggcttacgagctcaagcacaagaatcataccttcaagttggattttgttctagatacaggcaacatgcactcgtattcctgagattatttcctatgctcgaagactggaccaatcattattccccgtaagggctgtcaaccgaatacttgcgccagtcgggattcaatttttatatctattttggagtatcccataagggataatcactcatatcagaagcaattcatatgagctacacttggtctatattacccggaagatttattactcgggagcatgttacatgcgtcatcctttaaagggtgtcgaaggcatattttttggcctaggcctaatatatctgcagcccatattttcaggtgtggcctgtcacgttcttttagggacttaggcactttttgcttaggccaaagtgcgtgtgattatgtgcccaataccttaaaatccttttatactgcagttactcaattttttaggagttggtacaatgcattttaaaaggtgcccaatagtgaagtttttcatagctgccccgctgacttttttatatagtcaaggcactgtttgggttttttaagcaattgattagatacaatatcattgctttttgccacgtaagtgtgcatttttattgcccaatattatggcttaggctgattatatatcttggttattttccaggtgattggtaaatcctttatgagtttatttactcggattttataccacatatgccatatatttccgggtgtgttgaaaccatgtgtcttttagggacttaagcacatctgttaaagcagtgtgcgcatggcgtatgcccaatactttggaaatttctttattaacagcatttaagcttctttatagctgttttactatgtgaattttcaatgatgtagttagggatgaaaacggtcggaaacgatcggaaaacagcctcaaccatttccgtaaccatatttttctcggaaacgaaatcggaaacggtaaagtcgaaaccaaaaacgatatcagaaatatcgaaaaaccgaaaacggaacaatacggacggaaacatatcggtacagatcggaaaccggtaacaaatacggaaacattaaactataaaaacatatatttaactttacataagtatattatatatatacataaattcaagcttatactatataaattataaattaacttcattttagccatgtacaaaagttagagattttattgaagagtcactcaatctataagctgtgggtcaagtatagacatgccctataaatatcgacatatttagaatacggtaattaccatattataagaaacggtaatttccgcaagaatacggtaaatacggaaacgatcggtataacagtaaaaccatttccgttttcatttccatattttttaccatttccatttctgtttcggtcgattaccatttccatatggctcggccggtagaaagtcaaaaaggaacaccggtcggccggtaattaccgttaccgttttcacccctagatgtagacaactttaggttgcacgcatcatattttacaaatcagtcggtatatcacctggatcatgttattcggggattcacaccgcatatgctatatattaatatcatgtcacttggttgactataattattaaaaaccactcagttggttggattatttattccttgactatatgcttagtttgttcaactaaccacatagtcgggggctacacctattaggtgcatctattcgatgcacctggttttatttttcagccctctacaatcttcatatttggtaaaagtactcaggagaccatggcaaagatgattgaagcacttggctttggagtaatctggttcgagagaagattatcttttcgactgtgaagatctcaggggttactgtggagattatgggtaccccatacccacacggcatggttatccgactagttataggggataacttatatctatggaatatgtaacagatcatagcttgggtattacgtttccttgtatattacggaatggcctaaagtcctggtttgataagattgtaaagtagatttaggaaaccgataccgtattggttaaggtttctatcttgtaatcttgtcccccatcttatataaggtgggcaggaggccctctagggggcatgagacaacctgatcgtcagatcaatacacacccggcggattcaaatctccaaacaggagtaaggttacctctcattgagaggacctaaacctgtctaaatccttgtctctgcatccattttaggtctcgtgcgctaccccttttattattgccgaaatcatgtttcgacaattaatatggactaaaaaaacttaaaaatatggcacgagcgaatggacaaactctgtccactcttactatcaatagactaaagtgacgtagtaggggaaaggagagcagggcagtgacctagagtttctcggttgtttttgaagctctaattaaaaaagagtgaagaataagttgtacaacatttttcttggaaccgaaagaaaaaaaagtatggaaacaatatgaagttggtaagtgctttctttttactatgtcagatagtgtatatatatacatacatacatatatatatatatatatatatatatatatatatatatatatatatatatataaaactagtcactaaatccattttgtaataattaaaattcaataaatatttgttctaccaaaattattatactcatacaatataccccatcaaagatatcaatgattttgagagcaacccattcatcaaccaaaatatatacttttatttgggaaacaaccaaaatatacacttgataaatcgaatgattatttattgtggccttgaaccacttctcaaatcacgaagtacggtacgtactaccttataactgcgttgcttacttgctttgtatactctaattagtttagaaatataagacaacatctgtgacaacatataactgatcaccagatatattgccccccattgcctcactcactcatttcagctgctgttcctgctactgttctatatccaaaatgttaactacaatggctatatcttttctgtgggcatgagatgcattgggaactgcgatctgtccaaatcattccttggcgcagtaaggaaagagggatacttttatgcatacatgatggcatgtagtaggacgcaatagcgataacacattattcctgccgagctcgtctgctttgatcctcccacgccatgattcatccatatagacccagctacagccaaatggacggcagaacatggcttaactgaatatatcaaatcaaattgatgcaacatccttaaaattacaataatccaaatcatcaatttgtgtactccctccgtcccaaaaaaaaaggcaaaccgtgggttcccgtgccaacgtttgactgtcaatcttatatgaaatttttttataattagtattttcattgttgttcgatgataaaacatgattagtattttatgtgtgacttatctttttaatttttttcataatttttttaaataagacggacaatcaaacgttggacacggaaactagggtttatctttttttttttggaacggagggagtaagaatcaatgattagctcatgtgttgttagctgacgcagcatgccgcggcttatcccctccagatatcgatggtagcaggtcaagcagtaccccactacctctgatacaaactgctatgtttcgtaaagattagatggttttaataagttaaatgtttgattaatcctttagatccattgtgccactaggataataaaaagaaaaagggattctctcacttagctgctatacagtttgagcattgatatatgggccatagcaaagtgggatctacatgtcagtgattaactccatgtgtaattaagtcaaagcatctgctttcaataaaaaggggtccatggcagtatagcacttgacagatatttactgccccttttttactttctactccctgtatctcatttgttttcctaaatggaagttatcaatgttcttccatgcatattgttttttattttcttcatgagacttgctgtttgaccgtaccagcgctgtacaccctaacaaactggaaatcctgttcggcgatcgatcgctctggggatggatcagcgatcgatcgcctcctccctccctggctccctccctccacccctctacctggtttctttttttttggcaccgcattactttcctattttagtaaatttatatacttaaagtttatacacctcaagtttatacttctaaagtttggagaccaaaaagttttattaanagggttccaaaaaaaaaaagggggttttttttttttaaaaatttttaaaatttttttaaaaattttccccccccccgattcaaatttgaatttgaattcaaatattttttttatatatagnnatttctatatatctaa

SEQ ID NO: 28767 - DNA, 1506 bp, Oryza sativa
  unsure (1)..(1506): unsure at all n locations
agctgtccaatggaggatgccctgcagggtgcatacttggggccacgccagcgaagttctagtcgcgacgtggtgaaaccaccggcggtgcagttgagggtccctacaagcccgcgcactaccggtactaggctgcccagcacgactagcggctgtggcatgagaagtgtcaacttgaagttcgccatgacgactctggagtatcctgctttgttttcatcatcttatatgccgtcacttaggaggatttgttgtggggtttatggtttgagactggtgaaggggaggaatgggaagccgtttgcttttgcccagaaataatggcgtaattgggtggagttggggaggtgtgctttggcagatacagttttgtcttgttgactctacttatctgatatcatttgcaagcgttttgataaaaatcatgcgtcatttatgaataatattcttgcctttaaagatagttttgctcgttgtgctggattgtatgcctgtttcgttggtttgttatgtgttgctagtctcatttgctcgtggtagagctggtgcttcacttcccattgggagtgtgttttgcatttgcttagtgtgctattatttggtactagtacattaaataagcttatcagaatcaggggtgcaagttcgatacttatgcgaattcgtattgtccggtataagaagatagaaactgaattcgtattcgactcaaatcctgtcaaagtaaattgaaacgataagagttttgatatttgacttaagaataatatccttattctttataattgagcatcctaatcaaattcgaaaaggcaattcaatctatatgcccgtttgatttttgggttaatttgatctgtgccattgatcaaattaacccttgatttttagacatggctctcctatctgccactttacctctctcgtcggtctctctcgagttctaagtgagtgtccatttttctcctactctctccgggcgtgcgtggtttcggctcttgttgtctttgttgagcttgactgtggaggctatcgttgtaaagtttgcgagaatgcttttcatcgggcgtccgggccgacgcaagaaatcggacggtagtaacggtgtctcttcacccgagacaacagaagtcctcgcgtgcatgcagggagctagtgcacgtaagcacacgtcaagtgcatgcatccatgcatattcaaatattcaaaatttaaatacatgtttctctacaatcatttatccaacctactatttaattataccattagattcgttataattaaatatttatataatgatcttacatggttatatcagatagcggctggcgcggtaggcggcgagcgggggcgaacgggcagatagcacgcgggggcggacgatggnctttccccactgcatctgcaggctccccccccgtgttcctacatcaccgctacatgtcttgactccagacccaaccccctcacttggcgcttccgacgctaccggcccccgtccactcg

SEQ ID NO: 28768 - DNA, 5534 bp, Oryza sativa
  unsure (1)..(5534): unsure at all n locations
ccgcaccccccatcctgacggtgaagaagaagaccggaccatcctctctgtgtccggcgcctccattgctccctcccgcagaagttcaacgtcgctgcctctgcgtcccgcgcgttagccgcctcagtatcccgcgccatcgctgttccctcctgaactaaggtgcataacgcttgcctcgccgaccacccacgcccactgcccgtccccacaccgccgtgcgcgctacgagagaggaatagctagagagaggaagagcgatagatagaagaagagaggggaagaggggtatgacatgtgggtcccatattttttaataaataaaatactaactggattgccacacgtatgctatgtaggacaaaatcgctctggattgggtcgagaggggtaatttgttcggtattaaaagttcagggtgaacgatgactggttttcgggtttagggggtaatggcaaggaagttgctagatatcccatgatcccaaggccacatgcttaggaacctatcagtctgtcacaccaatggcaccttttcatttttaaccctataaatatttctctttagatgtataggtttagagattgagttttccatactagtaactttttatatactttatctataataaaaaccacatatacatgaaacaccttggaagtttcaagtcttactattgaaattgtattctttactaattttctttaccattgtataaagtacactcaatctccagttttgtttagcatacaagttaaaccatctcagtttttttttttgcagtgaacacatattctaaactaaattattataaatttagtttaactaaaataaaataaaataaaataaacattagcaaatttacaaggtaattaactaaacatagcctaccattttcaccttaccaaaatgataaagtcgaattgcacataatagttatggctatcaggcatcctaccattgattattattgttgtaatgataaaacaaatcacaacaaaataaataacatttacatatttttttagtaaagcgaatggtcaaacatcatattcaactgtatcatctattaaaaatagatagagtatatttttttattacgaataatatgtgaagacattcggtatagaggaaggttaaagtcgtgcattcgcacgactatatacactagtcttctattgaatacattgttcttcgaggcacatcaggtagtggtcaagaaaaaagcttttggacatgatgttcaatcatccatcctattcagagttccacgaaaaatcaccttgtcctatggaaaaggtgagcctaatgaaatttgcatttagataaatccatgctcctattattatgagtgtaatatatggtcaatcattaaagttgaacgatggtgtcacttagaatccgcgaatttgcaaaatacacattcaggtctatattattggtttaatgtagcacaataggtccatttgtcgtttggccttgttagtttgttgatgcggctctccattttggcaccaaatttgtgttcgtcccctctgcagcatagcgtgacgcgaaaattgcatttaaccccttttcgctacagggataccccaaaagccaccaaattcctctcctccctcgccttctcccccaaacacgatgattcgtggtggaacgggaaatcatcaacaatgcagagtgcttcaggcggtggttcgagctgcaccataggtgacgtgtggtggggctctatcatcggcacggcgatgagcgatggacctcaacttcatggggaaggttaaccgatgcgtttgtatcatgagtactgcccacctatttcttgtactccagcattcatctagatgaattttagtaattaactttggttctttatgcaatgcaacatgatcttggttaagtagttggggtttgatctagggtttagtttgttgttgatttgtttggttttattttccatctgtttgccctggttcaaattatttctcaattgagtttcattacacaaatttctctgtggtatgtgagtaaatttgtcgattatatggagtactattggagtctaattttccttaggcgtgtatgttcaaaggtacttcctccgtttcatattataagactttctagcattgcccacattcatgtatatgttaatgaatctagacatatatgtgtgcctagatttattaacatctatataaatgtgggtaatgctagaaagtcttataacctgaggaggtagtatgatggaatttcgattctttttcaattgcacagttaacggtagcaatgatgttttatctttcttttttctctctttcatgtcagcaaatattctttattggttaattaatttactggatgatgtgtagcactgaaagaacacaacataacggtaattctaatgatcggtagtacagttttgttggtaactttttgtgacaagtcgacaagcacgatcacaacacctaaacgccttgcggtgatatggagtcgccaaccacctcgatctagccaaacggccaaatcaagatgggtttcgtagaaaaacagttaaaccggctagcggagccgatttagagatcaaaatcagcttctaggccgatttagatcgatatgaggataactacccgtctcgtgggcaaaacggaaggttttcaggacaaacctacagagaggcgtcgcactctcgcagcggcggcggacaatttacagcgcaaatcgacgaagatggactaaaactagggtaaaatagaaaacatggtaaaagaacgatttaagtagattgtattcggggttttacaatgaaccggccttatcccttaaataggggttggtcttgccttctccacatccaactcgggatagaaactaaagaaaacatgaaacatgccttcctgagtaaggaaactcgagacctgacgaaatcggactcggaccttgacggtctaaccgcccacatacctgcggtcagaccggccctactagccggtcagaccgcccacatacctgcggtctgaccggccctttgaaggaaacccgacactttctaaattttgataattttcccctattttgtccataggtgctaaatttgggtgtaaacactgttgatttgtttccgttgttatctcctgaacatcctcgaacaaacggggttaaacaacacttgtctctttccatttaatcatatatagttgcctaataatctgaggctttctaatttctgtttagatctcaagcggttttatctgcatgggtgtctcaccaaagaccaaacaatttcagatctgcatgtttatatgagatctctgtttatattggtgtgcaccagcttaatttggcccagataagaaagctgaaaccgaatccaacagggtctcttttaagttgtaaaaaaaatgaagaaaaacagggactcttttttgagttggactctacttggcccaacttactttgcatagataatttcctttctttcctaggggcctatagtttttgcctgaattggactctacttgggcccaatctatattctcttgtggcatagatcttgtttggcctataaatattccaagacctattgcttatccttccagattctctgccatagaaattagaggtgttaagctagggttttgggattgtcatcaagggaagttgccaccagcacaacatctgaaattattgaaggaactcccaacagaaattattggggaagagatctcttgatctattcagttggcaggaaggagttggatcatccgtgggggtgaagagagcagaaggatcaggccttgaattgtgaattcttggtggtgattgagcagaaggatcaggccaagaagtccaaacgagcagtgaaatcaaaatagatacaacaggagaggcgcacgtaagttttccatgtctcacatctgtggtttttctgtcttgttatttcaattgaagtcgattgcacaatcgctgcttttcccccctcctttctagatttgttcggtattttatatgcaccctttcagtttttctccaaggatcacgggagctttccgttttgaacagtccttccaaatcgatcttgatattgcattattagaactggcataccatgaatttttttttttggtgtggggaagggggggggggtattatgtgaattttggatcatgagatgtgcagtaagatttatggtagcattcttctcctccaactccgatgagtcacgacggcttcggggaggctgcggcggcctcgaccaatagttcaaggttggtgtgaagggagggggatggccgtgagaagcaatcagaccggccatacggcggctcatgtcatggggtgaggagctaggggtgatggtggggcggggcacgtcgtatccacctggcttagggagtgggagaccgtttaggtgggccttgtcggcacagttggtgcctttcggtggtgacgaggttggggtcgttgtgcgagccagagaataggatggtgttagcgagctgcaggacggggaggggggggttgttcttgggcagatctcgctcctaaacataagggagggacaggggaagaggctggacctatcatataaataagacttcaaccatatgtacccgtatctattaatttaccttctctgtgttattttccatgcataaattttgatgcaattctactgtgtgaaaagtgattaagatcatgtttttttttgaaatgttctataagtagcatgtggccgtgtgcactaattagatttaacaaactaataaactttccttgccaaaaaaaaagaagcaaatgtcccactactccactagcatatctcgttgatgcgtgtcacggctggtccatgaatgtgcgtgttgtcttatgtaccatgtcaaaaattcaataaaaaacactgcatgacaaaatcatattatgaaataggaaaaagtacgaattaccccctgaactattacggacgaccgaattacctctctaaacccgaaaatcagacatcgttcaccctgaactttcgataccagataaattacccccctcgacccaatccagaacagttttgtcttacgtggcgtacgcgtggcagtccagtcaggattttatttataaaaaaatctgggacccacctgtcatacttctcttccactcttcctctctcttctctctctctctctctcactcttccttactctctctcgcgagtcggcggctggcggtggacgcggaggtggcggtggcgaggtgaagcggaggcggcggcagcgtgggacgaggaggtggcgggagacgaggaggcggtggcgagtgatgcgggacgcggaggcggaggccgtggccacaatgagtagccgcctcctcgggcggggatggactgaggcagcngcggccgtgtgaaacggtggaagctgtgtcgcgggtatatagaacgggcattgaacttcaggaggaagcttccgcgaactcctttcgcgcaggaggggtgccagaaggcgttctcttgaactgtcgtcgcccattcttgattgcctcc

SEQ ID NO: 28769 - DNA, 26197 bp, Oryza sativa
  unsure (1)..(26197): unsure at all n locations
ggtaccaaaagaatttttacgccaatttctggtttatgatagggttaatatttccaacgcaaaatcattgatacgagaggcatataattgggatcccccatagctttttctatacaatatggtggagaggtgatgcaatctttgtttgaccttagggcatgtataacagcttcacgataatagcacctaagaaaatattgtttcagcggactcctctggacaaggcccactgtgtatatttataaagtaccaaaatacctgggattcaaaatttggccttcatatgtagcaagttcacccggatctcaaagataaaatcaactcgtcacatgcctgtgcagaatccttccgtcatcgctacaaagaacgttatgatcatagtggcagcagccgccgccaccactctatgtccgcccgcttgccgccgacccacgagagatagagagtaagagtgagagagagagagagtgagagagaggagagagagaagagagagagaaagagtgagagagagaggaagagtagaagaggagtacgatagacggatcctacatttttttaataaatagaatgctgactggactgtcacgcgtacatcatgtaggacaaaaccattctggattgggtcgaggggataatttgtctggtattaaaagtttagggtgaacgatgtctagttttcaggttcagtgggctaatacggtctaccgcgatagttcgttggggggggggggaggggggtaattcgtacttttttctatcaaatatgcacatgacctttgttttattttactttatgatcctgcaaaaaaaaggaaaagatatacaaaatgttaaccttcattgtttcgtggttggagtataagggatacaaggtttcaaattatggattttgtctcacttaaccgcccttcatttaatttttactcagtcctaccctcaaccatcttctcattctccagattaggtgcatcatagtcttttatgcatatgtataccgacggagaatctgccatcccacctattcctgttgcaattcttacatattaccctttaaacttttttctattatagttaaatataaaagaatagccacatataaaactaatgtggatatccacattttcctataggaaaaatgtgggtaacatatttcatggtaaatatgatttatttattttagaaaatactgtggtattttttcctttatccatagcaaatcatgggcatttagccagtcgcataagaaattaaaggtaggttatatacttccttcttaatctcttaaagaaatttggactggtggtcttaaaagaaagaaattctcacattcataaaaaaaatgttaggagctcccatattatatatagtaataaaaaaagagaaaaatcatggctgttaattttcttcaaggaaaagttcatttacctttatgcctttcaccaagttcaaactggtttcggacaacctttttagtattatctattaattaatggcgatgagataataaatacaaactagaaatattggttagtttcttgaatcctagatggaaactgattcgtgatgtacatacatgccaacttctttacgtggcatatagactcctattgtatttttgatatagggactgtgtaaccatcgtttgcaagtttttagcccctaaaacacgcgatcgattttgtacccattggattgaaaagcgatgggccaaatctttccttgcaaaccctattaaatagatcaactaccctcagccttccttgcaaaccctattaaatagatcaactaccctcagcctccaagcctccaataccctttcttgcacattgtacgccgccaccatcctacctaggtgggctgcaagccttctgtcttgttggcttcatcccgccgccatcccccccacccccacaaatacatcaccactctgctccggatccactactgcgtccactccggcgagtgcccctgccccgccccgccctgtgcttctttcccctttccgatggctccttttcactagatctgcatatgccgccctcttcctccgaacttcttattccttcggcccactactgagccgcctcaaccactggtgacttcccctaagtctagagaactccccattttatgattcctccaaaacaacctttcctacccctatctcgaaccctaattcgttgcccttaattctatcaccacgggcgttattgcctgaagtggagaagaaggggtgaaagagtggatcaagatccgttgctgccgcgagtggagaagggatgaaagagtggatcttgtcataagttaggaggtaaggaaaattcacatgttgtaacctccaaaaatcatgtgcatgttgtttagcatgtctattttggtatggtataaaatgcaaacttaatatccaggggcaaaaagactgggctggggcttcaggttcaggttggctaaatttcctactgtttttttcttttggccttctctcctctaaacctaaaaaaagttgatgttgcggagttatttttttctcggtagttcacgagtcatatgattatagtagcaagtacaatacaagtgagaataagtataaaaaagggaatgtgtgatggatgtctagcttgagaataaaagtgaggagagagagagggtgagtgagctgctaagggcatgttcaacaattaaacctggcacatgccctaagtaacatgttatatatgttgtgactaatcctctgcatcagataacataggctttaaatattaaaccaccaaaaaaaatattttaccctttgtcccttccaacaactagttgcagcaaggtaaatttatatcttgtgacaagagtcgatgataagctaagggtttgactctcttccccttctctcccttccacattcacaaaaatgtctataaagcagatttatggtatacatgtcatgaatagtcggtggttgcacatgagttctaagaaaatgagacccatcattagaacatgtttagttatagtggtcattgatacctctaattttatccacatcacatatatgcttactaatagaatataccatctttattcacaaatactggatattcgtatttgtgcagtgtataactagaatcacttgtattcgtataggagtaccattaacaacacactactagtattctttcgctctggatcgatggttatctttctttatcccttgaagtttgtgtaggttctctcttagataaggggcacctcctttttcttctcccttctaaaatgtacatgatagagcatgcaccatatgtttaaaaatctattgctaccttcatctgaaaaaatataagatgcaacctctgtctaatttgtaaaactaggatatgtgtctaatccggtcagacggtgctatattttaggatggaacgagtagcaaaaaatatatttctgtctattatatacatcaggtgcaatgtaccacacataaagattttttacgtgtaaatggctaacccatatttaacttataagtggatttgtgggttagccacatacacccttaggttttgtatataatggaagctttattgaactcaagagtcttagtacactcgcggcctctgcaccacgaaagtgcacacaaccaacaaccctacacacaactaagggaacacaagattgatcaaaagtcatctatctgaatactagaacaccactcatatgccgggggtaaaaaactccgtggccacctgctccaaccgaagacaagccgcaacagtaaagtccttcaaaataggcttatgaagtataagccaagcacagagctatcgtgtaattaagaagataacctgcagttagtagagattaaggttaaggagaaggactctagtgtacttaaaaaaatagaatgatagataattgacaggacaaacagtagttatagtaatatagacattatttttggataaatttaaaacacttggaataattatagctcaattggtttgcatttttgcttatcagctgcagtcaaaatttgaatttaaaaacttaattttggatttgattctgatattttttttattttctagcatgtacataaaagtgaaattatttcttatcgttaataaatgttacggcttataatcagctataggcgaaacaatgacaatgcctatacttgtgaagagagggatatatagcaatttgtaatttacatcgttgaactgactctagttgctatcgtcatgagaacaggaatcgtcaaactgccccactactaccgatctcggcaatatgaactccatggcggcggaggaacaagacacgaagcctttcttgtccccgaccaccaccaccaccatcccgccgcgagcccaccgtggataccagcttagcgcttgcccccaccaccaccaccaccaccagatgacggcggcggcaccggaccagcgcagtgcaggcgcaggagcggcggcagcagcagccgggcagcagcagacggcggcggctgcctgcgtcctgaaccgagaatccgatgaactgccggaggaagaagacggcggcgccgccacgtggttattggctcgtcaggcgcccgcacggaggatcagcaggagcttctggagcgccggcgagtacgatgcggacaccagcggcgcggcgcggccgcctggaagtacgtgtgtatacaccgcgatgcggatgaattttaatcgcctttaaattcttatattctcatcctgtgctcctctcgatctcgtggcagatgtgcagaatcgcatgtgcgtccacccaaaattcctccactccaacgcgacttcccacaaatggccattcggaggtaagcgattatttttcgctataaacgtgtaagtggttaatccacgaaccaatttatacttcaaatatgtggagcaattttacggtcattgaggaggtactatgaggcaccaaaatttagtgtaaaatttggtaccttatagtacctaggtaccaagaggtattaaatttacaatagaaaacgtgataagttatagtacatccttaaggactgtaaaattactcaaatatgtgggtaccacttatttaaacttctataaatgggaaatccacttatctgaagtgtaagtggatagtacacttactattggtaaatactttgtatctatccctaaactgaaatatcagacgattgtttctgtctttatatgtttttgatattcttgcagcggtggcggagttattggacaatgctgtcgacgaggtgattcaaacagcttattaattatgcatttcaataatttgatgatttggggatatatatctgattgattttttttgacagatcaaaactggtgcaacaagaattatagtggacaaagttaacggttgtaatggatcaccagctttactcgttcaaggttctggttactgtgacaatgttatattcgtttacttgattttgtataggtgcaaattttgacagtaataacagatggtctgaaatttcagtaatgcaacaaatgtctaatggcttggtcaactgaaattgcatccagacaatggacataagtaaaaaaaaaatgccaatatcaatattctctttaccttctctgatggacttagtgtaactacagaatttgcataatgttgcactgggaatctctttctgattgacttagtgtgaactagagtgtctgcttaacgttgagtatttgcttaatgtcaccacatgaaactaaatggctgtacatttttctgtttgtcatacagatgatggtggaggcatggatcctgattccttgaggcgttgcatgagctttggattctctgaaaaacagtcaggctcttcgattggacaatgtatgtactactatatcatatattcaggtttttatcctctccaaacttaacttatattgttatcttgtatattgacattcgttgatctgaccagatggaaatgggttcaagactggcacaatgcggctaggggcagatgtaattgttttcagtcgctgcatgaagagcaggtctagctagtctcatttccctatatattttttttttacttataccaacttgttgccctttccccccttactttcttacactttcttgtttttttttattccagcgagcctacacaatccattggtcttctctcttacactttcttggccgagaccaatcaaaaggatgttgttgttccagtggtatgctttgccatctgattttatcaattgggcacaacacacacacaaatatatatatagcgcttagccatcacttacctcttttactgtgattattctgatgacattttttttatttcattaggtggactacaaatacaatctattgacaggagaagctaaaccacaccagcggcttggtccagatcagttttcgtcaaatctctctgttctgttgaaatggtccccttttgcaactgaagaacaactgatacaaaatgtatgttacattaggtttctaccatgaaagaagacatttatattactataaactcgcaaattaattttcaaaaattttggagcttggaatggaactatttgtctgttatttctttcagtagttgtaagtaatttatcgtcaattcagtgtgctaatggtgtttaaaatgtggttacagttcagtgacattggtccacatggaacaaagattgtagtcttcaatttgtggtcaaatgacaatggtgatctggagcttgattttgatatcgatgagaaggtaagcaaaacatctaaaaggatttgacttcagtaaacttttaaattgtaaaatacatgcgtaattctgaagtttctttcacttctgttgaattactaaatagctcctgatctcttggacaatctttatcatttttcagttgctatgaaatgtctcattattttccatgtgtctttcattatatattgtatatgtttaccatattccttgttgttttcatttcaggatattttgatcagtggtgctccaaaggcagcagaaacaactaatgctgcaaaaagaatgaacgaaagtcatctggcaaatcagttacactattcttttagggtgcgtatcacatggtaagtgtttctgcacaatactagttaattgattttgctaatatatattagcattttgcaggtctatgcttctgtcctatatttgaaactacctgcatactttaggatcatactccgaggagaagaagttaagcatcactacattgcatctgatctcagatatacccaatgcattagatataggccgcaggcctttggaaaaaaggaggttcgtcttcaacaaaaccattcccttttgctgagttgcatacacattacctgttcacttctgtaacagtgtgaacatgtaatgtctaatacattccttttttcgaacgaatatgtctaatacatttccattctcaaagtattgatatttacttctgtgttgtttaaatcgtttcccttttacatccattttcttcttcaatttaggacgaggtggatacaaccataggatttctagatggtgctccaaacatcaacctgcacggatttagtatctaccacaagaatcgccttatattggtgagctactgatttcttttgcattcactatgtaaaaaaaaaaagaagaagagaagatgctttacgggcataaacatcaaaactaatcaattttcactcaaccacattcaagctatttttgcctaacatttttttatcttgtttaaaacaaaatgacctctttcagccttttcaccgagttttgagtagtgcaagtagcaaaggcagaggtgttgcaggggtattagaggcagacttcatcaagcccacccatgataaacaagactttgagaagtcacagctctaccagaagctaataaaccgcttgaaagaaatgacgaacgagtactggtacaactgctaaatcccatcttgtttcatgtaaatccaatacctgtttctaataattcaataattcatatctcatcattcaactatttcacctgtttccagggatctatacagtcatctggttggataccataagttgccccgtgcagcttctggctctcatgcttctgctgcacttgtgccaactctgtcaggcaccattgctactgcatcgtcagagaggattccagccatccgtgacaatccaacaaatgcaattccaatcgcctttgctccccatcttgtctcttcacctgtaggaacaaatgctgttgctgcagtttgctcccagtcccagtcaagtatgcagatcacaattggcactgatttagtagatacaagaaaaagaagaatggaaactcttgatcagatggatggtcgatcgaaaaggctgagtatacatgatttggcaggaaacaactctgtggactcgagcaatcaggttagcctagattactatgtttgtgcccataatattgaaaatacacattttttttaagaaaacagacaggagaactacccattatattaataaagtaatagtaaaaaaacttatcacaacacctgaacaccaaaaatatatgattgcaacctacactaacaaattacttggcacttaatgtttatccagctagactaattttcgattagattttcacatcttttttatctgacagtagtttatgcgctgtattgagatctaatgactacagatactacagatatgccagcatatgggagaacgggagttgaaggaattttcctacttgaagatagagaatacactactccgtcaagagtaagtccaacaacagctctcgccttacttccatcatggaacaatttttggcctaaaagtctcaggacttcattttgtttttttgtttcacaatttcatatgcaggtgtgcggaattagagtcatcagagaaggaactcttgctcaaggtgacattttttatgttgtgatttgttcaatcttactcactagtacactacaccaggtgcatcttggctaaaatcaaactgcactgacgaacttaattatttgttgtaccgagcaggaacaacaattgagccttgaacttgagcagacggaggcacagtacaagagcctgttgaacgaatacatatcggtggctgcagttaggacagtgaaacgatagacatccttggctctcttgccatctgtaaagacagatgtttgcaacattgcaaatggcttgatatctcagtaagcagatgaacacatccggcttctgcaccgaaacagcatggagttggcgaaaacagaccggatatggtaacagggtaacagagaagcacaggggctacacccagtaatgtgactggtgatcacttgtatcatccggtcagcaagcaaagctactagatgattggcctcttgtttcatcatctatgttttgatcatctgtactctgtaaaaatagtttcttgatcagtagtggtgatggcgtgaagctgaaagatagatagattgcattttaggaattttaagattctcacaggaatagctaagaagtgatctttgccggttcatgcaaaaaccacattaatcccggttcgaataggaaccggtcctggttcaaaagcccaggggtacttgttgatctatcgggactaaagataatttttagtcctgattcaatagttgtcaggccccaacaaactttagtcccgaatcatatctttaatcccgcttggtgagcaccaaccgggaaaatatcactctcccatgtcattggcatctctcgctctctctcttccttatctcgtctgcatcgctgctgcgcgcatgccgtcttaattcactcgtcctccttatcttctcctccactcctccctctacatcggcgtgcagcaggcgatggcgccctcccttccgtcgaaggggaggtgacaggcggcggcccacggctcgccaagccaccgagggctctcctcctccactcctccctntacgtcaaatagagggagatgattgtgaaagtaggtgaaaaattaaattagagatgattgtgattggtcaatatgagtaacaggggaagaaatatcaaagaaagtttgtaaaacctcttagcagtgaatttgtcagaattccacttatccccttctccatcctgtaggttaataagggaaatgtcctcctccaactccagatactcttcctaggccaaactgctcaaaggcagtagaaaacagtcatacctagttttttcttcttgttttatttataggggttccattatagctattccttctagtgaaacttctttaagtttcaccatccaaactaagtggatcttttgcatctgatccaaattgtctcaatcatctagtcaaatagaagtgccacatggatgcaccaaattggattcaagatgccactattgtgacagactgcatgttcatttaaaattaaatcaattatttcttcttttttttgcggggaaatcaattatttcttcatgctcaatatgcgtggtaaatacccaaatttaatacttcccttcaatcctatcctagtagtggggttgtgtgcccatggagtttgtattcacaggcacccaataacatattcgagcaggaatgcaagttacgccttgaaattgagcatgcggaggaacagtacaagaacctaaacgagagtacatatttttctaagaggacactgatcgaaatgaaaggcattctacttccacggatcttttgcatctgcaaagacatacctccgcaacctcttagatgatagagattttagtaagcagatgaaaatatccggcttatgcgccaaaacatgcgctcgtgacaagggagcagattatagcacagggactgccatagtaatatgcttggtgatcacttggctccttctgccaggaagcaagctacaagacccttctctgcttgtttgtttcatcacctatgtgttttatcttatgtttactacactactgcaaaatatagatcaaagaattgtgatatgtttagggagccagtttttgtgagatctgagactcacatctctgatatctgcaagtggtatgcttgcaacatttcatatgatgcatattcattaagcaacttaaagaatatatccagtttttgcgccaacacatgcactcagctaaaatcacgaaaataaggtaacatgatagcacatggactgtattagaaatatgattgcaacatggcaaggaacagagtttatatatttacactagtaatggtgaaggttggtgaccacttagctctgtgatcagcaagcaagccacgagatctacgggttggtatttcatccacacaatttttgtagttgtacgagcgcattgtataaagagttgtttcatgcttaatgtaaaaaagaagtttcatcatgagtaccggtgattgcttgaaattgaaagatagattatgtttggggaatttttcagattctcgcagggacccattgataaggtttttatattcaccaggcacgactgtttttttcttaaatgttagtctcttcttgtacaccttgattattccaagatttttgcaacacctatattttttatgattggcttctgggggttgacaagaaaaagagtaaactgatacttattggagcctctgccttatgttgggctctatggctgagcaggaatgatagggtttttgataaatcaccatctgcttcctatatgcaggtaattttcagggcaacatattgggttcggcagtgggcacaattacaaaagtgtgatgaagatggagagtttctgattgtttgcatgtcgtaggcttgaaacgacggttatgtaacttttttctaattatggatagagattcaccaataggctggaataatgttctccttgtcttgttcggttttcttctattttggtttggtgtgtttcgctttattttggactacactcttttaaagtgctagattgtaataattggctgtagttcttttgagcaaaggccgagatgtttcattctattatcttaaaaaaaaaagctaaacctcatcctctttgtcatgagtcaatcccatcgtctttgtcagtcccaataaaacggacagcctcccattgcttcatcaatggtgaacatgcgcggatgagatcctctggtcgccaccacctcgccttctcggtcccccctcatctgcctcttcacctttgtccctcttcatcaacttctaggatgatttcccacccaacatctcctcttctgggatcgggatcaggtgcagtccctatagagactgcaactttggcagtagccaatctgaaccgtttctgagagatcagacggctggctcacaccactgcaccaactagcgctcaaaaggtcgtcttcttcctccagcgatagagccctctttcttctccatgtcaatggaagtgctctgtgcttcttcttacctcatgacaacaagttgacaactacgggaccttcgtataaaccattattacgaaagtgttcaacctgtcaaagattccattttccgtgcttcatcatgaattcatgatcctcaaataagcctcccgcatcaatataaagtatcgttgtatatcttcttcctcctctgttcttgctacgttcttctgtgaactcccatatactaataagcaataatctgcacagtccctgtcaaacgccaaggcagtaattaacttgcgagcagaccaagccaacctcgcctcctcctcgttcgatacctagctaccagtccaaatcaccaccaaattaaccacgagcatcagatagctaacagtagctaagcagcgcaactcctagccttgagcccttctcacccgctgatacctcctccttgttggtgaccacgctccagtgccgcctccaccactccactcttgaagcccaccggagatggagaggactaaagggttgttaattcgtagacatcggatgcttcgtgcatggtcagatcaggtgctactgctaaagttgcagtaacaatagcacttttacctaatccgaatcccctcttctgcctatgttggctcacactgccgtcctgccctgccccctcctaagtcataaccacgtgggctcctaatgatgatgcccctgccgctagacccacactactgccattcttgatgtatggctgatgccacttcttgctgtcctaaatgtactatgtcaattgatttcaaccattaattagatttcagtcatactgtttagaaatggagctaatccatggatattcatcctgcattttcactaatatgttaagtagctaaacagaaaatcaacacacgaactcaggaactgatagatcaatggggattccaacgaattccaccgctgccgccgccgccgttcgtcgccaagttctattacttaatcgataatcaaaacagagattgcttcctccttataaatatatatctctctctccctctcccttacagaccagccaagggccaaacagcacacacacctactgagcccattccggcccactcatgcgtacattagctttacgaagtctttttcccctccctccagatgcttcctcctgcaccctgctaccattgccctgagcaccagcggcaggcaccttaacattcccccctccttgaaaactggcttgcccccaagccagagctctgggaagacgagtgcgaaggtcttcccaagtggcttcctaaacagcactgtcagaccactgaattaatacttgtggtatagcagaagtacctgatttgcgaactcgggtgtcgaggacagcaacaggaactttcttagtttccatttgagcaggaatcataggagaagaaacacctttgaagccttgggcagacttgagttgagagacatggaaaacaggatggacaacgcttccttccgataatgctaattgatatgccacttctcccaccttgcgcaatacctcataggggccaaagtatttaaaactcaacttgtgattagcccttgcagccacagaggattggacatatggctgtaacttgagatagacccagtctccaacagcaaaggatctgaaactacgtttcttatcagccggagtcttcatatattgctgagcctgatgcaaatgctgctggagcaattgcatcatcaacctcctttcagacaaccactgttgcacatcagggagttcacaagaattcacagagatacctagctggtttggagtatgaccatataacacttcaaaaggagtttgttcaagggtggaatgataagtagtattgtaccaatattcggccaaatataaccatgtagaccacttagaagggcaagaatgggtgaaacagcgcaaataagtttccagacattgattcaccctctctgtctgtccatctgtctgaggatggtatgctgtactcatgtgaagtttagtgctaacactctgaaataattgctcccaaaagttgcttgtaaagatcttatcgtgatcagagacaacagccaaaggtaacccatgtaatttgaagaccccttccatgtacaattgagctacatcggcagcagagaatggatgtgctaagggcagaaaatgagcatacctggacaacttgtccaccaccaccattatgcaattaaatctcctggactttggaagcccttcaatgaagtccatagtaaccgtttgccatgcaccagatggaacaagtaagggctgcagcaggccaggatacctgaacctgtctggcttagcttgctgacagatggaacactccttgaccttcagcttaatctgcttcttcatatcgggccaagcaaagagggtcttgatccttctataggtcacagggaagcctgaatgaccgccaatagagctgtcatgcaaagcactaaatattttgttctgaagggcagagttgtgtcccaaccaaattcttcctttgtaccttatgagaccatcttttaacttgtaaggagagtcttctagattttgtatagacaattgagccaacaacttagcggactttgcatcatnnnnnnnnnnnnnnnnnnnnnnnnnnnnncaggtgggtttacagattgaaatagccgcaacttccaatggttctccatgatcacaccgagacaacgcatcggcagccccattatgaattcctttcttgtaatagattttgaacttcaaacccaataactttgtataagccttttgttgccagctggtatgcaagcgctgatcagtcagattcattaaacttttatgatctgtgagtattaagaattcagcatactggagataggaccgccaatggtcaacagccaataagatggagagacactccttctcataggtggagagacctttggttcgaggacccaaagccttgctaacatacgcaataggatgcttatcctgtgataagactgctcctatcccagagtcacttgcatcagtttctataacaaaggttttgttgaagtcaggcagagccagaacaggggctgtggctaaggcgtgcttgagactctcaaaggaagtgtgtacctcaggggtccattgaaattcaactcccttcctcaacaaatttgtcaaaggcttactgagaacaccaaagtttttgacaaacttgcggtaatatcctgcgatgcccaaaaaacctctaagtttcttcaggttagtaggaacaacccacttcaaaatatcttgtatcttgctggcattagtggccactcctgccaccccaatagtatgcccaaggtaattgagttcctgttgtgcaaaggagcatttgctcagtttgactttccactgatgttcttgcagcaggtgtagtaccttcctgagatcttgcacatgggtgggtaaatcagggctatagattagtatgtcatcaaaaaagactagggcacactttcttaaaactgaagacaaggttgcattcatagctccctggaaggtggctggtgctcctgtcagtccaaaagacatcaccctatattcaaagtgcccaaaatgggtttggaatgcagttttgggttcctctccagccaccaaccgaatttgatgataccccgcccttaagtctagcttggaaaaataagcagagccagccaactcatccaataattcatcaattacaggcaagggttacttacttttgattgtgagcgcattgagctgcctataatcaatgcaaagccgccaagagccatctttcttcttcactaataatgctggggatgagaaggggctgatactaggctgtataactccagatttcagcatttcgtgaacttggtgttcaatttcattcttttgggttgggttgtatctgtatggacgaatattgactggcttagcacctggtattaaaggaatggagtggtcacaggatcttctaggagctaatccctgtggttcctcaaagacagatgtgaactcagacaacacttgttgcactggtttaggaatcgcaacaacagtaggactagtttcagtggtgatctgaaacatgtgcataagtgccccaactttgtacaagcctctgagttgtgccccagaaatcagccgacagttagccacatcagagtgcaccccttgaattctaatgagttgccccttgtcctggtactccaaccatttgtgcatccaatcaattttcataacccctaaacctgccaaccaatccattcctagtatagcatcatacccattcagaggtaacaatttgaagttagatttatagtatctgccttggagccaccaagagcagtcagggagctgtttgtcacactgtaagagtcctccatcaacaactctgaccttcactggtttggataactgtactaccccacgcaaatggccaatgagttgctcatctataaaagagtgagtgctgccggaatcaacaagcataagaagctcagttccctataccaagcccttaactcgaagagaatggttagaatcagttctattgcaagcatggagtgatatagttccattgcaagcatggagtgatatggtcattagtgtagtctcctcgggggaagaatcaggaactggaatcacaaagttctcttcttcctcagactggaaagcctccaataattcttccaccacatgcagttggacagactgggcacacttatggtccttactccatcgtttcccacaggtgaaacacaatcctttggatcttctataagatttcagagcagaaattttatcatcgcgagtattggttctgacagactcaggaaattttctttcctctccagggggaggttgcaggactcttgggaatgacattgacctgagctgttctagaaaaaactttgttgaaattagtaccctcagtcttcctataagtagttctcttactcccttccaagatttccttttgtaacaaggccacagaacatgcagcatccaagtccaccggcttctgtagcatcactactcccctgatttcgtctttcaatccatccacaaatttagttaagaagtaaaggggtgtgagagcattgtcataagagagcagctggtgcattaatccatcaaacctctccacatattcagccacactgctagtctgcccaacatgaaaccagtgccgtatcagcaattcctgcctatcccttgtgaacttacggcaaacccgatcacacaactccagccaagaaatccccactaactaatgccgcaccgattgtaaccagaaagaagcattgccagtgaaattcagcagagctaccttgacccagttagctggatgcaccccatagacattaaagaaaatctcacaattatctctccacatttgagggttctccccatcaaattgggggcaggacatgggaggaacattaccaccaatactaaccattcctgtctcaaaggcctgatagctagaattttctggagtaaagggactcaccgaattgaactgaggatttcgccacccatgaggagaaggggtaaacaggaacggatttggcgagttaccattgagatcttcctctgttgacgcttgatttggtcctttactgcttttccccttaaacagcatccgctgctgcacttcccgctagcacttctccaatcctgcctggattgagttcactttcttggccaagtcactcacagatccccccagctcactcaccttcttctccaccaagggtatgcgcgattctaccgccgccttcaacgactggagttcggccagattcagtgcatccgactcctcccgtctcctctccgtctcctccctcttcttctccgcatcctccatcattttcaacagcaaatcgagtttcccatcccgagccatgatttgagccgcttgtttggtggtatacctaggtcgctccaggatgaattcactggttccgccccgaacccagccaaccagatcaagggagccccgagagcttttgcggaatctcactgataaacagcgaattcccacctatcacatggaattttccggctggatcaagggattcaaggaaaccaggaagttctggagtggctctgataccaaattgttaagtagctaaacagaaaatcaacacacgaactcaggaactgatagatcaacggggattccaatgaattccaccgctgccgccgccaccgttcgccgccaagttctattacttaatcgataatcaaaacagagattgcttcctccttataaatatctctctctccctctcccttacagaccagccaagggccaaacatcacacacacacacacctactgagcccattccggcccactcatgcgtacattagctttacgaagtctttttcccctccctccagatgcttcctcctgcacactgctaccattgccctgagcaccagcggcaggcaccttaacataataatacaaggaatccaatttacatattcacactgttgtagtaaattagagtactgtttgtacaatacgttaccattgtgctaatgcaaacatcacaagattcaatactgtgcaaacagtatcccctgtatttactcagaaggccgaaattcatacgtcttagctactccttagtttgggaagcaggctgtgaaacaacctataaacgctctcacaagtcactctatttttatatctgaatttactattctgaacacataagtgtgaataatgttgttcattcaaatgattgatgtgctacaacgttaacagattggcttagtcagctcgagcttgtgatgcttgcagaccgaagtagatgatatgcagcagacagcaagcggtgcacgagacatcggttaatttgcctagctgatccggtgtcttttcttgtgctagcttatgcaagaaaactacacaaacagagagggattcaaagcacgcgacagtcgacgcagaacacaaccaagggaagtatctggaaatatgttgtgatgctcgatagatcgacgagcttggcgtaaggctcctgcttcgcacatcgtcaatgtatggctacggggaacagctctggcacggttgcacattcagcaacttgctgaaagaaaaagcaaaacagtatgcacggaagaaacgctaattactttaatttagaaaattcacatagagataagggagtaaaatggcaaaaaggaacaggtaaatattttctaattctgttgcatctaactacatgccatcataatgcatgaaagtatatgtatgtataaccctcttcccttaccgtgcacaagctgtaaagaacaattggaggttcccaatgcatctcatgcccagagaaaatctatggacttttgttaacactttggatagagctacagcaagaacacaacagctcaactgactgatcttgtttagatgggactaaaacttttaagtcctatcatattagatgcttggacactaattataaatattaaacgtagactattaataaaacacattcataattttggactaattcacgagacgaatcaattgagcctaattaatccataattagcctatatgatgctacagtaaacattctctaattatggattaattaggcttaaaaaaattgtctcacgaattagctttcatttatgtaattagttttgtaagtggtctatatttaatactccaaattagtgtctaaatacagagactaaagttaagccctggatccaaacaccacctgagagaggcttgggggtgggggtgggtgtgggtgtaaggggatatatatagatttattttgttcaaagatattgtctttagtatttgtaaactacacaaacaacttgcccttatatctatctatctatctatacctaaactaatcgggcacttttttggagctctcacgttaatcaggaagatcaagccattgattaaacaaaccataatatgtcaaccgttgattacaatctaatccaagttccacgcggtgggtcttttaaagccccatgtaacctatattgtcaagcccatcgatatgatccattcacgcacgcaccatcgatatgatccattcacgcacgcattcttttttctttttctttcgaacgtgggtatttgtttctttttctaaaccgatgagtccatccatatttactgagatcgatctgatcagatgcagtggaagatacgggagggcacggcatggccatcgtgccggccggcagcggcaaacgacggagaaaggcaggaggaaacagtacatacaagcacatcgtacgccaattatgttctgctcgctcggccgcggcaaaggcgaatatatcaacgttatcggatctagcagcacacaatcactaaggcgaggttgacgtgcggccggtgagcgccggaaaagcacacaacgtcagccgaatgctaattgttgttttctccattgttaaggtttgattctaacttctaatttccagttcaattctctttacatgcatacttctcaactgtcacagcgtccaataggaattaatctacgtcatcaccatactgtatatatttttgatgttcagatgtgttgattcagcatcaacaagttcgctagcacctgacaagccaatccatggtcatcgtaccataataattcatagaagtcttccatctatttgctttgacaaattcgctggcatttaggaagatccatagtggtcaccgcatgtactattcatgtaagtattccatcaatttgcatagtctgactttttatctgtatttgatctacttttactattcttcttatattcaccctctccttaaatataagcgatttcaagagattaggaatgaaggaaaaatgaagatagatttaaaaaaggggtgaaggggcagtagaacgatggttagggataagattgatcgaaaaatataaaatgagaggtggctttacaaagttctactcttaaatccattatatttgtggatagaatttgaagtataggatcaaaaatatttgtggatgaagggagtatatttgttttaaaatgtattttttttcctatgtgatatgaatttgctacccttattattatattgttaaaaacttttttcatatttatgttcaaaaatatgtttggactttcctaaactatccccgcaaaaaaaaactctccatatattatttagttgatttttttttataatggaatgtaacattccggcctttactcaaagagttacagccaattattacagaactcacacagaaagttcacgatagcaaaaacaaagctaagcaaacacaaactaatatacaccaacggaagaaaaagatcccctaactactgaaatctattagagaacctccactcgatattggcaaatagatgcataattatattatttagttgattcatcataaattttgtgttatacaggtggtcatgcaaaggcaaagggcatggaaaaaaacaatagatatgcatgtgcagtttttttcgataataatgcatgagtggaaaaaagcaatagatatgcatgcgttgcttcagtaatatacatgcatgcatgaaaaagacaaatggtgtgcagtgaaacatggtttattttcatccctattttccaaaaccatggaaaaaagaataatcccatgcattttgctgatcctactttatcctaacatggcacacaatgaaaaattattggacacggaaccaattcatattaacattatggtaggacagtacagcagagttcttgatttggctcctagaactaatccattaatatttatacgtagtacatggtgtcctcttactatatgttaatactatatgttatttgattttgatcctttattatgccatgttctcacgatatataagtatatatatgtgtatcatcctatatcactataatctgttgcatgcttcatccagttgaacaatttatattttcattgatattcattacttcagaaaaatacatcattcctctaacaaattcagatgaagtacttttcttttaatcaatgttgagggataaacatgactaaattgttttatttattattaatctaataatagtatattgggacattgtattaagaaaatatgccattggaagtcatactcaaaatgaattaaaaaatatgaattttatcgttttaagtattctattgattaggaatcaatatttaacaatgtatatttcataaaaactcttcttttaatataatctaagagccattgtaattagaaaagaccacatattcatacataattaaaattttaatatttatgatgatatgacggctagtctatactaattgggtactttctatactaattgggcactttctatgagctctcacatttaactagaaagatctaaccgttgattaaaaaattattatatctagatcgtggattaatattcgaaagccatgggtttctaaagcccaatactattgttacgtttgggccaccatacaatctaggttataggcttcaaaccgcccttgatttgttgtgatcgtatcaatccagcaaatctagattataggattcaaatcgctgttaattagttgtgatcgtatcaatccagcagagggagagagaacgacgtagactcatctgcacgcgaggagatggcggcactgaaacaatccactctattactcggcactgaaacgatccgtataaaatttcgggtacccgaatttctcccaaattaatatggtcgttttcacccctagccataagggaacgtatgatcacgtcagagtcaattcaaccagaaactcgagtcatccatcctcttgagccagtaatgtttaatttatccaccagatttgattcagacatactttatttgatttgaacttcttttctcatgcatgttttgtcatgcaagatttgattcgaacttcttttggtttctaattcagttgattgtttctttacaattttctcatctaaacgacaccgattagtacacaagttcgcttgcaacataaaatgactcaatccatgatcattgcttctttgattcacaaaaagtatcatgttgatttgcaaatttttttttggctaatttcgctttcatgcatgtaggaagattatttttgccgttccatctacaatccatttaggtgttccatcatcaatttttactgttctgattgatatgtctataatctaactttgtctgttccaggatatacacaatctgtgacagtatgctctcaattgagtaagttcaattataaaattagttaatctatgacagtgttatgacagaggtttgtacatggtggggttgaaaatgtttccgtcttctaggaccgggacgttcccagtacgaggaacgtggatcaataccggccatctctttcgactatgatttcggctctcaacaaatatccagtgatcagaaggttagaaacaaattatgccgtgacaaagataaattaataactgatgatcacagtaaatcattcagagtcatgtttattctttagatacattactgatgctttataatcactgaaaaggctaataacattatctatctatataatattcattataatccacagagtaaaaccataatttatttatttttggatattctgcgaaagaggtacaatactttcttatagcacttcaaatttccattacctactagatttgcatttatgtatgtggcaacaaattttaataacttagactagaaaagagctgatgccggataccttcttagtagatattcatgacgaaaaaggaagattctatagattcatatacaagttttttatcgctaaactaaaaaaaatatagagctttataaaaagaaacagagggagtagaaagtatcctaacaaatattaggatggattgtaatttcataattactaattgtgatttttgaattataaataaaatgatattttttcttctttttagcttcaaaacatacatatgaatttcaacaaaatattattaatcgatacatctaatatatgattgtatttttaatattcaaatatcagattggctaagtctgcacgatttcacgagatatgattgaatttatttaggcaaaatactagaagttttagaacaagcgtgagcgccagccatatttttatcaaaccaagtaggtaatggtcgatctgtctagaatcataacagaagcacaaatggctgtgcttgtatatattcccagcacttggtcagtatttctagcatgctgatacttgcagcaggattaataattattttagtaattttatggcacaatgtgtttcgaaacactgaaaactgctttgccgagaaaaatattactggcaggtgagtcagagcatttccaagctggtagtgagagctgtgtcagccggtttctcaaagcagcagtttgtcactcgagggcaccagggctgtgtttagattcaaagtttggatccaaacttcaaacttcagtacttttccatcacatcaacctgtcatacacacacaacttttcagtcacatcatcttcaattttaaccaaaatctaaactttgaatccaactaaacatagcccagatcacagatcaaacatgggtaaaatgcgaaatgtcgtgacagcactacgtcaaccaggacttcaagaatgccagtatcttgttatttgcaacagaatcaggtcccagtgacatggcagcttccatgatggtaccgataatcatataccagaatagtccgtagagacacttgtctagtgatctcgtgatctctgcaatgtttttttctcatggatgacccaaagatactgacgcctctgatgcctatgttccatggtgggtattatggcacttgcaggaagtattatcatagttcgcaagctaagttggtaataagcactatggcatggactgaaacaagtggagcagtgaggggatatatataatgaaccttctcgtgcatatgtagaacacaacaagatgctagatacattaaattttgatggtggaatgtaagtttcgtatcaacaaaattgaattagaacattaaaacatttggtacaccagattttattacaatgacagagcaagacacattgaagatgcatgttatattatcattgtagatacatgcatatatacaacatgcttagattttttataagcatggaagtaataccggagaaaaaaagtagtatttatcaaatcttctaaatatgcatcatcctccaaagtccatttagtggtttagttatattaactatatatagagagacttactacatggcaaccaacgtgcacgtaactaagtaacacacttctctagtaacttttttttttttactatcagcaaccccacaccttcccccctctagcatgtgcaacccaacgtcagtatttttttattgtagcaacctagcagtataaccccaaggagacactgcttctaaaagcccaagtatttttttaccattgcattccaccaacattatctcgtatttatatttatcgttaccggctctacagggatggctagcattgcgcctccaaatccacccatcgccctgcacgtaacgaagcactgctatgtggcgctacatagcatgcatggagctatgtaactacgtaggacaactcacaagcgctctcacctccgcacccattgaagaggaaaaaagttgctcggcattgtttcagtctccttcagctcccacctctgtgtccccaaagggtaacaaattttnnnnnnnnnnnnnnnnnnnnnnnnnnnnnnnnnnnnnnnnnnnnnnnnnnnnnnnnnnnnnnnnnnnnnnnngtcatcaaacaaagcgg

SEQ ID NO: 28770 - DNA, 7623 bp, Oryza sativa
tttttactaacatgtataacttcacatccaccattcagtaacacctataacttctgtatccatcatttagtgagcttctgaacaacacatataacatgtatccatcatttaatatattttttttgttaacacggcacttatttgtttaggttggtcaaggataaatcaatagcaaactattaactccaagagaattaatgcaccacccaaccctcatctggcagggtaaatatatctactatcccaaagagcttccattctccatctattggattcaaagtaaaaacaaaatactcctcaaatgctggtcaaacaatccatatgaggggaacgcggactattgacatagtaaaaaaatactagcatgctaggtcagagatgcaacgtaagagatgctacgtaattaggtggcacgtagtgtcacatgtagtatgtctctccctctatatagagggagacttagtacatcgcacctgtcatgctacgtagctacatagagcacccctagtaattttttttaatatcaggaaccatgtaccttcccacctctacctcatggaccccacaccaacgtcagtaactttattttactgtagcgatgtaacaatatataaccccattgtattccaccatcgttatctgtatttatattcgtcattactagctctataagaatggctagcattgcgattccaaatccgcccatcgccgctctgcatgggatgaagcagcggtgccgctccaaaattgtgctgggcaatttaagtacttcactgaatatgcaattggtcaatttgatagtccctccgtttcacaatgtaagtcattctagcatttcctacattcatattgatgataatgaatctaaacacatatatctatctagattcattagcatcaatatgaatgtggaaaatgctagaatgacttacgttgtgaaacggaggaagtaacatatatagacttttatatatgttcgtgtggttcacacagtcttgttttggttcaactaatattatgattttaggtaaatgctagcgcgtctgagctatcctctctggtctctgccttaactaagctgaaaaataatggaattttttaatgaacttatataatgatcgataaatcattattttccgtaaataacgaatggatttttcacaatcagcgaaatgtgcgtacaagaagagagcgagtgcaaactgaaacattaaccgaaataagcaatcccttatttcattaaaaaactagttccttagttactatcttatagcttaattatatggagtgacaaacaaggtgacatttgagagttacctctgatttgtttctaaaattgttaccccttgtattccttagaacaagtgcaggttactgaggaatatccacctatcactatatttcaacattttcagtctacccaaatttgaattcgttaatctctctttcaaattcttctagtctagaagccgtgcctcttctctctgctcgcgacatcctgttcctcctttcgtctcgctctgtcactccctttccatctccttacatgccaaaaatcttcggtacaagttagacttcgtacaaacttagggctcagagcctatttgttgaaccagacctcttcttctttttccctaataagcattcatagacagtgtgtatcgcagaactagaccatatatacatactgtcaaatcattatatcattatagttatgcacaactcttcgtcgtcctgtaactatcctactctctccggttctataataactgacgttttgaacaagattaagatcaaactttaataactttaaccatcaataacttcaaaaatatttagtttaatttaaagaaactattatatagatttgtctttcaaaacactataataaaaataagcatgtatttatttattgtgtatattataatagaaaaataaggtcaaagatatattttgtagaccgtgtcattgtctaaaacgtcaattaaaatgaaaccggagggagtatgttgtttcatgctaatcaccactactacatcagaacctagaggaacaagtacatcttccattgcagattttcacaatgattatgaaccatacgcttcataattgttgcttactgcaggaataaatgctattggatcattccaactttccgatgcttctcattcctatccagtaattcaattctctctactatcggagtgcacatactgttctaatccccaagctcgactagcagacttgagttttgaaacaagagtcgagcatgcatggagggacacacacacaaacacacaagtacctactatacaccaaagcttatctttgggataggtatgaaaaataaactgacaggaaaagcatatcaggcacggtggttgaggtataaatgcatcactcgatctacacagcgttgataactactccctccatcctaaaatatagggcgtacctgccctggacgcgaagactaaggatgcctacctgttttactcatcccaacgcacagcacagcgcttcgcttcacgcacgcagttgtgctgggagagagagaaagaggtttttttaactagctagtcttgcatgtgaggtaacgggagttgaggaggtgagtcttgaatgcttgcatgcatatgtatgggaacgaggaaaaattcaatgtgtggatgcgtttaaacggctgccgaggaggtgccgccttatattgtgcgtgtactcacaattatcacacatagatacatttcaataaaaatctcgtagcattcatgtatttatccgtgttgtatagttcatctaatcagatgggtacatcaagagtgcttgcttgtgatgtcttccatttaagaggaaatggttgagaaatacccttcttttgctgattggtggccttgaacctgcgttagaacaagataggctatgtttagattcaagggtgtaaaaatttaacgtgtcacatcggatacacggatacacattttaagtattaaacattgactaataccaaaaccaattacaaaatccgccttaaactgcgagatgaatttattaagcctaattaatccgtcattagcaaatgtttactggggcaccacattgtcagatcgtggagcaattaggcttaaaagattcatctcgcaatttacacgcaatctatgtaattagttattttttcatttatatttaatactccatgcatgtgtctaaacattcgatgtgatagggtgaaaaattttgctagagatctaaacaggaccatagtggatggttgttccatcgttgtggaacatttgtaacaatgtatccttgggctttgtatgtcattagcacgtacagtggttggtttttatccgttattaaaaaagcaaaattaatgcacatgctgcagaagaaaagcaatgcaaattgaaccatctatccaaataagcaatccttattgtttttcttaaaagcactatagttacagtattacaggaagagacaaacatggtgacatttgaattacctctatttatttttctagaatataatttgctgcccctgtatttctctgaaaatgcacaaatgaccaagaatacacgttaacatgtctactcttggcaactatggatttaccattcctctctcttcgaaattcttttaatctcgaatgctagttgtctcctttcttttcacttgtcatttattcatctgctcgttctatacactctcttgactccctcttccactcctttttcgccaaagtcaagtaattggagacttctattgaaatttagatgcctagatttttggtaaaagtcagacttcctggaatatttgagctcaaaaccttgctagaataggtgttgaattaatgtactagtcctatttagttatagttggacttggagttgtaataggtggtaggaacggagttagagtcgaactctgtaacctgaccgcaaaatcaaagtgtgtttgattcttattctgtgatgaacaattggcatatgtggttattagttttgatatttggagatgattggttttgcaggtgatgaacatgagataccactgactatttggacttgtcagactgggcaggtgttgccagtcagactggagctatgtgagcggtcagactggctagcccaggtctgatcagccgactctgtgtcagtttcggtttcaggttcatttgttggatatccgtggataattcatatttatgacttctagatggatactatgcgtatctaatactgttgtttgctaacaatgagtcaagttggtgagaacttgtgctcggatatggtttcttggttgatccatatgtaggtgatcttgatgcctcgggagagtgttgttggtgatggatcatgagtcaacttgggagaagatgacgtccgaacgatcaggatatcatgcgggatgtttaggctaaagatcaatgcacatggttggtgaagatgccatatggcatatgatggagatattgtgtgtgtatgggatgcggagccgaatttggaaggagtccaaatttggtataattggagtttgtaaagtttgtttcttgtacgggaaggtttcctaggagattaggacttcttgtacaagtttggttcgtggctttaggctgcctaccttaggtataaatagagagggagggtgtggcctcccggtatcgctttagagcgagagttgagttgacagataagttagggttttgagtatagttaagattttcgtgaggagtgttgttgttgcactttgtaaacacagatagaaataataaagtttcaatctactttgtgagatcttcgatttatgtttgcttgagttcggcggtccaaccggcgggacaccaacgttcagaccgatggcatcgcaccggtcagactgacaagaacacagtagttagaccggcggcagcgacaggaggcataggcgattgcagggcagttagaccgggcgatcaacaccagtcagaccggcggcataggcacgatcaaaccggtagatcaactacgatcagaccgatctaaatcggattcgagggtaacttttaattttgctaaaactttcaacgcagcataggcgtcgcgttgtcaacggtcaactgtacgggtggagtgggggcggagctagcagcgatgagactcgtacgggtgctgctggtggtgtccatggcaacagccagccaccctggcggccgccacgccgaggtccatccccgcctccgcctacctcctgtccagacagttgtaacccttctcctcgtcgcaccgcagtgccctcccggccactgccgagttggacgctcctcgcctcgctcgcctcgacagagagagaaacgagagaggggtgaggtagcctttattattattattattattattattattattattattattattattattattattattattattatttttggattggtttgctacgtatgacaaaaccgctccagattgggtcaaggcagtaattcatctgatattaatggttgagggtgcaagatgtctgttttcggtttttgggtgttaattcgtactcacccaatagtgcagggggtaattcagacttttcgcttagaaaaaacttttgtaatgtttttacacagaactattttagtggagtacttaacccacaaggtagcattgaagcttttacgcagataactattttagtggagcacttaatctgtaaaggtagtattggatcaatctaatcccttgggtataggaaaaataagatcattttacgtcctaacgatatttatattctttttactttttttatgcttctctacatacaagtcataattcgctttgacaaatctaagatacgaaagtcaatgataattaaacaaattcactaaattccatgacctgcttgtataagcctctaaggtgtcaatacaaaatcaatagcatttcttataattatatgattagaaatttccacctaaaatttaattttaagactcattatgactaggtttttttcttaaaaatactgtagggtcctacctgtaagaacctctatatatctatgatatgtatatttgatcaattataaaaaagagatagctagaaaaaaatatttatgagcaattaaagttatttttaagaaaaactaaacaatgaacattcaatttagaagggaaatacctcactttaagttaaacttattttgttagacctgttttcaaagtaaaataacaaacatgtccgcgcgaatgcgtatgctacgtaccttgtttgtaaaccaaatggtgaaggcgggatggataatatatataggtgaaatgggtgatgcgcaaacggatctagcttgtgccatttcttgtactgtgtgttcatgaaaataaagagagtaattggaaattaaagaatcaacttagatattgttgtacgaaaccaaatcacagcatgtgaggaacactgacgagggtcgacctgcaactgcagacctatattgctccctcttctccctcttcctcctcctcttcttctctttttctactacagtacaccacacaaattttttttaaaactaaaagttagaaaaatttatatatagaaatactatatataaaaaaattgaattcaaattcaaatttgaatcaggtatataaacttttgacttataaactttgggtctataaactttaggtgtataaactttagatgtatagaaatactatatatagaaaatatttgaattcaaattcaaatttgaatcagatataattcaaattcaaatttgaatcgggtatataaacttttgactttaaactttggatctataaactttagatgtatagaaatactatatatagaaaattatttgaattcaaattcaaatttgaatcagatataattcaaattcaaatttaaaacgggtatatagactcttgacttataaactttaggtgtataaactttaggtgtataaactttagatatatagaaatactatatataaaaaaatatttgaattcaaattcaaatttgaatcggatatataaacttttgacttataaacttttggtctccaaactttagaagtataaacttgaggtgtataaactttaagtatataaatttactaaaataggaaagtaatgcggtgccaaaaaaaaagaaaccaggtagaggggtggagggagggagccagggagggaggaggcgatcgatcgctgatccatccccagagcgatcgatcgccgaacaggatttccagtttgttagggtgtacagcgctggtacggtcaaacagcaagtctcatgaagaaaataaaaaacaatatgcatggaagaacattgataacttccatttaggaaaacaaatgagatacagggagtagaaagtaaaaaaggggcagtaaatatctgtcaagtgctatactgacatggacccctttttattgaaagcagatgctttgacttaattacacatggagttaatcactgacatgtagatcccactttgctatggcccatatatcaatgcttaaactggataacagcttagtgagagaataccttttcttttattaatctagtggcacaatggatctaagggattatccaaatttaacttattaaaaccatgctatctttacaa

SEQ ID NO: 28771 - DNA, 1252 bp, Oryza sativa
gggtgcgccagcctcacacacgcaaggacgtggcacgccccggtgtagatcccgttagacgtctcctctccgatcctggctggatacttggaggggatctcctccatcgccgtcaccagctccgcaagagaagacatcagcgagaactcatcgggattcgccgggatggtagacttgataccgcactccccggcgagctggtgcagaccagtatatgtgacccacaacgagccacggatttccgacaagttgttctcaagctccgaaatgcggtgctcgagcccctgctgttgtcgctcattgccggccaccagttccctcatcttctggaggtcctcgcgaacctccgctagatcacgcgccagccgattggcgcgctcattcgccgacgacgcagccgccgccctcgccttcgcgatctcgtggctaacaccgtgaccaccagcctcgaggaggcgccccatctcaacctagagctcctcccaggtgaggacggcatccggcgaaccacgaccagccacgagatcgctggctgggccgctaggtgtcgcctcatggctcctgggcacgaccacgacatccgtcgaggccacggcaggagatgcgctggaggtccctccagacccatcttacgccgccttcgcccgcgccgccctgggaaaggctgcgattgagacagagtttgacgaaatcacgaaacctcaaatttattcacttacttctcgctgagcgtcacaagccgctgtcgtcgcggaggcgggggagacgcgtccgaggcctggagtacaatcgatatgatgtgaggtggaagttttccgactacgtgatcaaataacgggtgaacttactgagggagtgggtatcttccgacgatgtccgactatagaggagaatttcctcccctttttcggaacgtcgccgccactcgtcgtggtagtggcaacagcagcgtcagacccctccttggcgaccttctctttcagcgacgccgccacctgatggtccacgagcgacccgatgatatcagtcagagggagagccaacgtttcatgaagtcataatgtgatcccggaagaaagatgcaaaaggacagctaagtacacttatattgatggcagcgtcgcgctcggctacccctttctcgcaaaggaggacggggacgttgctcgccgttgtcgggccgctgattatcagttggcggacgcggcgctccacggttgcgctattcaagcctgtagattgagaacagaat

SEQ ID NO: 28772 - DNA, 772 bp, Oryza sativa
tatcgtcggaggttgtcgaacgtttcccgcagatcgtcaatcaaggagtcgcttgccttggtcttgacaacaatgtcatcgacgtaggcctcgacattgtttctgagctagtcactaagtgcaccttagaccgtgcgctggaaagtgtttcctgcggttattagtccgaacggcatcttaacatagcagaataccccgaacggcgtgatgaatgctgtcttctcctcatcctcttttgccatgcttatttggtggtaaccggagtaagcgtcgaggaaactcaacaactcgcaaccggctattgagtccaccagttggtctattcgaggaagaggaaagtgatccttgggacacgccttgttgaggtcggtgaaatcgacacacattctccacttcccgttggccttccgtaccatgactgggttggctagccactctggatggagtacctctctgatgaaaccggctttgagaagcttgtcgagctcttctcgtatggcttgttttcgatctggtgaaaatctccgcagtttttatattactggcttggcatcgggtcgcaccatgagtttgtgctcaatcacctccctgggtaccccaggcatgtcggacggctgccaagcgaacacgtcagcattgtcgcgggagaaggtgatgagcgcgagttcctatttctcgcctagtgaagccccgatcttgatggtcttgtcggggttggcactggatagtggaacgatcttgattgcgccgtctggtttcggcgtcttgtttg

SEQ ID NO: 28773 - DNA, 1025 bp, Oryza sativa
ccatgaacgtgcaaagcctttaaatgcgggtggcaagtaattcactaacgcgttgtcgtccgctccggcagcgcagaataccgtggagtaaacctaaaggaactcttctgggtcggcgctcccatcgtatttctctattgctccaggtcagaatcttttaggccatcggacattccgaagtgaacaaccgaaagctctacacccaacgctgggggcggtgggttgttggcgatcatgcgtccttcgtggatgtctatccgatgatgaagatgacgaggatgatgacgatgacgatgggtcgtctagttccggcgtacgattacggggacgtcggccgggttctcgagaatcctgtcgtcgtctcccgctgttatctcggtgccgatctccatcatcaccgtcattattgcgacgtcctcgaccagtatcgcccagtacccgccgttcgcgatcgttgtgatcgtggcggttgtggcggttatcatggtctcggtcttcgcttgaatgacctcctcgatcttcgttatcgtgacgccgtgaagagatatgacgccgggaacggttctcgttgtctcgtgtgcgtcgtgcctctcggcggccattcaggtgatcgcggagatcgccggtgccgcgaggtggaggggttgctcgatgaggtgattccgccgttcagggtcttcaccatttgcatcgcaagttggtggctgtttcgggtgcgctgcagcagcggcctcttcgaacgcgttgctgaggttggtcactaattgcgttgacggctctgatgtgttgggccggagtagtcacttgattctccgcttccgcattggtgcgtgctgacgtgccgacatcgtcgatagccaatacctcacgaggcgtactcgttgtcgatgatccatagtcttcgagtaggtgcaagactgatggttcatggggatcgatgtcgattaccccaacaaatcgatctgaaaccggcgtcgctccttgttccttgtcctcatccctgatggggatgcgtgactgctgga

SEQ ID NO: 28774 - DNA, 862 bp, Oryza sativa
acgctgttgtcgacgaatctggatgtcaaagtagtagaaccttgagcaccaagtccccctacctggcgcgccactatcgacgggggatacccgtagaccggatatagagggtattggggtacgctggtacgaggatgtacgtagtacgacatcaagcaaacaggaaacagggattatactggttcaggccccttggtaggtaatagccctaatccagttgatatgggattatatgatggaaaccacatattacaaagggaatagtaaagctcgacgataccgacaggatcgtagtcgagttgatccgactagatctcccggcgacttggcttcgataagctctggcttcgtaggctgtggtagatgtgttggctctaagatttaatgccttaggtcctcccagggggtcccttttataccgtaggtcaactggtctccatgtcggactcagagacatcggacccgacacgatataatgacggccgatttctatccgagtaggactctttccatctgtagactccatgatggacttccttaacctatgctgagaacgtccgtatacgcgcaaacatactatatcgatacgtgacgtatatcgaagggtagagggtataccttacccgtaaccctgatagcgccgggagccggagccgctgtgaacgacaatatcaacggaggcagtttgcctcacaatccagcggagagacattcacagggtataaccttcgcatactgttaattcaatttttgatacttctgttagtcgtaattctattgcgttcgttgtatggtcatgatgcttattatatcttaagcatgcttctggttatgttagattttatcactagatcaccccact

SEQ ID NO: 28775 - DNA, 802 bp, Oryza sativa
ttattggtgaagacatataatgagaagagaatgaaggaaaatctggacattttcaactgggagctcacagatgaagagagggagaggatcagtcagctgccccaactgaggggcctgcctggattggaattcatctctgaccatgggccttacaaatcagttgaagatttgtgggatggtgacgtctagcaagctacttagatacagtggagtatatatctaaataatcatgatggatcatgatgtggatctatcttaattatgtgcggcaggcatgggcacggcaccattcccgtacacgttctgcgatcaattaatgtatggaccatacatgtatattaattgctgtatacctatccacttatttaaaacacgtcgacacgttcacgaaaaatggttactcccctggtatacatatataggtccatagatgatgcattgcaaatttaattagctacctagaaatttatttaggatgctaaatttaagatggtagatttagtttaaatgtatacgactcttgatctatttttgttggatttcactccacccgtggttgggaactattaattaattccctgggtctataatgattttggatgcattcccgacgagctaatttcatttcactatttttgttgtgattttagatacatgtttaaaattttgggtttatttttaaaccacctatctcctttacttgcagttatttatcattcaattagtgaagcataaactcattcgatattctgatattaatcaaaattaatattatttaatttcctttagaaagaaaacattt

SEQ ID NO: 28776 - DNA, 664 bp, Oryza sativa
cagataaataatttagaaaacagttgttcacagaatttaaggtaagagattaaatggtcataccatgttaattgagacttcaatatttaatttgcggtgcagatttgtttgaggtggatgtacgagcagggtgatgttttgttagtgaagacatacaatgaaaataggatgaaggagaatcttgatattttcgactgggagctcactgaggaagagagagacaaaatcagcaaactcccccagcagaggggtctgactggaatgcagttcgtctgtgacaatgggccttacaagtgcgtcgaagatttgtgggatggtgcttaacatgtcgcaggctggccctatgcaccaataatctggatggatcatgcttgctggggatctagcaaaataatttgtaattcaatattaatcttctgtcttctcgcaaaataattgtgtgaaatggagcgccagatgtgctcaattgttatctttcttctattcgtaatcgataaatatggtattttccaaaataatattgaaatttcgagatattgataccgaacatgaatacttttttatctagcatttcttaaaaagtcatcaatagatatcatcttggtcacagcctaagatggtcgtttcaggttgatgtatgagtattgctgcaacgattttacct

SEQ ID NO: 28777 - DNA, 559 bp, Oryza sativa
cgggatattttctcggcttctgcgtcgtcctcgggcaactcttcgctgcttatgaatttaatgagtggggtgcgccagtcgtcggtggtctcgatatcggcaacggcgcgctctgcccctgtagcccccgaggtggtgtcgggggcgaccgggctatcttcgccgcttgcctctttcactgatggcctcgtcaggacgtccagaaaggtgccaggttcaagtggttctcgtctggacgcacatcatgctagatcatccggttcgatgttgtctttacggtacacatgtcggacctcgatcccatcgaaccttttttctagcttcatgacttctgtgagatacttggataactcggggttagagcacttgtaatctttatgcacctggttcgtgactagtttggaatcccctttcacgattagtcgcttgactctgagtgcagctgcagctcttatcccggcgagtagtccttcgtattcggctgtgttattggttgccctgaagttgaggtgaattgcatgcttgaattgatctcccgaaggtgatgtcaagatgaatc

SEQ ID NO: 28778 - DNA, 4802 bp, Oryza sativa
  unsure (1)..(4802): unsure at all n locations
gaaaatctggatgaggatgtgtacatgacgcaatccaagggatttgttgatccacaatcagctaaaaagatatgcaagttgcataaatccatttatgggttgaagcaagcatctcggaggtggaatattcattttgatgaagtagtcaaggcgctgggctttgtcaaaaacgaagaagagccttgtgtatacaagaagattagtaggagcgcactggtgtttctaatcctacatgtagatgacaaattgttgattgagaatgatattcctatgcttgaatccgttaagacatcgttgaaaaatagtttttcaatgaaggacttaggggaagcagcatatattctgggcataaggatctatggagatagatcaaagaggctaattggattaagccatagcacatagattgacaaggtgttgaagaggttgaacatgcaagactctaagaaaggtttcttgccgatgtcacatggtattaatcttggcaagaatcagtgtcctcaaacgactgatgagcaaaacaagatgagtgtgattccatatgctttggcaattggatccataatgtatgccatgttatgtacacgtccagatgtttcatatgtatttagtgcaacaagccgatactaatcagatccaggtgagagtcactggattgttgtaaggaatatcctaaagtacttgagaagaactaagaatatgttcttagtctacggaggataggaagaactcgttgtaaatggttacaccgatgcaagcttccaaatcgacaaagatgattttagatcgtagtttggatttgtgttctgcctaaatggatgcgttgtgagttggaagagttccaagcaagatacagtcgccgactctacagcagaagccgaatacattgctgcttctgaagcagcaaaggagtttgtttggataaagaaatttgtttctcaactgggtgtgatggctagtgttcctagccctgtggaccactattaggataatagtggtgctattgcgcaagccaaggagcttagatcgcatcaaaaatccaaacacattttacggcagtatcaccacattcacgagatattgggtagaggagatgtgaagatatacaaaattcatacggatttgaacgttgcagatccgctgacaaagccactccctcagcctaagcaggcacacactagggcaatgggtattagatacgtgcatggttgactctagtgcaagtgggagactgttggttatatgtcctagaggcaatcataaagatgaatgtatcacatactatgtttacatatttatccgacattgtttgttgaaatagataactcattattggttatttaatatgtgattctttcatgagactctttatgttgtatattgctatttctaaaggatccctgatcaaataccatatgtggaacaaatatgtttagctgatcaatgcatgtattaattgatgatcatgtctcatggatcatggtatagagatactaaattaataatgtggacacatgttggggaacatgttggatagacccaacatgagacaccgcaagagccgtatgtgttgtgtcattagtgatctcatttagtcttcgtattaaatctttagacctgagattatcatggttctncacatgtatagtagcttacttagggactgctaaatgctactctgtaattgggtaagtttattttaaaaaaaaaaattaagggggggttctcggtatgctataaaacatatagtgggatatgaataatcaagatgagatttgcccttctatggagagatatatctgggccccctcgatcttatagattatagaagtgcatggccatgcaaaaggtgattgaggtgtcaatcacaagtaatataatctatcacaagtacgagtgaatggttgagctattagaggatgacacatatctagccttgagcttaatctatattgtgaggccaaggggtttatacaagtttacactagaggttcaaccgatatgatctttatgtatgctcggtgggtcaatacgttctgctaggggccgctgttgacacgtggaccgaaaaggagctttcgggttgcagccgagtatatatatgaacctacagggtcgcacgcttaaagggccggaataaagggattggatagagttccaatatgcactcaatcggatagggatccgagtaggactcatatgggcctcaaaggcccaatcgtggatccgatatatttgtgaggggtgtgaccgccggaatcaacacaccatgtgaaaccctagccgtcactccccttcccgagaaaaccctagccacgcgcgggtgctagcacatctgcgcgtggtgttccttccctggattgtggataccagtaaaggcgccgctgctttgtggtgctgatcggcttgggagcacggtgaggagaacgcatgcggaggaaaaggtcgagccggtgcgatcgactacttcctctacatcgacgcacactacatcgcgaggattccttagccttcttagcgcttacttccgctgcacagcacgtcgagtggtaacgatatatgatctaatactcgcatggttcttggtttacgcgctagaaaattttgatttatgctatcgtagcctgcgcgcattccaacatggtgctacactggtgtgtgcattgttgacaggatcttatataaatgagttgattgatgaagtgtctcaagaagataagaaccgatagaagattatagagggagaacgtcaagcgccacatgatagctttgtagatactggcgtgggcgtaattcaccgcacgattgatctgacgataaaaagtcgactcggctggggtggtttttgtgcagtaatttgcatgcacccacccgtgcgtatcgtgggagagggagagacggtaattggaccaattaggatggaagggcttggcttacaaacatactcttgtatattgtgctcttcattgcacattagcaattagtgaatctgaaacctcaattgtagatctaatggctagattaatttgaggtgatgtggcacactgtgggatgagagaattagagttagtggggatgaactatataagtatatagcattaactcaccataagtaaaactgttatttaattcaccataagtatatagcattaattcaccatgagtatctaagcaaacaaattacttatgctgatatgacaaatatcatacgcttattttctatcatatgataattttaaggtttgcaatgtatattttcccttgaaactcctccctagtattcacaactacgaaaatgatttcaggacccatctcaaattggccggggaccttactaggaatcagtgtgttgggggaagtggaggagtgccctcgcctcctcattttttttttacatctaataacctaatctcttctttctataaagctaatacggtaatacccactaaacaattaaagcttaacatgtaagcataatatttattagcactcctgaaacatacataccacatcaacccattaataacacaaagctcaacatgcaagcatataataattattatatctacgatttatttcattctaaaactaaacgtacatatgctaaatcatcattctcaaatcacttttataatatttcaattcaaataatttcatcatttctccattatctatttatctaacatacttcccgtagaaagcacgtcacttcatctagttagataattaacctaataacagtgtattaaactctctccaacccttagttctctcctatgtctaaatcgcgattcccccactgtcggcaatgctatcgctgtcggttttattagctgacactcactacgccagatcctcacacctctgacgggatacctgtgacgggcaaacgaattggtcagtattgaccattacctttgacgggttatacgggatgccgtcaccggtgaggcatctggccgcggcccgtcacaggtatcccctcacctgtgacgggccgaaaggaaaacccgtcagaggtataccagtgacgagtttttcttccaacccgtcactggtatcccctcacctgtgacgggccgatacattagaagccgtcagaggtgatgggccgccacctgtgacggctttcatttctggcccgtcacaggtgagcggataccagtgacgggccgttgaatagaagcccgtcaaaggtatgagcaatacctttgacgggcttttttttatctaacccgtttgaggtgtgttgggtctataaatacccccaaactgccaactgctttccatcccgaccattgtactgttcacaaatcggttgggagggcaaggggggcgattttttactaaaattcaaggtaaaaaacacattattctccattcattctcaacatatcgatcatcatttatttttcttcgtatgttgttgatttcagatggatcgtagatggatgtactatgcgcatcgttcgtctaccgagtatagagagggggtcactgaatttgtcacatttgcggataatgacagaaaaagtaggatgagcatgcacatgttgtgcccatgtagggactgtaagaatgaacagatgatcgaagacaaggatgaagtgcatgctcatttgataatgaatggattcatgaagaaatatacctgctggaccaagcatggagagcaagaggcgcctgatgtcgcagctgaagaagtgttggatcagggtgtagagaacaccgccgcagctcgagaaggcatgttcgtaccttctcctttaggtggagaccatagatttggacactcaatgtct

SEQ ID NO: 28779 - DNA, 8575 bp, Oryza sativa
cgatattaagattttttatgccgtaaaaaatctcgcatgtacccacatgcttcttcacaagcgttcttttcttgataaatatttgtgtaggaacttatgtcacaagaatagaaaattttgtcatcgaagtaaaaggttttagtcttttagacaataaagttattacagtagaaagcttgatcatttgagtagaaaatttcaggaaagtttgagtagactactttttgaattcaagcaaaaacactacaaatcaagcataagttttcatcactaatagaaaaaaggttttcgctgatggtggcgtaagccgcctcagtaaaggccagtaaaaatgaagacaactgaccgcctgcgaaatacatttccacaggcggcatgcttaagatagcaacatatgaaaattatatatcttcccaagtagctccattaggccagcatctaggaaaaaggatttccggtgacaaaaaagtgaattataaaagtactatttgtaaaaattcacaaatcaacaggtcaaaattcacggggcatataccaaacatcctcaaattttataaaattcacaatgcaattccaccaccccaaatttcacaaatgcaattccaccattccaaaattcacaacataaactcaagctttccacacatcccaaattcgcgagccctatccgctgtcgctgagctgccaccactgagcctcgtccaccgccggcttcgtgccctttggcagatttagactggagtggaggagagggagatagttgaggcgaagcagagggatttaaggacgactgattataaagcggtgatacggttttttttactggtggacctctttaggctccgcctgcaaaaaatatattttcagatgcgggtctagaacaataggaactctagttattttaacatttatggttcgcctgaaaaaaatcaaacctaagtgctttgaaaattcgttttatagtagtgtttttgaatgttttggattaaaaatattggtattttgaaaaaaaaatttctagaatagaaagtttcgataaatcttatgcactatcagaatgtatatttattaaaaaagatatggcataactaacatacaagattgatcccatcttccaatagacattatgcgctgcacgcagctaggacggcagcgaaggaggggtttgggcctttgggggtggggcggtaagccgtaccaggatcttccagatgacgacccacggctcggcggcagtgctgatcatgccgccgcacggagttgtcgcggctccgtacggcggcggtgagcactgagcagtgtgtcctttgctttttctggtgccggcaggattttcaatgggcctgcctttgctcttgggcttaacgtttgccaccacaagggcccatttacaggagtaatttggacaattgagatgacaacggatttggatctcaattgaatttctctaatctactgatttatcttcccatttcttctaccctatatctaccctataattcaccaactcactcttacacctatctaccctataattcaccaactcacttttatacctatctatctaccctataatttactaactcacttttacacctacattactcattcatcgaatccgacaatccgtactcatccatgtggaatccatccgatgatccacagtgctcattcggccccacccccaccaccacccccacccccacgcctcccggttccccgatccacgcacgcccgactcggcgactcgcacccccacctcaaaacctagctcctcctctctctcgcatcaacacaagcgccaccatcactatgccgatggaaggggagtcccgtgcgcccgaccaatgcttcgcatcctggtgagagaaaaagaggtaacctttctattccacgaccacggcgaaagtttggatcttgattcgaaaaaataggacacttttctctcccttgtttctgagctacaagaaatcctgttccgattacaaaattttcatcttttctgagaaccgtgagatactgattcttggagatgttcaatagtaaattagtccatagattatactctagactaaaattaggtttaggagaccctccccggattgatggatcaattgatctcgtgtgatgttaatttcagaggagggaaaatggaggtacagtcatctggggggggtccattgaagtgctcatggagaaggtcctgtcagtgaacatcctctcctcggactacttcaagagctgtacaggctcatgacgtaccacgaggtcatcgacgagatctacaactaggctgaccacgttgagccatggatgactggcaactgccgcagcccctccagcgtcctctgcctcctctatggattgggacccctgacgtgaagtcagagggatatggtgactgacatgtggggtccaccacttgtgggcccacatgttagtgaccacgtcacgtggcagtttaagtcagaggagcggcgttcgtcctctcttcaccatgaagctcacggttaagcaatggtgcgccatgttgtcatggcgggattatccccattgacgcctatgggtagtgtcactgccgcactccgggtcgcaatgatacctttgtgtcatcggtcatgctgctaatccattatataattaaaaatttaattctttgtattttccttcttatgactcttaaatatatattttatttcatgctttcttgtcaaaacagatcatgccttttgtttgttccatttgggctattatgtcgtcataatgtttattaggagttgttcatttttcgtgctatattaacattcttgttgcaagtaatttacagtcattgactgtttagcatcatttgagccactgtggttttaaattgatatataatttttttcccttttacaacgcacgggcacccaactagtatttaataaatacaaccagtgctgtctcgaaaagaatttgttcgtcactcaaacttcgataggaagataaatcagttgatttctcaaattcaattgagtcccaaattgctcatctaaattgggccttgtgtgtcaggcccattgaaaatgcagcgggcaccaggaaaataaaaggaaacgtcacacgcagctccgccgcaaccgtccactccgccgccgcgacaactccctgcggcgaccatggcgacaagatcagcgctaccgccgcgccgccgcggcctcccggaggagctcgtggtctgggagatcctggtacggcttccccctaaacccctcctccgctgccgcttggtctgccgcgcatggcgccgcctcacctccacccgcggcttcctcctcgcccaccaccgccatcaaccctccctcccgctcgtcgtcggctacggctgcgacggtgggagcctcctcgacatcctcacccttgaccgccgggacgccgctcggccgcggctccatcccgtggtgcggctcaagaacgccgctcacttcgtgagtgcatcctgcgacggcatccttatcctcaacatgaccaactgcggcgaattttactactcggtctgtaacccgaccactcgtcaattcgctgatctgccgatgctcactggtttcttcgtcatggggttttaccagcaccgccccaccggtgaataccggcttctactctactaccagtttcggccggaaggttctgaggatagatatgcctgctacgtctacacattgggctccagcgaaatgccgaggtgcattgggtggatggaggaggttgcaacctgcacagctgttgtgctgctccatggtagcctgcattggtataattacaaaacagacaagattttgattttcaacaccgcatccgagtcgttctggtcgatgcgtcaggctgacaagatgaatgggaatgatctgtttgagattgatggtacacttggcatctacttctgtaatgatgatgcgacgatcgtagatatttgggtactgcaggattacaagacagaattctggtctctcaagcaccggattgaattgccagtcccagatataaaggggaagcttgatgatggtgatgattggagtgcgatggtattgtctgaggacggggatgtgcttgtgctggtttactacagacaatggctgctttacattggtactgatggcaagctgttggcgagttttcaacatgatgttgggtgccactacaatactcctctgaagcttaagcaaagccttgttccacatgcattctttccattgttaaagggttatgtcgtgaatgctcgacctttcatctgatgctggagcggctttgctagttgttggactcgtcttgagatggtttcttttcatcctggtgggtagcaacttttggtgctgtcttttagaggttgtggacactgttatcttgtgggatgtcaccttgctaaaatgtactcaaaccctgctgaactatgtaatatgcagtagctggtttgccaatctttttcacaaaaagagaaaaaattctgatgtctgttggataaggtggagcttcctgttaacatttgtttccgattccctgagtgcttttctattttataccatagaatctctctgaactggacagattgaagtttgagcaaaggaactatttttttttttacttcttagcagaactgatggaaaatattatccggtcaggaagctaagtttggtttatgatatcctgattggatatatgaaatatacatctcgtattttggtctgaggtggctactactcttattgacgagtggtgacgctgtaatgctccaacgttttcatgtacataatttacaattaatttggtgctacactagaaacatttgacaaggtgcagcttggctcgtgcttgtttttttcttgaactgaaaacttctgtactttttatctggcaagcttatttacagctgaggaagtgctccagtgctgtcaaaaaaaatagtgaaatggcttctttggatctaactgatcgatgaaatgtttagttcatattctgtttactactagtctattacattgtgttcgaggagtgattaagctcacattccatgcaacacatggttttatttttgtcttttttgcaggaagttataatgttcaattgttatgatacaattttattgacgatggtcagtatgttgacaattaaatgctgcaaactatgaagcaagattatagtataccttatgctgatcacctatatattcatttcagcaatgtactcttgcttcctgtttaaaagaactctagcatttccatttagatgcttaccatttgaagtgagctttctattatgtatgggtcactgggcctcatgatagcatcagtcggtgtgatattctcagtcataaaattctagaaaaggtaacttgcagtatgcttgatagaagttatttttgtcctggttcagtccacactgccctgcaactgattcagtatgctttttttttcacaggcacaaacgctctctactgctatgatctctcaaacaaggtaaacttatgtacagcatataaatatttagctcctcacagttgtttctctggtgcatttcccttgctggaatctctagtaatggaaatgaaatataggacaaatagtttgggatatctgattatattacaactttcactttccaccatactcattgtgcatttatttaaaactccagatcgatatgattgcgatatgaacctgggacctgttccctcaatcaattcgtatgtggatttctggttgaaggtttcagcattttcatgaaaattgtaagaaaccgagtagcaaaaaatgctcttgtctggttacatttgaagaagcagtggttaggacctctttttgttggataatcacattccaatgtgcctttgcatgaatttggtgaaagtttttaaagtacttcacttgcggcgctttggtccaagtctaatgttgtatttcagcttttgctgtagtgcctatgaagtgggatgcatgtcaatttacttcattgacagttacctatataatcaaacccacaatctgcccttctatgtctagagtacctacacacatgcatcccctgttctttgaatttctttagaaccaaagggaagagcctgagtttcaagttttcttatcgaaaaccagaagccacagctgcttatcaacaggttatctcaaatgcaaagttccaaggctgacagctcatttagaacaaactgaaaacccaagtagcaaattccttaccaatgtctctacttacaatagaagcccagtcgtcctccttcccatccctcactcattgcacacagcgcaacatccctagaaaaattgctagaaaaaaaaaacagaaggaaaagccggttgtgcactctgaaaaaaaaccgcaaaaaaggaaaagaaaaaggaaaggtggttgtagtgcgctttgaacaaaaacataaaatttgctaataaaaaagtaaaaaaaaatggtggggtgatagaaaatttgctaaggaataataataaaaaattggttggataaagaaaaatcctcattttaatggtataaatcaattgtaatgtacgggtatataactagtatgaacaaacaccactgtgacagcaaaacaccctagcttatctccttcactgtggcctgtgggtgtcgaaaccaccacatagcaaatacgtggatggatatttttgctcaacaactggacaaagcaactttgtttgctgtgatggagaatacataacacatgtcaagcagcgctatgccgcctctgttcttggaatgcacaattaaacctgaaatactcaagatattgtacagatggcctaaaatctcccattatattgccatgaatattctaattacttgcttttattattgtcttcttcatcttcggttcattcacataaattgtcagtttcaatttctagagtgggctggtttggatgtgcttctaccatgcacctgaaagcatcctctacggcttccacatatccaagctttgcacccaaacgatttgtactgacactgaccatagtgaggcaggacaggtgctggatgcctagacaaaaaccaccatatgttgacttgaaattagctacattgattccaaacgaaagttgtccaagccttggcatagatccagcttcaaacatcagacccgtatgcgtagattggaaagtgaaaggctccaactgttggaatccatggatgtcgctgatggcaatagatctttcattttggtctgggtctaaacataggtacaaatttgtcaaactgggtatacttccaaggacctgaagatcatcttgatctatgtccttaatagtaagagccaatcgccggatgctcacaagggagctctgccatatgttaaccatggaaatgctttctcctctgagtacaaaacttttaatgctatttagaggtagtaacaaggaagagaaatcatcgttgtttctcaagtgaacatgaatgctcagatcatggagattgcaggcttctagtttgcagagagaagatgctattatttccttgtatctcactttattaccttctagcctgtcaatatcccaatttatgctcaacctccacaggtttttcagctcacacagtccctccagaaattccatcgagtgtctgaatacatctatgcctactacctcttctaacatttgcatatttttgaattgatcaggcaactttgttccatcattgacatacagaacagctaatcgctgcagctgagtagtagatttaggcagttcttttaccgatgtagctatgacatctagcacctctagacatttgagatctccaaattttcttggaagttcagttatcttcttcccttggattgtcaggtacctcaactgagaaagtcttgtcacagtctcaagatgatggttttctaatccacattcagcacaaaaccacaagtccagcacacgcaaggtgctgaagttggagaaagtgggtagttgctttgcaccccaaaaaatagtagggatctaagctgcgataaattccagcttggagaaataattatgtctgattgctcgtgtccctgtatcagagatagtcgacgaaccttcatatctggagttgacaaacatgtaagctgtggatagttgattgtagcagcaaagttctcttcaatagacttggacaagaggaaatcgtggatggtgtcatggactcgacaactccgcgcttggccatcaatgcgtatttccaatggctggactaagcttctgttaataagttaatagaaataagaatttcccaatttatataggttttgtcgactatctccttgaatgaatccttcagctatccatctatctatcaaatgcattcgaggaatcctaaaatcttctgggaatatagtcagaaacaacaagcaagttctgagatgttgaggtaggtcgaaatagctgagagataatatcttatgccttaaaatctgaattctctgcaagtgcataaccaatggatctttgtatccgatcccattgatctgttttgttcttgttagccaacaggctagatgtggtaatgattgccaatggcaaaccaccacatttcctcaatattgcattcg

SEQ ID NO: 28780 - DNA, 4121 bp, Oryza sativa
aggcggcttacgccaccatcagcgaaaaccttttttctattagtgatgaaaacttatgcttgatttgtagtgtttttgcttgaattcaaaaagtagtctactcaaactttcctgaaattttctactcaaatgatcaagctttctactgtaataactttattgtctaaaagactaaaaccttttacttcgatgacaaaattttctattcttgtgacataagttcctacacaaatatttatcaagaaaagaacgcttgtgaagaagcatgtgggtacatgcgagattttttacggcataaaaaatcttaatatcgatgtctatttttttaaaaaaaaatgaggcagcagcttaaatgatgtaaactttcctttctatacaaattaatcggagcatcctcaaaattgatcaaaattatctgtaattaaacatgtgtttggctcttatatcaaacgcaagcgacatcggttgcctgcagcggccaccgtccactactactaggtggatgacactgccatcgtctggaaaatgggattaaattgatgggcaacgtcaaagcatgatgttcaaccaaaagctatatgcatggtactctggaaggaatctccttgtgccacacgtggtaaacacagctcatcctttttggcaacaaaagtacactacagcagtgacattttctcttgttactctttccttaatctgctggacttaaacatcattcaaatttgacttaaaaaggttttgagttgatctgtacggtacatagggggaaaacattagcacactaatttctagaaccgtcaaatcgtcaattaggaaaagatactgctgatgcgtttatctccttcgacatatagtttcaaccgtagtgtttgacaatgcactgactaactacgctgtcagtatgtgtatcttaagtcaattagaagcaatggcgtattaattgttttcttttttgcaccaaccgtcaaggaagtggaagaagacctcttcttaactgaacagttagactgaaaaatggtttccagcagaatcggctacgagaaaaaaaaatagccagggaaatttcagctcgtttatattgagaactttcaattgggaaaagttgcatcagcttaattggtaagtttccacttgaaagtaattaactaatgatgcataatgtgttggtccatgttaataagttcagaattgcaaatcttcaaaatttagcgaggatttctgtcgaattttggaccatctaaactcctccaagattcgggtcggcttccttttccatctcgggcgagtagtgacggttcttgcaatgtggccttgactagttagggttctgggttgggttggaattgaaggggctaagggaaaaggggaagacgtgctttccgggggcttagagggatgaccatgggtggtggaggacatagtggatggtgcactcggaccggcagcaaggtggaagtggtgcaacaggagtcgtactgatggaggagggtggtgggccggtgtcaatggcaggggcaaaacagaacgcatggttaggaggtagatctagtggtgaaaagccgccggagacaggaaagacggtaggagggggggcaccttgccgccgctggcttgacgaggaggctatccggggaggaaggggggtagactcgccgacgctgtttgtgccatccgcccaggtggcggcggccactactaaaaaaagatttttctggacgagcaccccaatagattacaaacggaccataagtatccgcgtctgcaaaaatcgaccctcttttttccatatggctccgtaacatatccatatgctaaaatccatttttccagatggcccgcttaacctatccacacacaaaaataagggtattttcgtatgcggggctcttaactcacccacatgcaaaatacctaaagattcccactcccattttttatatctccactcctctttctctctctctctcccataactctctcccccactcccccacttatccccatgccgtcggcggcggtggtggagggcaaaagaaggcgtgtgacggcgtggatctgatcgacgtgagcggatggacccggctgccccttgctccctacggtcccacgactacgaggacgcaaggaggctggtggtggcggcttctaggagttaagtttcgtgattttggggattttttttttttggatttttatttttatgtgcaggcaacataagcatccacacgcgaaaatcatatttttgcagaccatttagcacgtgcggctagccctaccgcacgtgaaaaccccttccgggccatttgcaaaaatcttttttagtagtgggcgagctcgcctcgtgctcggctgcatgctatggggagaaagcgaaggggtatgaaaatgaggatatggttactattgcacacaaatcctaaattaaatctagttgtccaaaatttgcttgatattaggtgggattttctgtcataaattggatagccactccctaaaaagtgcatagcttaaggtctaaggagtggcaaatagcaacggcactagttttctgcaccatcaaatggaggcagtggaagagaaagccatgcatgcatggcatcggtgaaaagaactaaaaattccttatgtgcacataagttcttgcgccccctacacgcccttgaatttttaatttattttgatctccactgttaatcactcccctctcgtatataagatctatcttttcatacaaacataataatgaagaacgaaggtgaaattttctgttataaaaaattgaaaaggacaaatgtgtttgatagaacaacatttaaaattttcaaataaattgcaatgacatttcaaaagggggaattgcaactatattttattcttcttctccttagaaacaaatttaaatatttttttaatacacatcaaacaaaattcaagatattttcatggaaagagagaaaggtgaaattgcctctaaaattttcatcaaacttcatttcaaattttatcttctcttttaacactggtggctagttcagttgattggtgcatgtgcgtgcctagtgttcgaatctccttcctggcaatgtttttctcttgataataaataaattgggttggcctgattgggacatggggtggagacattaaggagttttcccagaattatttcagaaattattgtaccaaaacagattccaataagggaatatcttaaaaacctacattattaaaaaaataatgtcttattaaaaactacattattagaaaattaagatttgtgctatactagatacatgtacatataggaaacatggtaattacagtatggttagtaattataactatattgtaaccatataaataattataactacataattaagtaattaactacttagagctcgaacctagactcgttgatagccctactccattgggtctttaacaatttctcaagcgtggatagaagatacatactgaaatgtatccatatatctctataatctctgtggaaagaaagaagagaagagagaagcagtcatttggattattttccgttcacaaactcacacagccacattgctttacgcggaaactagcttgcggaaactaattcgcaagacgacacaactttatactacgtcgctagtcttcatgcatcccatcaacacgcgtccacttctgatcatggaaaaaaatgggaatacggccacacggttgtccctttgcttttcttccatattaataataaattaaaaaactatgatttgaaaaaagcttcggatcggtcgactcagcaattagaatctcatgcaaccacgtgcttcctattacgcaaattttgctataggatatcgtaacttcacggttgttatagtataccgcacaaagtaacttttagagaagatattttataaacgtgataatttgtcaatagacaccataccgattaaaataataattcgcggttaaggaggaaagaaaaatcgtgtgaaatgtcagaaatacccatggtcccacctatcagggctctcatctctcttatttcgttctaccctccgacagtgccataggggtcatcgctgccgataggaagcagcacgcactgcacgggcaggata

SEQ ID NO: 28781 - DNA, 3924 bp, Oryza sativa
gtgttgcacgagcgtgacgatggcattttagcgaagcaacttggcggaattgcattacagcgaaacccatcctacaaagtgactaaatgtcaattttctcgtcatcaacacattcgaggacatcatgggtgccttcgtcaaggctacgtagcagcgctcaacccagaatgcgtgggggcatcaagacaacatgcgccggtgccggcacggatgccgacgtgagggccagcccaggcaacctaaccgacgtagacgctgaccgtatccttgcctagctcgacgcccatctaccggcgtccatgctgtacataagcttcggcaatatctcgcatctggcggcgaagcagacgctactacgaaaaccttttttcatgcgggcgggaaggatctttgcatgcggacatgcggttacgccaaccgcatgggcgagaaagtctgcgaaaatcacgcttttcacatgcggtcgcttataccgtccgcatgcgaaaataaattcggcaaacaaaaaaaataaaaaacaaaaaacccgaaccctagccccccgccgaccgccgtcgtcgccggcgccagatctgtcgcccccgctgcccaccatcgttgccaacgctggatcggcctcccccgccacccgctgtccacaccggcaccggatcggctacctcatcatccgccatcaaagtcgatgctggatccgctgcgagggaggagcgcccttggcgctggatccgctcggagcggcaccgcccgaggctgccgaaccgcccccaccgcagcggcggtgaggagaggagagggttgcctcgtcgtcgtcatcgtcggtggtggcggtgagaagggcatggcggtggcgccgctgcccactcgccggatccgccgcccgtcgacgccatcgccgcccctgctcacccctgctcacggccgccggcacatgctcttggagaggagagaaagagagagagacaggggaggagagaaagagagagaggggagagtaaaataatagagggggagagatagaggagatgggttgcaaaaaaaaatttgaaatcgtgggagggaaaagagagtggagggagataaaaaaaaatagggtggcatttttgcatgcggtcctcttaaggggccgcatgcaaaaatatgagaaatttgaatcgaattttatggtactaaatcacaattcatgtgaaaaaattgtcaaaaacaaagttatagaattcattgagatctaccaattttcttttggttatttctccatccgagattgattgaactatctaaaatttaattttaaaatataagaaatttaaacaattttttgggtagtaaatgatttcaaatgaaaaaattatcaataccaaagttgtataacttatcaagatctacaactttcgttttgaacatttttctatatgactctgtttcaacaatttgaatttgaatttcaaattaggagtacttcaaacaagattttgaaataataaatgatttcagctgaaaaagtcatcaacaacaaagttatataactcatcaagatctttaacttttattttagtcatttcttcatccgacaaagtgataataacatagttcacaaaatttacatatctcttatatggttttctaagctataagagagatatgtaaattttgtgaaaatgttactatcactttgtcggatgaagaaatgaccaaaataaaagttatagatcttgataagttatacaacttttgttgttgatgactttttcaactgaaattatttactgcttcaaaatattatttgaagttttgaaattcaaatttttaatggataaaacgaagtcacaagaaaaaatggccaaaataatagtagaaagaacacaataacatgatagagcatgatttaagaaacatttaggtaaaagaatcatccaatttggagttcatatgagtgagataaattagtttcatattttcaaattttattttctcatacggctccttaagacacccgtatggaaaaatcgatttttccatgcgggctcttaagcggtccgcatgcaaaattgagctcatttttgcatgcgtacctcttaagtggcccgtatagaaaaatcgattttcccttacgggcgtcttaaggagctgtatgtgaaaatgccgcttgatttttccagatgcggcaagttatggtccatttgcaaaaattatggggtctcatacagaaaaatcatttgtgtagtagtgagatcattgagctcactcgcgacatcgaggcatcgacccagctattcatctgggccatcaaggaggccaagccaccaccgccgccgccggtgtcaagggagagtggctcgatggcaagggatatgaggagcacatcacggataggggtctcctggtgcgtggtgggcgccataggtgagcatccttgtgacatcctggaacaattaggatgaggtctgtgtggcccataaaaactgtgtgcatgtttaatatcatcttgctagttttgcaagagtggaaccaacttataaggacttctactccaaacatatcactcccaggttaacacttttacatgaagcgagcacgaaagtttaagtggagtggtgtgtgtaagtgggccggtccgtccaacggcctggctacacggttttggaacgtgggttgttagcggttgcgcgtacgggtcagtatgcgggcatatggcgcatggcgcatgtgggtctatgcgaggcacattttttgttcttggacatttgcctatatgattgtgtcgctatgtgggtgagttggaccgatgaggacatcgggtcctttcagggaggtgtatgtgacatcctggcccaattaggatgaggactgtgtggtccataagagctgtgtgcatgtttagtaccatcttactagtttagcaacaatagaaccaacttataagtgcttctccctccaaccatatcactcctgggttaacccttttgcactaagtgaggatgaaagtgtaagtggagtggtatgtataagtgggcctgcccgtcggttgagctggattgcgtggttctggagggagggatgttacaatcctctagcacccagccacgggcgggttcctaacccactatgggtagaacgccgtgctggagggccatcaaccatgtcctgccggcactgacatggccaaccatcctcgactagttcagcgagcggttgctcgtttatgtgcttggcgttggtgtcaggtcgggtgtcaccacaccactcatgttcctccccaatgaggccgaggaagtgcaggttgctagcaccagcgtggaaaagtctgtggccaagctgatggatggcgacacggacaacacggctaggagggcacctggtagagagctcgctgtgagggccagggcggcagtaggtcgggcgtcaccaagccgctcatgtacctccccgtcgaggccgagggcatgcaggtcgccagctccgacgtggagatggcatggccaagctgaatggatggcagcacagacgatgcagctaggagggcacacgctagagaactcgttgtgagggcgagggtgatggttgtctgcgtcaacccctctcttgtatgcacgtgctgctttccgtcagatgctatgacctccacggcgccaacagaggggatataaagagaaaacagttcactagtggagaaaacatctttgcccggtcgaccaaaaaccacaatagtctcggatgcagtaaaaaccgggactaaagatggtttttagtcccagtttataagtagaacgagactacatgatctttagtcccggttcacatgctgtcaggtgttgtcaagcccctccagcatctttagtcgcggttgcagttacgaaccgggagtaaagatcggatctttaatcccggttcgtaacagcaaccgcgaccaaagatgctggaggggct

SEQ ID NO: 28782 - DNA, 6921 bp, Oryza sativa
cacccactcctctctccctccatctctaatcttatctcttcccttcctccttatctctttttcttcttatcccttcccaactccccttcccaactcgatccagtgtgcgcagcaggagggggtgggcggcccggccggcggagggcagcgcggcggcggcgcggagggccgtggcgacggtgcggcggcggccggggaggaggggaggcggcagccggctcagccggccggcggctttacttcgtttttttttattttttttcaaagaatttgtgatccatgtgtagattgagatgaagaatctgtggttcattgtatggattgagatgtataattatttttttggaatctcattgtatggatctgagatgtacatgatttgtgtatgatttgtatatttgggatgtttctttgatttggggtttgatttgggatgtataatctgtagtgtatatgattgatttgtgtatttgggatggtatgcatcccacctaatttgggagaaaataaattagagattaaatagtaagtaaatgaaaaaaaaactattgcccactcccatctttagtcccggttggtaacaccaaccaggactaaagatcgatctttagtcccgggtatttgaaccgggactaaagatagggatctttagtcccgggttcgtagtcccgatttaaaaaccgggactataggggggttacgaaccgggactaaaaacgatttcttgtcacaccctgattttcgtgttaggatttataaattatttaataaattattaatagaatttatatgaaatgttcattaatttacaagtgaagttaaatgtgggaaataaaatttcctaaatataaagcatgggtggatttaatttttattaaattctccatggttaattatactctctggaattttctcggatttttcggagctcaattcctaaatgtaaatgatacagagaacagttcagtaattatttgatcaataatgatctaattataattgttaagtgcttttcttgtttaaaatccttaaattataaattgttgtttaaaaggaattattagaaatgattttaaaagcttaaaagagaagatctaattttaatgtgctaaatctcaatataaaattgggttagataaaattttattaaatactttgcttgttcctctattttctagaattttctgggaattgtttgagcaagggaagtatttttaataaataaaacatcatttcacgaattatttttaattgaaaaagttcaaaaaccctttccctctaggcaccgacatgtggggcccacatgtcaggcccttcttcttcctctagcagccggccggccgagcccaagccgtcgcccgagccgccccttttctccctcaaatccgctccaatccggctctttttcttccgggtttttgaggggattttatcctctcgtcctcctctatctttcccctcaagaatcggagcaaatggttgagtatcttgcccgaatcaaactcgttttcgagtttatctccaaaaccgagttttctcggatcgatttcttgcgggaggagtccgatctcttcaatccaaggctataaataggaccccctagttcccctccttcgtttgccccatctcccgtggtctcccgtgctccgtagagtcgccgccgcgcgcacttagttcgccgccgccgccggccgtcttcagccacgccgcgccgtcgcttgcgtcgtcgccgccgcttgccgccgccgccgttaggtgcgccgtggtgaggagaacctcggccgcccgtcccctttcgccgccgaccaccggagctccgccgtcgccgtcaagccgagccgccgccgccgtcctcttcgtcgccggccatcatcgttcgtcgtttgtcgttgtggtgagtaccgttgggttcgcctcgtcgtcctctacgcgtaggtgtcctccaatcacccggccaaggtccctagctccggcgaggtcgccaaccctagccggcctccgtgggtgatgtcatgctgacatcatcatcctttctttttttcctttttttctaatagatgaaatcttcggaaaatcataactaaataaccatagatccgtttcaggtggttcaagttgctaaatttttctaaaataaagatctacatattaaaattatccataaattgaattaaatttatttaagtctttttaaatggactttaattagatttaatcttgtaaaattcataataaattcatttgaagtcggaatgaggccgttcaagtctcataattcatctaaaattatgatctacatgtttgtttactttttatgtactgtttatttggtttttattagtctttttcttcgttttgcgtgttagcttgtcgtttccgtcgttgcgaaggttcgtgagtgcgtcggaagtgatcaagaaggttaattgaagatcgattattgcaaggcaagtcacacagatcctaaacacaatcctttgagcatgttgatcctatatttaaattctctatttatttcaactatgcatttattttcgaatgtcaccgggtggtgtgaacctattcctttgttatggccaatttgcattgaatgccctattccttgataccttgggtaataaattgattagcttgaaccttatgtattggtttggttcagctaaaagttatatatataattgcttagcaatgcttagaaacattagctcactaatgggatgaatcatatatactacattattatttatggttatatttaatggtagctcacgatggttaatcgtgtgatgttaattaattgataattaaaacctggttaaggtgggttgtgagcatatggttttgatggttgtgctcatgacaattaaggaccggttcgcgagctactgttgtgagacattaaccgtaccaaccacaagccagcgtgggcaacggctttatcctttgtatagcatggttcattatagtgcgccagactgagaagtggcgagaagtccacgggggtcgctggggagtccatgccttgtttataagggggtgattatgatccaggaacggtgcactgttttgagttgtgttgtgcaaagggtattgtcacgatttccccctttgcaatgccgtggtggtatttcggggcatggcaacatgtgtggaatcgtgtcttgtgggtacagtggtacacctctggccagagtaaaactattcgaatagccgtgcccgcggttatgggcgggttgagcaatgtttttcgtgattagtctcacacctttcacaataattatggatgtaataactggtaataatttgcttagctcctggtttggagttagatctgttcagccgggtatggttgttcaggatggttgggcctgtacagcatgggtgtgctgttcagtgttgattaaaacttctgattaattaatctactgttttactactcttaactctttgctaaatgctgctttcgcaaatgagcctatattatgccatcctttggaatccttgtgcacttgcatatttgctgtgtggcttgttgagtatgtcatatgctcattcttgcaataatcatcaaacctcagttgaagataaaggatccagaaggagaagacgtttggcttataccccagttgagctgcctatgggagtggagctgaagccatcgctagaccgttaattccgctgctgtttttcttttcttttgtaagtatgtaacgttattattatgatggatttgtatattaaattatcagtttgtgtacctcggctgattcctggacgaggattttatgcacaaattagttcggaaattattagtgaatttccgggcgtgacatttctccactagtagttagtagagttgacatgtgggttcaggggtatttcttaacatttcacacgatttttctctcctcttcaacttgaaattatcattttaatgggtgtggtgtccactggcaaattaccatattaatagagtgttttccccccaaaaagtcacttctctgtctcctacaactaaaactacgaagtcacgatgtccctttacaaaatttgcctttctattgtcttgctctcccttcactttatctatgcttgtatgcatctagcaagatttaaaatatttttttcttcattatccgaccttattgtattcatcgtaattaaatctttataacaaaatattgcatgattatattccaatgaaagaaaaacatatgttttaaacggttaaaactcattgtttcatatgtgatacgacatgtttcaacatgtgttttcactatgtttcacaaaatttttaaatgtttcaacaactgatttttttttatcattataacttaatgtttcactcggtagccaccttcaaatttttttagaaatcaggtgaccgatctgtagtttcgtcagaataatttataagctaaacaacataaatcattttatgtgaaacaaatgtcactaagtagagaaataagaacattctatgtattaaaacattatatggaacaagaaattttgactattgaaaatgaataagttaaattttgaaattttgactattgaaaatgtttcctttggaatgaattcctctacttctccaacaaatcttctctattccaaagaagcccttaggcacattattattccatgggtcatataacaacgtcagtttacttgtgttcgaagtttttgattttaactgcacacgtgtctaaaagcacgtctatttaaacagggcgatatatcagttctcgcaacattaaattttagtgctaattactgtagtaatgagttacatcgtgaacaaatcctcgccggagctcgtcggcccgccgacaaccaagccggtggcgccgaccgtcgctgacgtcatcaacctatcctccttcgacaaagccattggttcctacctcttcacgtcgttccacgtcttcgacaatggcatcgtcgagccggccatgacgatcaagggggcactgtcccaagctctggtctactactaccccatcgccggccgactcgtcatcaccggagcggccgacggcggcggcgaccagctctgtgtctcctgcaccggcgagggcgtggcgttcgtctccgcgacggcgagctgcgctctcgacgacgtcaagctgttcgacccgccgttcgcggcgctgttgaaggagctcgccgtggcgcacccggcggcgggagaggccgaggccgacccgctgctgctcatgcaggtgacggagttcgcctgcggcgggttcgtcgtcggcatgacgtggaaccacgtcgtcgccgacggcaagggcatagctcagttcctgcgtgccgtcggcgagctcgcgcgggggctgccgcggccgtccgtcctgccggtgagctgcggcgacgactccctcccggagctcccgccgctggtcgccgccatggagaaggcgatgctgacgcaggagagcaagcagttcgcgtacctcgacgtcaccatcccttcgagcgtgatcggacgcgtcaaggcggcgttcgacgacgtcggcgacgtcgcacgctccggcggcgagccgtgcaccgtgttcgaggcggtggccgccgtgctgtggcgcagccgcacgcgcgcggtcttgatctccggcgactccgacgccgacacgcccgcgccgctcgtcttcgcggccaacgtgcacaagcacgtcggcgccaagcacggctactacggcaactgcgtcacctcccaggtggtcgccgcgacgagcggcgaggtggcgaacggcgacgccaacgacgtggtgaagctgatccggcgagccaaggagctgatcccggctcagttcgagaacggcggtgtcgccatgaacggggcggcggcgcgcgtggagaggcagctgatgagcgcgctgttcgggtacaacgcattctacgtggcgagctggcggaacatcgggttcgaggcggtggacttcggcggcgggaggccggcgcgggtgatgtgccatgtcgggccgacggcggtgccgagctgcgtggcgtgcctgcctcgcgacagcggcggcgccagcgttctgctgctgtgcgtaaaggaggagcacgtcgacgcgttcctcgcagagctggaaagtttcaaatgaatatatatactgtcttactggttgcttggtcgcctctgacgatgaagatacttctataaaaataaatgtaacgtcaaatgctagtactttctctagtttaataataattgttgttttggatggagatacagccttaggctgtgtttagattcaaagtttggatccaaacttcagttctttaccatcacatcaacctgtcatacacacacaacttttcagtcacatcatctccaatttcaaccaaaattcaaactttgcgctgaactaaacacagccttaaaaaaatgaaacatggagtattggtttctattacagtatatatagaaatatatgagatataattttattgaaaaacattttaagattaatctaattatatatggtcttcatgtttctaaggcaaatatttaaaaagttatttatagttaaagttttgaaggtatgacgtcagtcttgttcaaaactacaaatattttctactggaagaattacttaagattgtacaattgtgagtttcattctcgtctctcgaatgtgatgttgctactaataactatataattattcaaagagtaaattacgctcacggtacgtgaacttgtttggtgggtgcaaataggtacaacaacttaaaattgctcgttttggtataataacttgactagtttgtgcgaacataggcaaaaacaacccacgcaagcaaaattgatataacgtggtgcatcttggtgacacctttgcgggctagtagtttctttgttttgaaaaaataaattgcatagcagttgttttgtttgaaaaataaaat

SEQ ID NO: 28783 - DNA, 21619 bp, Oryza sativa
attgctcgttttggtataataacttgactagtttgtgcgaacataggcaaaaacaacccacgcaagcaaaattgatataacgtggtgcatcttggtgacacctttgcgggctagtagtttctttgttttgaaaaaataaattgcatagcagttgttttgtttgaaaaataaaatccgtactgcaaaaactgaaggtaagttagtgtactcaggtctgcacaactacaaacaatagctagcgtgcatatgtttcattatggtactacacattatatcaattttgcatgtttgtgttgttttgtactaggtttgcacgagctatgcaagttattgtactggaacgagcactttacaagttgttctacctatttgcacccacatcacaagttcatgtatcaggagtgcaatttactcttattcaaataaatgaaactgtatgtatcattgctcagttaattcaaatggcaaaactttctactcagttaattgtcttatcaacttaaaaaatacctattaaattaatttccatattaagtgtagagtaaattgtatccacgttataattaaataagttagcagatgggtgcaatttaacacaagaacttgataatagaacattcaagtgcaataacctgacaagatagtgcgctttaatatagaaacttggtaatttatggtcttttagtgcaataacttggctagacatgtgctattttggttaagagtgctatgtactcctaagttttttcacgatgtcagcgtatcttcacataataatcctgtagatattatcttacaatctttgatgtagtctgcaagaattgtgttgctcatggtttaattttttcttcaccatctcaaatctcaaccaaaaaagtttcaacacagtaaaatttcattgacttttaattactagaataaccaaaataagtatgcctatacaaatatgcataagtatattaacaaaataagtacttaaaaactgaatgagtatagccgaaaatgcttgaaataattaatttgttacaccacttcttataagttattgtaccataatcacccccacctttcaagttgctatatctgtacgctcacttattcttgtactagttgtgtccacttgttaagttgttgtactggcacgctcagttctcaaattcttagcactaaattacacccaattgccaagttaatgtaatgtgaatgtaacttacttagaaaagcattgaatttgtatcaacgaactaaggtaaaatataggtccataacaaagcactgatttttacatgtaaccagttagtttgcacgtgcaatgcatatttgtgtgatatttttgcggggatgttcgtgcagtataatgtgacaacatatataatcatactgaaaatatgaaatccttgcgttatatacctaacattcaacgaattgcctattgccttactaaaaccaatttggggatgtttttatacggtaggtaccgttcagtcaatctcatataacatatgttcaacattagttttttaacgactataacatattcaaaacttctgcatttgtatcatttttcttttatgatcaggacacgcaagtgaagtattctctatatttcatctgtagtatcaaaactgatttacaactgtacaaaataatgaaagaatcaaatgtgaaaagttggtgcaattgccctctgctcatctcttcttcactaaaatcaaggccacaaatgcaacaattctgaagaacagaccatacataaacagaaccaaaatacagagcatgtaatgatgaatgtcgaaacgacttctgaacaacaacccacagcgagttataagccaaactccaggatacctgaaatagaaaagaaaaacgcattaactcgagctgctaatttacaaatgaatattttggcagatgtgatgatgattgtgtatctagatatgatcatgcaacatgcaagcatgatgagtaagtaatacctttttgcatttacaattatgaaaccctctaatgcccactttggatagcataatctattgagaattgcaggggtattattttgagtggataacaaagtcagaacaactgggatcaatgcagaacactgcaaaagtttcagggttagtctccaaatatattattaatcagaagaaactgcaaaagttgaacaatctttatgatacataccagttgtgcagaaccagggttgaagcagatagcaaaagtgtatcctataccggttacgcagtacacaagtgcgaggagaatgatatagttatcggtaattgtagatcttggattattgaagtagtagaacatggagaggtaaacgatcggcttcacaatcgtgctgaaatgatcaattgtatccctagcaagaaagtatgccaatgagctcatccctgactctctttccctcaagtattgcaatctttcaagtgaaaacgaccttagtgctgcaatcttgcacaacagagctgcagaagtagtaatttatgtcagtcaaataatcaagttcgtactgcaatgacagtataatctgaatactctgaacttacaaactgcaattatggtgtaaatgtagccaggcatcccaaaatttggatcactgagctttgcaatagtacccagacagatcccagcaaggcctagtatcagaaaatcaactgcaagcaacctagcttcgcgcaacctctgttttgtgaccctgtgatgtcacacatgaaagaataacttttaatctttcgaaaattttatcattggaacaatgaaaatttgatcacatggttgttcaagatttcataaaaagattatatgcattgaattgaacataccttcctaggtagtacttgtactgtctaatcacccctggtgttcttctgctggacaaatcctttggtttagacaaatggtgctcgatacgatcacgctcttcagcaaaagcattcctgacatgaggaaggcaatgaggtgttgatccagctgaagggctggaccccaaatgtggtctctgttcacctattgccttgagatcatctttcatgtcatttggcacttcatagccattgtagagcatccagtgcaatggaaaatgcttcgcattgatgcctgactcaggcttcacaatgccctcaagaatgtcaatgtagtgatctggtgggttaactctttcagggacagtgatcccaagagttgagaagtaatcctccacactcttgaccggaccattgtaaacaattagacctccttttgccagaagtatcagatcatcaaacatgttgtacaatgtgtagctgaataacacaaacaagaaaatattagaaatctttcagaaagatgagtactatcttcagaaaaagatggtctgagagtaacctcggttgatgaacaactgcgcaaacatttacgccttcgagcgcctcatgacgtagtgctcggaggagcagttgtgaagaggagctgtccaggccagaggttggttcatccaggatcagaagtgatggctccatcaccatttcaatacccacattgacacgcttcctctgtccaccagagatcccgcgcttctccacagttccaaccaatgaacttctgactccctgaaggtccagggagtctatgaccctctccacagtgaggaccttgtggcggtgtgccgttgtcgcagagagcctgaagatagtagaaatgataagaatatgctgagctaattactgaaatggcaatctgatataaatacttcctccgtttcaattgttttgttttgttaggacaaggatttgaccagcaattactttattatgatatgacttatgtgatacaaacgcataatcgtaagtaagtacttttgaacacaaatctaacaaatccaattttgtgtcacaaaatcatatcccagtagagtaattgttggtcaaagaattgtcctaacgaaacaaaatatgtcttatattttgaaacagagatagtaattgtcaagtaaacttttttatattaataattttacctgcactttgcactgaaccaaaggttctcttccactgttaaattcccatgaacaacatcatcttgaggaacaaatccaatgatcttcttgtaagaacggatgttgtcatgcctcccattgacaagaactgaacctgacaccttatagccagctaccttccctgtaacagcattgaggaatgtggtcttgccggccccggatgggcccatgacggcagtgacacggccaggccggagttcgccattgatagacctcaacagcttcttctttccaagtgacagggtcaggtctttgaactcaaccttgagcagaggccttgttatctccttctgctgctctgacaccatggagagcactccagtgaaggtcaggttcttgttctcctgttgcctgaccttctccttctcgatctcaccatatgcgtacttgaagatctgcgtgtgtgttgatctgtgcttgccttttggtgcagatctatccttgccggcaacaatttctccatcatcgctaacatccacaacgactgaaggcatgacttcagatatctcaccagtgctctgatgagctgaaaatgcagcagaatccgacaactcctggttcataaacagtggtgcttcctgcaacctatggccagaattctccgagtccagatgctgacggaatgatctcctacgagagaatgtacgtgagagatgactctgcatgtcattgacatgcttcctcgccagtcgtttcgccgccttccatccctcatgcgctttgagctgctgacgtgccaactgaatagcattctccctcgatctcgctttccgtttctcgcggatagtcaggaactggcctgaacagttgtatatgatcagaagaaatacaaacaacatgccctgcaccaagtgttcaacctgaattaggcacattttccagtacagtctgcagtccattgcactcactggatcttaaaagaggcaaccatcaagctagcaagatagtgaaatgatgactttgttgatggaatttaccactaaacaaccaccaagaatgacaatgttttcattctctgtcttctccttgcaggatccctttatgatacattctgcagattttgaataaattcagcttgctggatggtagatactataactgcatgattcaataagaaaatgaagtatcaatctattttaatgatgcttactgtcttgagtggtggaacccagtctgcaatagtgcctgaaggggaggaaaaaaacaagaatcatcagtcacctagtgtttaaaatcaaataatctttgtaatatatgtcaaataagtcatacaaggagtatgattggatcagtacccttcgctacaaggttccttttttgttggtgttggacagtagtaaccggctggacagaacatctcttcagtgctcccaaaatcagcccatgtgtcagcacccccgcagccagttgtatttggagttatctgatacttgtatctaatcaaagttcagaaaattcaccttgtaagcattgtgtttatattttcaagaaggcaaatgcagaacaataagaacagaattttttttaaaaaaaaatcttacggatcacaaagaccagtggttgtgttcacagtggcacgcggacagtatgatcccaatggacaagctaaagcaaaaaaacaaacatgaaactcaagtcattcagcaagataaatatatggtctccacacaaattaattgacaataagaacagccatgcgggaaatgtagaaatcactcacgcaacatgcatgtaagaccacggggacagaagaagccttcgcaacacggctgacaacttgcagttcttggtggaatattgccttgggggttagggcctgaacctacagagcaagcccaccctggctcacagccctgaacccaagatgatctgttgcagtttatgttggttttcagaaagaggtttttttcgccttttcgatcatacaaactcgagaagtagaatttcacttcgttcggtgtgcacagacgccctcccaaatcacctgaatgaatatctttttcacattagagaatgccaaaactagacatgttcatgggcagcctgacctgccttggtaaggaaaatgatgttgtaaatcattttttttaaggagaaaatgttgcaaactagacatgttcagtgttcaagcctcgcatttcagcgtggaagcgtggtagtcacttctatgatataatgcgaaaataaaacatgcgacttcagacttaatcataatgattatttttgccacaatcaacggatcagaggcataatcataatcataatgattttgtcacagtaccataaggaaaatgatactgtaaattattttttcaggctttgtgcttggcattgccacaccaatcagtgttcaagcctcgcctttcagtgtggaagcatggtagtcggaattagtcacttctatgatacaatgtgaaaatgagatatttgacttcaaacttaatcataatggttacttttgtcacattcaacagatttgtcgaattgaaacaagttactatactatatcagaagtccagaactgaatctaactaccgaattggattgttgtgacatgtaaaataaataataagtgcaggataattagagataggaacaggtcaaactgtctagcttcttaagactaaacaaacgaatagaaaatattagttagagttgatcacgtcaaacaccatagtcccgtgtcacactcagctaacattaacaagttataatgttagtctttccctactaaattacggaatggatgattattatagggttgcatgctccacttgtcctccatcagatcgtttcatcctctgctaagcactcctactaaacaatgttcaggaaatgcatgtgcaggtgaacaattccaaagaaccaaatctcaatcagcatatcccaatgtcgcatctaggacataactatgaatattataagaggtgaatattagaaactagattccaaaccaaaattaaaaaaaaaagaaaccgggatgcttacaaagcaagcacaaacagtatacgacgacaaaatatttgcgagtcggcttagacaaccttgaattaggatctccgaatagaaaaccatttctaagaatttgaagtgcatttatgctaatgactgaattctaatataattatctgaattggcaccaccgcaccatcgaaaaaagtagtgttatctgaaaaccaatcacttgaaattacaaaaagaaaaagtaaaccatgtgcttataaataaaaataagttcaaaactcaggttggttcagttcattagattggagcatacacggataaatattcgattaaaaaatgtgtaagcatggccgtcacattcaatccgctaaattcagatgggaaacaaataaaaaaggagaaaccgcttcaacgatgaagaaagcaacacacgaaccaatcaaacaagcaatcgaacaggaaatctaactgaatttaaatttaattaattacctcttgtctccgcgaggcagttctgcacgaatccaagatccgaggtgtaattgaaggcctcattccaatcctccgtcctgaagcgaacacacaccaaaaccaaccaaaaatcatcaacaattccattgaaatcaagaaagctaaaggaaaaaagttttaagaggtcggcggcgaagaacggcgccgccgaaatgaacggggggtggggggagaagagaaagaagagcgtacgggtcggcgacgcagaagctgaagcggtgggagatgtagtcggcgacgtctctggtgaggttgttgagcgcatccggcaccaccggcggcgccgtcgtctgctggccgcgcgcgacgccggcagcaagaaggagcagcagaagcagcggcggaggtagccgccgaaaggcctcgccatcgcgcattccggtgcagacaggatcacacagagctatagctagtctcgcacagcagatggcgctgcctgtagctcgccgaggcaacaggggatggatggagatggatggaggaagcaacggcaaaagccgagatttatccgcgagaggagaaagaaatctccgcggtgcgtttgaagttgaaggattccaaggcggagcacgtttgctggttgggaggtgggggccgttgatgcgttgggtatttgagactgccggccgtgggagctagctgctgcagcttgcactaccttcggccaatttttatctacctagtgctatgcccatatgctttacaataggattaagaaaagtacgaacggatggtggttttatggttcagatttatctgtttttgtttttttttctcaaattttggtacgtggtttttttggtggtcttttcgacgtgatggtttttagaccgatgttttttttctctagtggagactggagaagtacgaaggtggagggagaatgacaattactaccactccgattttacagtagtagatatttcacctcaccatttctagttcgcactactctaccgttttacccaacggcttataagcagctatcaaattttgaatttttaaaatttaacttttgaagttgatttttcgtttttttttcaatgtaatttatttttcagcattaatttttaaattgggaagaacacatataaaaatgttttctcttaaattattttttattgatgataagtcttacggactgatagttacgactccctccatcctaaaatatatgatttttttttcattatagatgtaataagataagttaaatgggaatggtcgtgatgggttgacatgagtatgtggagaaattgttgagacaatgtaatactagttggataagttgttatattctatgataaattttaaattataaaaattattatattttgagtagtaagttaacgataaatccgtaaacctcttacttttttataaaaataaaatcatatgtacataacaacacggagggggtatgtaaaaaatcactcttttttttaattttactgtactttaaaatctaagaaaattccttcatgttgccattttgatcgattacgttgccatattaaagttataatatagatggatggaagtattgagagtcgatatcacctcgttgtagtttaccagttgcatgtcactttcaccgaattggagatttttatataatgaggcactagagtagtgaaaacccaacgataaggatggcaggcaggggaagaagcaaccgtggtgcgccccattttgtgataaccacgacagaaacgttcaacgatgcatgatttggtgattgtttgctttgtctctgttctccaattgtcgaaacaaccattcagctacaatgtggctcccgcgtgttgccttattctcttgtgtacgctcgtgatcgatgcttgacttggccacaggtcaacccaaactgcctcaggattattcccttcacaaaataaatgataaattaacaagtacgcgcgtcaggactgacgatgagaatttttcttgtatttttaatctttaaaatttgcaaaaataaattccgtaaggaaaaataacccgtgtggcacaaagctggcggcaaagcccgcaacaatttgatcatactatagacagtaattatctcacgatactagtccccgacctataaaaatgacgagcaatattattactgacactatacactaaatttctattattgtttttagaattcaaattatcctaaaatagttgttacaatatagtactaagtgtcacatcaatcacttcttattcaaatttcttcctattcttccctcaaccatcctctcacttttatttatataatatctaatgaggggcatcatagcctttcttcttaaatcttaatatatgctaaacagtttagaattataattattttgagacggaggtagtaatagctacattaaaagaagagtctactttagttataacttcataattattaattaaaaatttagaatcattcattttttatccttcatccaaattcaaatatttaaaagaataaagaaagtgaactttttatccctcaactaggacctttggtccggctttcatcccctagctaaaagactggttactattggtccttcgactcttaaaatcagtcacatttcatccttaggctaaaaacaaaattggttttcgatgatgtcgtgccatgtggcatcctagttggcaaatgaaaatttaaaaaataaaatatgaggtggaaagaaaggagggagctgaggtgatgatgccatgtggattctatttcttaatttgtttcgttatgttgttattcattattgattagtatagctattttccaatgtggtaccacatcataaaaacatatttgtttaaggccagggatgaaatatcaacggttttgtgaaagttgaaggtcaatagtaaccaagagcatagttgaggacctcttttcatttcatttctctctctctctttttttgcaaaactttttttttctatttgagaaaagtccaatgtaaatcgatgcatgtggctctaaatgatcgtttaaacacctattaaggaaataagccaaatggcatgtttgcaatcgaaaaataatttgtgagtaaaaatttttcatacttgtttttagtgatttaaaagtaaaagctgaaaaataaacttcgacgaaaaaaacttcaaaatcaactccaaatttaagattgaaaatttatttttttttcttgataagtataagcgaaaagataaggctgtatgcttgcttaggaagacatgtcgtatttttcctgtattttttaatcatgtgcgttactatgtttatcctaatccaaagttttctattcctacattcaaaagagataattgtgtgcccaaacactatttctggatgaaattcaaaagagatatctgtatgccctttggtacttaattgtcttttttagaaaaaaaaaaaccaatggagtactttattgccaatatagactatagtaaggttcaacatgtagacgtagcacgtggactttcaaacatatcaggcggatatgcagaataatgcttcaaaatcacgcggatatgcagaataatgcttcaaaatcacatctgcaactgcaagtactacacggtgctacctccttcgaagtaattaacaaggatcgcagataattcaacacggtgtcgatcgattgcatcatcgttattaccggacattaattgtaaagatcggtcaatcacacaatgttattttattggacaaatatgtataaaaaaagatccagctatctccttatcagcacaataggataaaataaaggcattgcagcgagcaatctggcagcttctgtggtgtagctttctgcggtgtacgtagtcgattgtctagttcagttcagacatgtatgggatctcccaagcaattgtgtcactgtgaatccgtccatgtggcatcactgtatatatgtgcgtacaacctgtcatgcacgcatttttttcacttgccaaattgttgaaacatttatgctttctaaattttgtgcaattgactgaagaattttcatacgcaaggcaaattcctacggttttttattattattttaaaactttttaaatttgttttattttaaaaacagacaaacttattttcaaaactaaacttttggtcacgccaacctgcttggcttggtaaaataccagtgtcacgctacctctaacaagtgtgacagttttattatgtcacgccaactagatcagcgtggccaaatggtgtcacaccatctagatcggcacgcaagtattgttttaccacatcagcctagctagtatggctaaaaagttcatatctttaaaataagtcttggaaagattttttaattaaaaattaaaaagttcaaaaatgaaaaaaatccattcctatctgcaaatatatttaactttttaataccacatttcaggttttgtttttttcttctgcaattgtccaggctcttttttcattacacaaaagacccgcatacatacaccactatacacgtacacaccacacgcctatacctatgcaaacacacactgaaaaaactacattaatggtagatcattagtctcattaaatttctgatgcgtatatcatatttgtagacgcaatagtagtaaattccaaactacttcttttgttcatattatatattttacgttttgaatagattcatgcatggatttatatatgtgtttcatatgtatccaaatccaaatttatatggacagtgtagtgaatctagacgaaagatgaagccaaaacatgtaacgcagggagtagaatgttacgctatattaatccgtgcagctacgaaaattaaggacatctttggtttgtctattgaattggcactactaaattttttgtatgacaataaactaaatatgctcatttattaccctattaaaaaatttggtagttctggtaatactgcaaatcaaacatgccctaatctcttatcaaattttgatagagttagttcggacaacaagccaaacaaagtcctaagttgctgcaaatctaataataataagaagtttaatactagagccaacttactacagtctatatcatttatagccgttttgtttgatgctaaaatgtaccgtaccaattttttgggagtttaaataataaatataatagtcttgtttgcagctaaatggatagtaatgcccacgcttaatttgctataactttcttcaccataacccatttggcttccaattagcatcaacccaaactaccctactttttaatctggatctatccaaatataaaagctagtaggacatggtagactaatcagagcgcgcgcatgtgagctccaatatttgtctaatttgttaattttggatcagatccatcacgttgagaaagctgtatcgatgactattatattaattataattgcaggcataacgtaacagacgcaaatcttcaaaggttgaacgaagaccatatatggaccatggatagttcaagatattattagagttcttctgccaagaatatgtatatatattttcttgaagtaatgatgtagtacgtatatatatagagaaggatattatgggcctaggttcctagcattgtgccgtgcattgggtttatgattaactgttaagggttaattatattgattcggtatggtcgatctcttgcaagtgattcgttaattgggttaattattgattcgcatgtaaatcatatggtattatttgttacttcctccatttcacaatataagtcattatagtatttctcacatttatattgatgttaattaatctatatagatacagatgttaatgaatatgaatgtgggaactgatagaataacttacattctgaaacggagggagtagaccaatatgtttttacaatcgagtgtctcagcaccacctaggtatacaaatggttaggacaccgctaaattaataaatgctgccaccgtttgtgctacaacgaattagtcgctgttaaattttgaattttaaaacttaattttgaagatgatttagggtattttaacgtagctttttttcaatacgacttaagtcacaacacgtatgttatgcacaaattaatttttatcgttaataagctatttggtacataatcagctctttgatcaactgatggctattttgtccagctccaccattaggagaatataacagccgaataagattttatgacaattcttcgagagcaagaacgaacgagttaaatattataaaattataagttaattttaagataattttttagtgctgaagattatttataaaaaatctgtatattgtgtataagttgagaaagcgtgtccatgataactccgcggtgaccatgatcagaaaagaatggggcaggtaatgctttggtcaatcagtaaacggaaacacgcttgcaagcaagcggagaagccagtgtcgcagtgtcagtgaacatgtttagggtgtgtttggttggggaaaagaaaatttttgggtgtcacatcgcatgtttgaccggatgtcggaaggggttttcggacacgaataaaaaaactaatttcagaactcgccgggaaaccgcgagacgaatcttttgagcctaattaagccgccattagcacatgtgggttactgtagcacttatggctaatcatggactaattaggcttaaaagattcgtctcgctatttctcctataactgtgcaattagtttttctttttatttatatttaatacttcgtgcatgtatccaaagattcgatgtgatatttttgggaaaaaaaattttaggaactaaacggacccttagtttattagttaaggtcaaacatgatcgaagtggagcgtaccttgacttgatcctgctgtcctggatgcggttgccacgaaactcctgcagcgacaaaacgtgatcctttgtgtcacttttcaaagtagcggctagtccaattctatcactttcataatacggagatataagttcaactagtaaattagagttgctttggattagccgctacttcatacccaacaaaggacgcaagatatatattttacctatgttagcacacttttaaactacttcctccatcccaaaatataacaacttttaactctcttgatttgttccaaaatataacaacttatccaccaacattctcttcccaaccaatcacaatcctccaccattcacttttactatctacctccattacttatccaataacaaccctccacgactcacttctactaactttcttactaaccgtatctaaccctaaaagttcaaaagttcttatattatgggatggagtgagtactaaacagttcatttcatacactaatatcatataaatctattttttaatatttaaaataatttaaaatataactaatcatacgctaataaatttctcgttttgtgtgcccatacttaaatcttcatcttcgtcgcttcatcggtcatcactaccggacagagccaaattggcttgttggccaagggcccttcatgtgaagcccacataaccctgtgcatgggccaaggaaacctgcgcaagttggccaggaccttgaggctgtggcccttagttcacatcaaacttccctaaactcctaacttcccattacatcatatcatatctaaaatttttctactcatgtaaactctcaatttttttttaaactaccaactttccccaaacttcttcccaatttcagaaactaaacacagcatgtgtgcgaaaccctcttttcccaacctttgtgtgctggtcccaacacagcctagcgagaccagctagcaatctcgagaatcccaacaaaggatttttagggtatgtttagactaatgctaaaatgaacatttacaaagtttggtaatactaaaattttgacaaattagtaacattagtaaaatttggtaacaaactaaatatattcacataattatcaattttaccaaataatggtatggattaaaatgtcatcagtctgaacaagctcttaattgttgctttagatcaccattgaataacgatgacaaaatctctaaattgaaatatgtaggtttttttttttgcaatgttggggtcaaatctaaagtatagtaaaatttagagctttaaattcccttgagccaattaatagtcttacaaaagaaaattcaagtaatatctataagcaaattttaactacttacaaaatttgtatcttttcgttcgtcacctcttttttgtcttttttgtccacgtttttatccttcaacgcgctaattttgttgaattggactcgagttcgccagagagataaaaattaggattcgccggagagataaactcgacttcgagctcgatacatgagcgatttcgatgggattttcttcaatttcttgagagaaaagatagagcaggagatatagatcaaaagccctcaactaagttgagattatctggttgaatcggacgcgggattgaggtggcgtggggtataggcaggttgaatcggacgccggattgaggtgtcgtcgggtacaggcagggctctggtttggctggaacctgaagaagctactgtagcgacaggaaggtaaattagacttatgctgggacttcttttccatattcagcccaaccttgaaagggaggattttcttttccatattctgcccaaactagaaagtgacgattttgattctttttctaattaaataattgttgatttataatctatcatttattttgtgttcatgttccctgaccccagttgtatcccatgtgtgctagccgatatgagatcatttggattaaatctaattctaattataaagatatagcttataattgataaatctacatcattatatctaaacatggaccaaaactttttctagatccactatgatcaacagcgtatatttttctttcaattaatgtgttgatttctaagccacaattgtgaataaatatttctttattaccgtagtaaattaatttataaatatgtaaaaaaaacatatagtgcttctacacggaaagaaaacatatctcactaggttatgaaaaaaatgtcatttagttatttaatatttggtgtacttttatttttcacccattgcaacacacaggcatttttcctagttaaatcaaatttaccatggaaattttgattttaaaaaggaaatcataaagaaagtcatccaatggtagccagtttgcgactttgcaatactaactaaacagacaccagttcgccataacgaagattgattgcctaaatggatcaaatcaccacatacgaatacagtcccgtgtagcacattgcaaatttgccatgaacctagtctaagatccagcaattatactcgaccagaactcctaatctacgcatacaacagaactctgcctacacaaacaacaggccaacagcatgggccacgtggttcaaggcattggggagtaacttccttatatttcatagttacttctttattaaaattcctggatgtaaaatggatgctcatggttagtaaatggagaaatggggaacgtttgaaattgcaagtaatcagatcctacaaagtggcctagtttatatataagaggtcatccagaatccgtcaaaacaatcatcttgaaagttcatcttttaaattgtactcagttattcactatcaaaattgttggtacattgtgccagaacaaatgtcacgcaagaactataagtaccaaaatagaaattctagatgcagaagcttgccttcagaaagtcctgtcacagggtgataattgaacaataagggctctgttcagcagccatacctgccacagctgctgaggctgcggcagttcaaaattgctgcaaactgcagccactttgaactgctccagctgctaccgctgctaaaaaacgactcccaaaacacacccaagatgttcaagaccataaatgtttgggcacaaaaaatgctttattttttagatgtatacttcctggtccttgcttgggagccatcctaggtcagtgtacttctctgcaagttggatttgtggtcaaggaacagagctggtacaatgggtttcagatgaagattaaaacacattgaaatacagattggttttcagatgataacactaatcagatgatgacaaaagtgcattggtcagtaacaaggaaaagaaactgtacctgtagaattcaatggagaaaataccatgttctgatccatgatcaaagtccatttcaacaatcaagaaataaccagtgacctgacataactgactttttcccaatcaagaaagatcatttcttgttcatattgaagacttaaagatgtaatatgcagatgcaaaaggagaagcccataggaatggcccacattatctacaaattcgtgatttctttatcgtctagaagtgaaacaatatgtcaatatacataaacaatacgctcacttgtgagcacccacagaactcagatatgttaaccagtaaatgttacagaagaaagaaatcttacttagaaacagtccatgctctaaccagtgacaattgactttagtcactcttaccattttgttatgagctatgctctggccacgcattctccacaaaggtaagaagtcaaatattctcagtgcaaaatttgtttatgatgcagtttcaacaattaacggcaatacatatgcagaaacaggatgttgcgtaggtatgaatgtgcgaagagggaactacacctggaatccatgattagacttaaccaaattgaaaaatgagtgacatgcacagttgcacacacaacaatcagaagcatttccttcaagtatcagctgcaaagaacatagaaaaatgaaaatatatcaaaatgaactgcaaattgagaactctacattatttatacttaatggtcaacatgtttgcaataatctaaagcatgcagttcagagaacatagattcatatatcatcccaaagagcaattggaaagcagtagtcaggttcataacctcattcatgatcagaccaggtgcaatataagcaatcactcgactgaatatagagaaatcgtaacatggttcaattaatgccccagttgcataatctatcggcatggagcatggtcaaaaggaaataatgaactgctaaatactgaaatggcaggataactggactcccctttgacatgaaatcccacaacccctagactccacctttgacgttaaatggaattaccacgtcactctcacaagcactacagtttatccaacagaaggacagagtacatgcacaaatggttcaaagtttaagaagtcaatcattttgtcaagcaactggcaagtatgacagtttgtgatgcacctaattagcatatctgcaccgctcaacagggattagagccatgttggaggctgcaaggcaaggaaatgtgtggcagctaggtggcaatctgcctatggcagtgtggtaacaacctgattgtaggggagaggtacaagttgcatgataggctaggcttgagtcgattgattccatgttgagctgtttgaccaagacccaagtgcacaatagtagatggggcaaagataaagacacaaggggaggagcgtggagcatatggcgctaggacaagcggtggcacagcggcaaacacaggagatatgaagcttatgtggtggtatttaaataaaagatttaatgtcgtcagtagaaaagatgcaagtttttttatgcaatgataggttgtttttgaaaagaactgatgaatttctgagaaaatatggcaggtttctcaaatcttaccgggtggaagagagaaacaatacaaagatattgaggcgaacaagagatactgggaaaaaaaggtgacatggggctggagagcatgggaatcaaacccacagccagaatgatgcatccaaggcctaaccaatagagcaaaattcaccttcttcactatatacatagatacagaaaatatatgaaccaatagagcaaaactccattttatcccgatataacatagacacaaaataaatgggtattcagctacccatcaaaattggtgcaccagccctgcgtgaggccttctttggatataaaaattccacgttaataaacaaaaattgattgtacagggtactaatttagaacaaggatccagttaccatatcagccccctgatcaaaatagtggattacagtgttctaaaaaaacatttacaaggccgcatacaaggaacaggtgccccaaccttgtaccgcttaagccacataagcggccaatccaccgcataagcggccaattatgccgcataagcgctacgaggtgtggtgaccacatgaaaccgcgtaccgcttttaaaagaattgatggattatcaagatgttctggaacatccaacccaaaaatttccttacacgactcagttttgatctgatgtttgcttgttagtatacatataacattactcaataacatttaaatgcccaacaattataaaattccaaaaaggtacatagcctgttacctgtaaatcgtgaaacgatcaagcattcttggggaaaatccatgcaaatttacatctaaataaaatggaaaatgatggcatatgagaataatgaaaattttaaatctatcactaaattccacatccacaaggctagctgtattattttaatttctgcagaagactaatgcttcggaagatcatgtgaagaagctaatttttagagaaaatactatagcatagcaaaagcaccatacctgaatctttgcagccatgccaagcattgaggtcaacaaactgtaggtcttcagtagcaagttgaatgcaccaacacattgctattgatataaatatgtccagaaagcaatgaaataaattaagcatcatataaagtcgtttcccaactcaaagacaaaaggtataattttttatgacaagggaaaccaaacagacaaaaaacattaaccactacaactatagttcttctacatgatttaagaataaacaaaagtaataaacaagaaatagagcaaacagttacaacaaaaggaaacctaatcctccaaatgagatgtgtatccacttgtggaagagcacatgcattttatttgacgtccaaaacaagcatagtaggaataaaagcatgtatttggcaatccagaaccgtcgtcttcagaatacgacaagatgcaaccgcagaacacatgtcctgagcactaaaacccttccaagcaatttccaaataaaaccttttttgttaatctgcatctgaattctggttagattcaaaaataaccagctgacagtaacagccaagtcaatttggttatgtttccaacttccaagctcctctcatgatacaacccaaggctgttccttctgcggcacaaccaaaccatgttcctacttcctagtcaaggtaaacaccaaatggaatcatctactatagcacataaaaagcgcacacggagaataaatcagcagatctaaacattcacaataactcaggcattgtttcatcagaacatcagtaccactcactccagtcctcacccaccacttacagagagctctccatttttctgccctcctctctaagaaaccatctgaatcaccccctcatttgcttgcctgaataaggcatctaaataacctaaatccatgccgccgccgcaaccgccacaaggacaatgaggttaaattattgaggagggggagacctctcctaaataagccggggaaccctaaccctaacacgctccaagctcctaaacctaacagcggcagttctaaattaattattgttctcgtcggcggcggtggtgcccgaggcggaggcagcggatgccatggggggctcgtccgcgttaggcggctgcatgaggagcgcggtgtagtaaggcacatggacgaacgcgcccccatgcccgccggcggcggcggcggcggcgaccgaggaagaaccgatggcgacggcggcggggggcgcctcctccggggtgacgcccgtcccggtggcggcgatgatggagggctccgcctggcggagtagccactcgatggtctccccgtcggtgcggtggccgagctcgcgggtgagctggaaga

SEQ ID NO: 28784 - DNA, 22483 bp, Oryza sativa
cgagctcggtaccccgcggcctgacccgccagcgcttgaatacactcaaccgatccaacatcctccacttgcgccggcgagagccttcctccactccagcgcctcaccgtacactccaccgtagctcggtcatccttagtcgcacaccgatacacgaaggcgaggtcggagcccctggtgccgccacgagcgagaggcaattcgccgttgcggccgcgctcgtcgcgcaaataccggaacgcaagtggtccctttcctaccgccgcaagcgaggagttgcgtcgctacatgcacccccaaggtcttcctccaccgatctgtcctgtaactacaacgattggctacaactcttgttcatcgcaatcccttttcttgttccttctagctttacaaattttgagggagattgaaggcgacctgtccgggttcaggttctgcttggcgcatatgttctgcatgaatacaatacgcagaacaaactcatgattggttcctcggccttgctaggaacatgcaaatgctgatgtgatgttttggttgctcagatccatcagtgggatttcatcaacgacaaacattgatagtggttctgacaaatattcatgtatagtggttcgatctacattaggtagtactctggatcaattgaatgctcaaaaaaatattttaatcaacatttgtgatctgaatgtaataaagtttatcacgactcacctttgcagctcggcccggtaatgcaggaagctttacatcaccatcgcttgcagtgacaagtaaataatacacatcatgttcgcttcttttgcaaagctattatgccgctgccagttaattgctaattgtatatctctgaaattaatttatacagatcgatggtatgtaacagcttttaagcttgtgatttcttcactatatatcatgtactgtttgagttaactaattctaatttactggcaaacaccgtagggaataccactaatttaagtgctctcgagttaaagaagatagcaagctcggatgaggtacgctttgctcaattgtaagcagtagcaagctaaggttcaacagaaccatgagtacaagcagcggaaggatgcatcaatctacaactgccacaggtgatgtaatgctctcaaattttttgcaaaagaaaaaaaaaacctgaagcggtgccacccgtaatgacatttgtgcaccaagtatttcactgcagttttactgcaatattcagggtttgcattctagaaattggggttttttccgtggggggagggggcgaaagaaccaaaatcactgaatttatttgaaaaattgatgaattttgaatgatttagaataagctttgaccaaattcacaaaaacatgaaaaaaggagaaatttcgggtgagatatatgcttgccggtggagagggggcaaaattttgaaaattttgttccgaaattgcaatcacgggcaagatttccctaatcgcaatttccccattgcaatgttgagcttgcttttagctgtcactctagctggtaatcacttaatttcggatttgtttcaacggttggtttgacatgagcctatcaggttgaaatgtcctcaagcttaaatgtaagcgtctctttcagtttgtatgtatgcacatataactccataggtcaagagagttttattctagcagacttaaatataagtgaatatcccctttgtatataccaatgatcaattttggagctcaggacaatggaactatggcttcatttccttaaaaagtgcatcagttgaatccagtgtatattctacaagttataagcatggattttgatgtttctcctctgataatttgcattgtttttgggaagtttgaatatttgctttgtgctgatgacttctaattactaatgatgtaattcataaattttatccatcagcatatgcttgcttggacggtttgttatttctttttatttggacatacgtagtttgcttgaaaattttgatgtggctaaaagagcatttggtttcttaggaagatgcctgatgctaatgtcttctcaagcttttggattgtaaggtgcttttcatgtttttaatccagtgctaatatccatgttttaaatccttttcatcaccattgtggatatattatttatttgtagcttcacgaaaaaagtgtggactccaggattaaattaaatcttaaaaagatatacgctattccaatttcagattatgccttttccatgatttgatatgtttccctttttccagtctaatagtggaaccctttccttgtgggaattccatgaaagatattggtctccagattttaagattggtagatcctttcgtggctgccacttcaactgcaggtgtgtgcatagtttagcaatatgaccactttagattaatattgtggtcaaggaaaatatagaggcgttttgacaaatgttagtgtttctggaatgttcacacttgctatctacttttttacttcaattaaggcaactatagacaatattctttttgaaattatatgtgatgaccatttcttacaagtgaaatggatgtaaatttgtgttttgtagatcacgtgaacttctgtggactcacggcaggagctgtatacacctcattggtgatcatgtaaatgctatttttagttgctggccatgagggatatatttgaagtattgttggtgaagatctgagttttttttcctgataagatattgtaggctgtggggtttaattcaataccataaatacaaatatcttgctttgagcttttcaagtgtttatcaagctatgacaaattatatgtttggtattgttagttgctttgcatttttttattgtttaaaggagtatgttaagttacattatagtacatatagttcttaaactttttagtatgttgtatattttgcctgacatatattacaggaaaatgcaagaaatttgaagtgtttttatatgattactatagttaatataggaaacgtgcattgcacgtgcacgattactagtgttagtataggtccccacatgttcaatgtgaaaactctgcgaaattttatagacccaactgcaattaatcaatgaaccgaggtcaatacgagtcatatcgtgctgatatcagcggtgttaacgggatagaaaacacgatcgaagatgattatgttcgtctgcctgatgaaattgtcattggttatgtaaacattgaagattcagtgaacgcactgattgaatatgtgaatatgtgtttccctcacttaatgatgagagatatacgacctccgcggaatatatgagcacacgggccattctctcaacagaaaatgatttcgtggataagctgaacaggaagatgatcgacaggtttcctggcgaggaaaagatttaccatagctttgattatgtcgatgatgattcccaaaataactaccctttggactttcttaacacgataactccaaatggcctccctccacatgagctgaaagttaaggttaactgccatgctattctcctccgcaaccttgatcctaacaatggattatgcaatggaacaagattaatgatcagggcattccaagacaatgcaattgatgctgaaatcgttggtggacatcatgcacgaaaaagggtgttcataccaaggatccctctatctccttcagatgatatttgctttctttcaagtttaagagaaagcaatttccaatacatctaagtttcgcaatgacaattaataaatcacaaggacaaaccatcccgaatgtcggtatctatcttccagagcctgtattctcgcatgggcaactttatgttgcattatcaagaggggtgtcgagaaaaacgacaaggattttggcaaagcctaaaaaagaagtgcaccccaaggaaggtgcacaagtcactatgatgttatatctttttcaatttgagttatcaaatgtcaccccatagcattagcatgggcatgtaatagaaaaataattataatatgaaaatgcactatattatataaaaaaaatatcacccactagtgatgcattataatgacgcagatatatacacacaagcacaccacatacagaaatgacgcttgtgagatgaataaatagatatcaacgccattgtaaattattttgcgtgtcacggatatatgcattatatatcatactattatgcattatgacttaagacacatatatgcgcattatcatatatctttaatataatattattatgcattatgacatggggcacagatatatgcattatatatctgcatcaattggtatatcatattattatactttatgttaaatatattttatgtacgaagtaaattgaattaaagctcaaatgtatagttcatatagtaatatcttttttgctaacatgaaaattttaaaaattattaaagacaaatagagttacaccgtaagcacgggcatattatagtcttctctgggcgactgggcgagcacggctgcggagaggcggcgtcggcgggcaagagcggtgcggcgtcggcggaagagagcggcggcggcggtgggcaaacgcggttgcggatggggagaggcggcgccgacgactctgcgccgctcggccttgtcgtcatcggcggctccgggcacggacctcatcgtcggcgttggcggcgggggtggcctctccggcggcggcagtggcggggaggggatggctcctccggctgcgacggcgcgggagaggccggcggtgagggcgcggagagggaggaggcggagaggccggcggcgagggcgtatgaggaggaaggcgccgtccgcggtttgctgctgctttcccttcaacgtcgtcgagctcgtcgtcctcgcggccgtccgcgttcccgccacactctgccgctacgccgtccgaggtggacgccgccgctgcgtccgctccgcgaagcggaaggccgccaaggccaggaaggtagaggccgagttcccgggcacgcccatggccgaacacctcgggtaggaggaggcggcacggcggaagtcgggactgcaggcggcgctgcaccgggtggcacgcttgctctctggcgccggggaagacacccccccccgggcgccgaccaccgcgtgctactctccgtcctcgcttgcccgctctcccccgtccccatcctccccccgccatgtatgttcttgatcatgttctctgcttcgtcttcgtcgtctatgcgaagcttggtttggtttgcttatggttggttggttgttgatggtgcgtgcaggtggcgtcgtcggcgcagtacatcgtgatgtggcagctggcgcccagcatgtggatcgtcgattattttgccgattattccattgtgccgattattttgttattttggtgctcgtcgtcgggatgccgattatctccattcctgatggcgccgtcgttcttggcgaggcccagcgggaggctcgtcgtgctccggccgggaagttgcctacgaaggagacggcgactagcagcagcaccagccattggcctcgtcgccggcgacaacctcaccgtcccgctccgctgcgcctgcccctcgctgccacagttcgccgtggtggtggccgcggcgctcgacgctcgtcacgacatggcctgcacaagaggagagaagtgagagagagagaaaaggagagagacgacgtggacacctgacacgtggggcccacgtgagtcccacgctgactcagccgccacgtagactaaaaccgaggtcaaaaccaccggaggatcctgggtgaccggttttgtatagttaagagatccaacatatatggttctgcggttcgaggatgattttgtatcccaatgacaagttgagagatcttcggtgcagtttttcctacttgttttaatatagcaagagtttattttgcctctctcacttataagctgagtcacctagtctgattcttgtccaccggatacagagactttctcagtggtttattacgaggtggttttggttgatgtagtgtctacgcggtacgttgatttggtatccatctaacgtgatatctacattgcatacgtacacgatatgctcaatgggcgtggatgtgggtctaatttttcgcccattgacacgtagccgagttttatatttgctggtggataacgcatacctgatctggtatatgtcatatgtgtatagctgtttttcccccaatctatcgtacctcttcctcattggcccatttaattagacattgttggcaacttttttgacaagttgataagcacgatcgtagcacctaatgccttgcatgatcctagagtcgccaaccacctcaatctagcaaaagctaaaccaagatgggttttgataactaaaccggctagtggagccgattctagataactacccgtctcgtgggcaaaacgaaaggttttcaggacaaacatacgaagaggtgtcgcactctcgcaacggcggcggacgatttacggcgcaaatcgacaaagatggataaactaagagaaaactaaaatcaatatgaaaaacgattcgattgattgattgtagattggatagttacaattgaaccggtcatgtcccttatataggggttggtcttgtcctctacaggccctcctccatgtccaactcaggatagaatccaaaggaaacttgaaatatgccttcccgagcaaggaaacccgagatccgacgaaaacagacccggactcagattctgcctgtctgaccggccacacaccgccggtctgactggccctcactcggcggtctgaccggccaacactcccaatcagaggaaaccagcagacttccaaactttgacaattttccctattttatctctaggtgtcaaatttgggtgtaaacagacatcgatgttgatccttggatgcttgaaaattaaagtgataactaaactagcttgttaattgtgttgctctttttgattgtactatatgaaacccagtgtgttacagaatgtaagattgtaagatggatttggttttgtagctaaaaaacgtagctatactagatgaaaccatgtgtattcatacgataatattgtggaataatgatggaagtagaatgtaagataattttggctttgtatagttatttgcatctttgaacaatcatttaaaaaactataaataattgagatgtgtgctctataacaatttagatcaaacatatattgatcatctaaaggcaaaactaaggtgatataatttaagtgaggtaaaaaggagacaaatcggatcataaattattgagtgaattgctctttggactagtaatttttatccaagtttcggtttggattaggtggttttacaaaagattcaaactggactagttttcttctccatctctcctcttcctactggttttttcttcattgagatggtgccatggatcaacccgtgcaagaacataactaggatttcttctctcagatctgttcctaagctcgaactcacaaaatcaagtcaaaaggcagctcactactgtagttattgcctgtgagctcacaatcaagtgatttttctcagctcacatgactttggtgggagaaaaggagccaaaaaaataaaatcaaggtgttggatggtcaagatagagtgtttgactggtgtgtttacttgctggtgagctaatgaaatcaaggagtgagtggcagcaaagtaggttaaaggcaaggaacacaattacacaaaggatggtccaatgtaaaaactttgacaataataaatctaaagtatagctacgtttagttatcactttgacaataatagatttttgtccaaagtaaaaacttcaaacatattataattcaaagtgaaactttgacaataataaatcacctaaagtattattcactctaaattattctttatcgaaatagctagcaagaaaagaaaatataattgactaaaattattagggatgtactatacataattatacgatacttatattattaaaacccattaggttgcccataaggggggtcgtcaggcatggtcatgttattggtttttgagtgcttagcctagcaccctattaatctgcttgtggaagggccaatattttggggaatggtccaagggagcattcgttctggtgacatagggtgagaaaggacatcgtattccgcgcgcacgcttcccaaactaaacagtacgttttttgcaaaaaaatttctataggaaagttgttttaaaaaatcatattaatctatttttaaaatttaaaatagttaatacgtaattaattatatgctaatggctcacctcgttttgcttatcttactaatcttcttattctcctcctcctcaaactcaccctaaggtcaaactcaccctaaggatgctatgtgtgggttggatacaccctgctctgctgtagccttgaagtggtgtgttgcaaataaatgtaagcagcgagcaaacatttatactccactctctatagggctattgtctccatatattcctagatagtacgcatgttgccacagaatgttagcgtgtaacgtgcagtataaaattacatgagaaacaactattcttgtaggtagagaaactatggtaatctgaactgttaaaatgccatcatgtcaaaaataataagttatgatgtaatttctagtgatggattctaaagtaatagttcaaatgcgttgttctttttagattacttcagattatatgttttctaaaaagttttttttcaactatattgcttattataccactacttttaatctatttaaagttttttcaaagaatatttagtttatccttacaatcaattgggaagatagtatgtgacaataattattacctgattatatttctatacgatttggaaaacatatctttaagctattttaagttattttaaaaaatatttaatttatccctataatcaagtagataatctgagccaacaattgaaattatcgattgggattatacaaaagataaagtctaggtgcacctaaactcttaccaacaccacatattatattgtgagtacatgtagatttttatatatttaaattaaacggttgagattattgttcggaagagttttataaagaaaaactttgtttgtacgtgtaccagtgcttttgatagatagattatgacatgccggttgaattttattgggtacatgagtccatccaacaaagggcggtgcctctccatgacgcgcgcacaccgtccagtgtgcgtgcgtgtccagtgtgggtgcgtgtctgcctgcgtgcaagttgctccgtagctgtgaagccccgaagcccctccgcggccggcgggagttagagatcgcgtgcagtgatggggatctgtgctttggactttgggaggctggccatgggccaagcacaagatgccaatcgaaacgcaaaaccgaaccataccgaccaccacccagtgataatgcgccattgtttcttttctttttttccccctcacaaacactgtgagaatttactatttgtcactgtactaaaataccggtgctcaaatatcactcttccaaatattcattcccaaataccactcgagtctttatgtcagcctcacttttatttgaatgtaaagtaaggctgacatgtggccctaggtgatatttgagaataaaaatctgagagaatggtatttgagcactactcccttcgtcccataatataaaagattttaagttttgtttgtactgtttgaccactcatcttattcaaaaaatttgtgcaaatgtagaatacgaaaagttgtacttaaagtactttgataataaagtaagtaacaaaaaataaataataattttaaaaatttttgaataagacgaatggtcaaacagtgcaaacaaaaacttaaaatctcttatattatggaacggagggagtagcattttggtagagtgacaaatagtaaattctccccacaaacacgggatgttgggtactactacatccgtcccaaaatacttgtcgctttgatttttttttaacttttgatcattcgtcttatttaaaaaattaaaaaaatattatttattttgtttgtgatttgctctattatcaaaaacactttaagtatgacttatcaatttttatatttggaccaattgttcaaataaaacgaatggtcaaacatcgtaagaaaaaagtcaaagtgaccattattttgggacggatgtagtagttaattgatggatttggttattggcaatgcgatctaaattcttatactcccttcctcttgtcattaatatatacttccttcattttaaaataaactagttcctggttacgaatctggatgtagacaaatttggacatagcctacatttaaattcgtagctaggaatttatttattttgagacaatatggtgtatagtgttctaagactattttacgaaacattttaaaactttaacaactaaaaatgtgtcctaatataacctagtatatactttaacaactaaggtcatgggcccacgtggccacagtgccacactccgcacgcaacaactcaacaagggttgtgtttagttcacactaaaattggaagtttcgttgaaattggaacgatgtgatggaaaagttggtagtttttgtgtgtagaaaagttttgatgtgatggaaaagttggaagtttgaagaattattttggaactaaacacggcgaagaagcatcaccatttttgaaacaaaagaaccatcaccatttactatttattttggggatggctaaataactgggtatagatttttagatcaaaatcatgcaaattacttacctttgaaattgctttgtgattcttgttctaactatcctagaaaatctcatacagctccgacgataccttttctaacttcggggacctctatgaaagtaatggagttaaggtttagggtctcggaattggggtaggggtgggacagggtagggagagggatgggggaggaggctgccagtttggggaaagagaagaggaagggagaggagcccgtttggagggcctcaacggcaccgttgagcccttccggccagccagcgagtccggactgcgatggtggaggcggtgcagattgggtgctagtgagcgtagggagcgcgagggggcatcaggagattgagaagaaggacaagggttttattgtttggttgttcattataaaatttaagcaatctgaaggtttataatttgcacaatttctatagggtttcagttaaatggtgtcccatttatatttacttcattgaagtttcgggcaatataaatgatctacaataaccatatttattattattattattattattttcttaaactatatattttacaaagaaataaaaatatagtacggagtaatatacaatagagtatttcggtcacactcacaaatcttctactaatactctccctgtcccatagtgcaaagcgcacacatgttctagattgaagtgttaaaacattgatttgatgttctatagttatagggtgatttgttttctataaacaatatataatttaataaatcataagctcgatattagttttggagtctacatgacgttttatgtttggcaacgccttaattaatgcgacatatgaaatatatttttttctaaaaaaaattaaatcctgatattttttataataaatcaataatttaagacctttatatttgactgtacaaatcaagaacatcatttcttttttcttgagatcgtattttctatagatcgaagttactccctccgtttcacaatgtaagtcattctagcatttcatatattcatattaatgttaatgaatctagacatatatttctatttaaattcattaatatcaatataaatatgagaaatgttagaataacttatattgtgaaacggagaaagtagcattattgattaattgatttatttctttctgctttacccggtcgccagaacagaacgggacgcgagagtacaccgaaagaaaccaactcgtgtccatccatccgtctcggtcgctcctctagcccaggcttcgcttccgtctcgcccaaatcggcgcaccaccaccgccccgccgtccacgaatcgaactgaccggagagatctcgcgatcccctccccaccccttcctgcgccggtggcgaccatgtccacggcggcgcggcgcggccacccgccgccgcacgagaacggcgtgggcgggcacgccgacgacgagccagacgaggacggcgaggaggaggaggagaaggggaagggggaggtgcaggatgatgagaaggaggagccgcggctcaagtaccagcggctgggcgggagcgtccccgcgatcgtctccaccgacgccgccgcggccatcgccgtcgccgaccgcatggtcgcgctcggcacgcacaacggcaccctccacatcctcgacttccagggtaatcaggtatcgtacccacctctttcccttcacgcatagctcgtagggcggtcgcttgctttgtgggattgggatttctggtaggataccgtggaattggatcgtctcgtctctgcgacctgtagcattggtctactgaattcgatttggttgtagaaaactgttaacctattgtttgtggaagagacgtcacaaaggtgaaattctgtttggggacacctgaaatatagattttgcagagaatatatattttaaggattgtgctagactgaggaatatggttcagtgtaaaatgttttcacgttgttggaggggattacctctggtgacctaaaaaatctaggaggactaggattgtctgctaaatatcggatataaccaagctgaggtggctgtgcatttaacaacattgacacagaaatttcaataaatggagattgcccatagcttccttcggcctgaaatcatgtgatggagcactatcagtaatgaccatggcctgcttagaaaataacattgtcatccattaattcaatacttttgcaggtaaaggaaattgctgctcacacagcaactatcaacgacatcagttttgatgcagacggtgaatatataggaagctgctctgatgatgggactgtagtaataagcagcctcttcactgatgaaaaactgaagtttgagtaccatcgacccatgaaagcaattgccttagaccctaattattacaacaactatagaaggttcgctacagggggtttagcaggtcaagtacttgtgctgacaaaaaagtcgtggggaggtggctaccataaaaaggtgcacttcttctcattgtcctacaagaaaatcaaattgatctggtgatttcaaatggttgtgtgagtctccttacatacaggttctgcgtgatggcgaaggaccaatccattctatgaaatggaggacagacctccttgcctgggctaacgatgcaggggtaaaagtgcatgatatgaagacagacaaaggaatcgcgtttatagagaggccaaaagggaattcctcggccagagtttttacttcctcagttggtctggcaggtaatacacatttatttatgcgaacactatacttttttataccaagtatggctcatttggaacatttcaatttggtcgacattaaaaatatgcacagttagggatcattttttttttcctttcagcaaatagttagtagaatacaaaggatattacagaaaagaaacatcatttcattctggcaaacatataccaaaagaatatatggtgcagcaggaaaaagtttcttgtacattgaaagctttaggattgattttttttcttccaatctagtttagtcagatataaggaactaatggttttaaacctaaaggaaaaggtatacgatagacatgttttcattgttagtcattcctgggagcattatatgtgttttatttgctgagaagtaagtttatagtcactttgctgttaatatatctgattcttttgggttctcattttcaatgaaattgtacatggcatactgactggtttgcatattcaggatgataccatcttagttattggatggggaacaagtgtcaagattgcagcaattcgaacagattcatctcaaggactcaatggcatacagaggagtatcactgcaagtaatgagaagtacgtggatattgtgggttcgttccaaacaggctatcacatatccgggattgctccatttggtgatcttttagttgtgcttgcatatattccagaggaggaagacagagaaaacagttttagcaattctgttccttcacgtcaggtaatcatgatggcttgtcctttgcactgcactctgtaaatctatttttctcctttattgtgtcatgacccgaggtcatgacaggataaacaccgccgggaagatagccgggcggcgtcatctcctggagaagggatgtagatttaggctagggagaagaacattattgggagagagagattagactaactgatattcattgcttaacttgagatgaatacaatccatcccttatatagagatgatatgacttgacccttaagaaactaactcaaactaactctatctaatcctatcctatctcctaaccaactgctacagtactcgtggtactgtttatccgctaggacttggcctcgtgggcctcggcctctctgcccaacgcctatgacatattgtgcaccagattccttttcttatgaagtgatgctgttcccacatttacctttttcgttatgtttaaacactttgtagggaactgcccagcgtccagaaatacatcttgtatcatggaaaaatgatgaacttaccacagatgctcttcctattcatggttatgagcattataaggcaaaggattatgctcttgctcatgctcctttctcaggtttaatgaaatgtgctttaacagtgaatgaacttctcttttcttcttcactgaaacttttctaatgaaggaattttattgttatatttttaccacccaggaagcagcaatgcaggtggacagtgggctgctggtgatgaacctttatattacattgtatctcctaaagatatagtggtcgcaaagccaaggtttgtaatgttgcaaaacaaaggattatattagcttctaagttctgcaattgcaaatgaaagaaggcaataattgattgagcaaaacttctctttttgaaaatgtgatcttccttcgtcatattttctctgattgtaatcttgaagaactccattagtccttcaattttctgcattatttaattgtgatacacatgtaagcttggctacttgcagtagatcacttcagttgcatatctgattctgtggcatttaattttcttctaactacaagtagcatacgtagaacaatactaagctagtttcttctgataatttccagcctatttgtgtttctgagctttctataaggacatggcaaaatttcatttcagaaaatgttgtatctttatatttctactgatataatatgtgctttcaaattagagatgctgaagaccatatttcttggcttcttcaacatggttggcatgaaaaggcattggctgcagttgaagcaggacaaggacgaaccgagcttcttgatgaggtaaagtagaaacagtttgagtttgaacagtaaatgaataatggtatgcattatctgcttgatgatgaggatgctacccttattgtttaggaaccttcaagtagacacctttaaggtccattatggcaactgaggtccccatccccttctatagttttgttggcgattatcacgttcacaatattgagcattttagctgaaaacaatgggacctgtatcatgtaccaataggtgtttatatttaagctggctcgtctttagactattgttgtcatgagttaaggtggtcctaacaatgtgaacaacaaatacattctgaaattctatgcatattttagaagtttgcttcctatcttatatatattatgctggtctgatgcatattttagaagttgacagcacttcaacaacataacccagtcagtatcttatgagcccatttttttaggaaggacgacctcagctattaagaaatctaaccacataatagctaggaacattattgaaattttgttcatgccatcttatgtcaggtgggttcgagataccttgatcatttgataattgaaagaaaatatgctgaagctgcacgcctctgtccaaaattgttgcgaggatctccttcagcatgggagaggtgagaaaaaaagaagtgttgatatacattgtatccttcatcatacgatctggaacaaacacaggagcattatgagattttgatgtgcattgtttgttttagttgatcactagtatatctactgaccataactttttttgtgccacaggtgggtctttcactttgcccatcttcgccaacttgctgtattagttccttacatacctacagagaatcctcagctgagtgatacagcttacgaggtgccattacttctttctattttgcttgcttgctctttacaacacctctgattctaatactaattctaattggtttatgtaggttgctcttgtagctttaactaccaatccttcttttcatgaacttctcttgacaactgtaaaaaaatggccacctacattatactccgcttcacctgtcatatctgcaattgagccacagctaaattcctcttcaatgactgattcattaaaagaggtatggaaacattttcttaatggatgtaagacttacacagtatttttgagctctttgacatcttggttctgtttgccatgtaggctttagctgaattgtatgtcatcaacagtcaatatgacaaggccctttctctgtatgctgaagtaagtattacctaacttgtagttaaaaggttcacattgcattaaattaatagaattttgttttattacctgtattgttgacccaacctcatttcattcagctcttgaagccagaagtattcgaatttattgagaagcacaacttgcatgatgccattcatgacaaggtatggttaaaattcccaaatgtaggataaaactgatctcacttgactttttttttcaagtttgcatttgtgaattgtcaagtgtcatggtagcaattgtctaataatggtacttacatatggttacaatgtagttgaacatgataatatattttagacagagacaggcttcaataacctccatatattcacttatgggccttgcgtatttcgcaggttgtcaatcttatgatattggatagtaaaagaactgtaaacctattgatccagcatcgtgatacgatccccccgaatgaagttgtaggacagttgttgcatgctagtaaaagttgtgacaaaagacatttgttgcatctgtatttacatgctctgtttgagacagacatgaatgctggaaaagactatcatgacatgcaggtatgctgattcttctgtgaacaagcagtctttatcatactgttcacctcctgcccatttgccctatttctgtagctctagtttttgtattagtataacagctaaccacattacactttgtgttgtaggtggagctttatgcagagtatgagccaaggatgctaatacccttcctccgtaccagtcagcattacaggcttgacaaggtcataaactcataattctcaaaagagaaaaaaaaagcattcattatcttgagaaggatgagtaatgaatgacatgtggttatttcaggcatatgaaatctttgcacaaaaagagcttgtacgggagcaagtttttgtgcttggtcgtatgggaaatgcaaaggaagctctctctacaattataaacaaattggaagatattcaggaggtcctaatgtggttatgatcattttgttaaaaatttggggctagactagcaattctagactgtggttggattgcaataacagtaaccttggatgcaggccgttgaatttgtgatggagcaacacgatgatgagttatgggaggaattgataagacagtgcctccaaaaacctgagatggtaattgagctgtgtattctgttcaatactcttgacactgatgttccttctgtttattcattgcatttttgtaaccgttgagcaggttggaatgctgttggaacatactgttggcaatcttgatcctttgtacattgttagtttggttcctgatgggctagaaataccaaggtaaatgtgccaaaatttgtttcgttcaaagataatgagaacctacccccaaaaaaaaaaacatcacatatacaccttacgaaacgaatttctatcatcagatgatcagaaattcagaatccaccaattacttatatacaaattattagctatgaccatcactcagtttattataataattatagggctatattgacactgtagaatagagatgctacaactttatttaatccaatccttctcttccctggttcaagtgttcattgaaatattacgcttttgataggttgcgggatcgccttgtgaaaattgtgacagactatcgaacagaaacttcattaagacatgggtgcaatgatatacttaaggttaatattcaagaaaaagatatacttaaggttagttgtctatttattaccccacatctatcttgacgtttgatgaccctgccatgtacaggctgattgcgtaaaccttttggtaaaatattatcacgaggctcggcgtggagtctacatggctagtatggacgaggaggtgacaggaactagggttgctgaaggatcttcacgagcaaacgagagatcatcaagtttacgagctttagagatcaaatccagaacaaggtgtggtgctcggtgttgcttgtgctttgatcctttgtcgattcaggacatctctgtcatcgtgttctactgctgccacgcatatcacacgtcttgcctcgaaggcgggttggacttgatgaaatcgaacagtagtactcaggacagcgacgaggatgatgaaggtaccccatcaggcgagtctcgaatgcgctgtgtattgtgtactacagctgctgcataataacttatttcgtaacgagtagtccatatccatgtgttgtgttgtaagtttgagccttgtaattagcgtgttattctggcgtgataaatatgtacaataggttaattctttggggggaagccatatcctcagcaagaggagttttgtgtagatttgacagatatgttgattacttgagcaaagttgtacggcatttttcttaatgccacgagtgccagaccatcggaagttcattccgattcttatccatgttctttgtttgccacgagtgcacgtgtaactatgtaaggaataattgtacctggtgctacaaagattaattgtttaaagttgcgttgtactcggttctattttgaaaaaaaaaggacattcaagtaataaacctcttaaatcgcaaattcgctagtaaggtcccttgaggtggaacctacctatccgttaggccggtggaacctacctatctgttgggctattgggctgtgttcttttcggtgagttttgctaaatggtggtttttttttaaaaaaatatatacgaaagttgttttacaaaaatcatactaacccttattaaaaaatttaagtacttaaattaattaattataagaaaatatgctgttccaatttacatgcatggaaggtgagtttccaacctcaactctcgaatacagccgattcaacgtccatccgtgttaagtctcagaaatattaaggccattaatctttggatgtggttatagagatagggttcagaaaaaagtaaacctcctaaatcacatgaaagtaacttgtcgagccatgggagctgtaagctgaacaaccaattctgatttgcgttgattccttttcgcgatctattgcaattttctacatttctctgatctcaaactactatagtgaaaataaaaaaaaaatccttcatatatttacacatgaatacatgattaacgcgggaactgctatacaacgggatctcatccaaacgggatgataccaagcaagtagccgatttcgatacctattggtgttggattttataccttatacgtatattaactaatacctcatcggtaccaaccgatacccgtatggtctctgcctgaccacttaaattattatctcctgtgactcctttgtatgagtttgatacattatcttcctcatttcatcttgattctggatatgatatgatagttcctactaaccgttcgaatgaaggaatttcagataaactaattcatttccggctttcggcaagaatttggaaaaaatatggcgtaccaatggaggccattgtaatatatttccaccgtcttcaaaattttgcatagctagaagaaatttcagctggctactagactattctcgatttgttatgatgacgctaaaaactggcttaactgcttcaacgcaccagaagaagtgaaaaaaatatattcaaaacttctaaagcaaatattttctcgtattagcactgttgtgaattgcgagtgcccgatctaacatttgctaacagtaacactatagagcctgttctggttcaacctacttacccctaattttatttttctaacagctttcagctgttttccaaatgtattgttgatttcatccacaaatatattttgtcactaattttaagaggtgcatttttgtggttgagacaatgtcagcattttgcaatcatcaaacacaatgaagtacggtgtacttaaagctctcttagtttgttctacaaatttgaatgttctcttcataagttctgcacgctcaacaaaatacgaaatgaattctgaagagaaaaggagcatatatagtagcccatgagcacagttttggtcctagcatgtgaatgaaaattatttgaacatagaatcaatcgacaacttaacagcatgtcaacattatgctcaagcttcttatatatttcaaattcaaaaggataacccatggttccctctattaaaccatggaaactatatgtctacatccaatcaactagttttcaaggcaggaactaaggcagcaggatatacattcgagttaattactagaagataaattcattgtagaatcagaaaatttagaccaatcaggctaagatgcggcacaccattacacccagaagatctacagctccagtcaccacataagacaatcattctttggtccgattaaaaattaccattgccaaatatctgcaaaatataaccccctactcaaactcctcaagtccttgtccccttctacactctgcaaaatagaccattgtataagacatggcaagcttcctaaaaatatttgttcagaaaaacaatctactactacttgcagataggaattggtttaaatagcctacatacttgcaggggtaagcaaaacaatgacggagcagcaccagcgtatgctacagaccacagaaaaactgtggctgtcccacatgagcaccaccatgcctcccgaagaacgcatggttgacaaggctttctttcaaacaatgcctcatagcacatggaagcatgttatccaaatggattttctcccgcaaattccccttggtgtcacacagaaacaagaacacagagctctgaatgtagaccagaatttccccacgatgacatacgattttccatgaaaagaaaccttcccttgcaatgctcctcattctcgccacgggcaatttaacgtggtacctcaacgaccagacctccgtctcatagtcctgaagaacccagagtttggccataccttgagtcacaatgccaatgccaagcataccaccatcaatctcaaccaaatgtgcaccataaccatcaacatttggagaaaccatccacctgaaggactcagccaccgtgtcgaaaacgagtattgcgtcttccggtttacggaggtgccagtgcaggcagccatggagcaacacgggtgggagaaagccgatctcatcaatccagaacacgggtgggagaaatgcctcaggtaatccaatgcgccgcggcttctccgacgagccgaccgcgaggatgcagacggcatcgggatacttccatttgaggacgcggtactcgccgtcgccggaagatgggtgcgggtacagggtgacctggctgccgccgccggtgagggctgggactggcgtcacctggcgcgtggccgggttgcagatgtagaaggcgcggccggagacgaagaggaggagcccgtcgcaggaggagtggatcttgaagctctggtgttggcggtagtcgctgaagccgaggacgcggcggcgctcggcggggtgccggatgaggtcgacggaatccacggcggcgtcggcgtcggcgggggcgccgctccttcacctcgcgcagccgaagacgagcgggcgcggcggctggtggcggtggtgggcgaggagga

SEQ ID NO: 28785 - DNA, 19038 bp, Oryza sativa
ccctactccgatgaagtcggcgactcgcgacggggaaattgtcttagggcaaactgacctagctaccgtgattgagagagacggagattgatcttgttttcgtgcagccgcattaaccttaattaatcctaatctcttcctcctcctcggtttcctcgcaaccaattccgccttggtctcctcccctgccgcgcccagcgcgccgatcgccggcccccccctcctcctcctcccacattatcttctccaagccgccggagacaccgccgctgtgtcatgtcgggagagatggcccaaccgcataggttgaagaacagaggaaggcgcattctggaaagacacgactcgtgaagaaggaaatggactccatggaatgtaagtactggcgtgagtgactggcaggtggggccctgaggacgagtgcgtgtgtgggaagaaaaaattttgaaataatactgtttatcgattgattgtgcaaaaatataccggatagcgaaggatttgtggaaataaaccagagcgataccaccgatgttcgctcctggaaagtgcgatagcgtggcgaaatcgctatatgaaagagcaatagcgaagttgagctggcgctctcgcgcaaacgagacgcgtgaccgcagcggtatcgcgcccgcgactacctcgggcggagccatcgctctcgcacttttgttgcgcgagaccgaggtcggtatcgtaatatgaaatcgcgagaccggttatgacgcgacgggggagacgtgggcacgcggtatcgcgctttgcgcgtgcgagactggtgacgcggcatgcgcgagagagagaaagcctgggggagggcagtgggcccgcggcgtcgcgctttgggagcacgagaccgatcgcggtgtcgctatacgcgtgcacgagagcgaggagcgcagtggggcagcattgtcgcgctttgcgggcgtgagaccgcgcgttgtcgcgctttgcacgcgcgagacagcgggcggtctcgctctacgcgtgcgcgagagcgagggtatcgagggagcggcagtgggctcggtctcgcggtccgcatgcgcgagaccgtcctcggtatcgcgctccacatgcgcgagagcgacgacgcttttcgcatccgacgccaccgacacctttatttcccatatgtatttctttttgctttttgcacgggttctagccatctaccttagctttttagggaggggtggaagatctctgtgcactctcttatcagtttactgttgtagtcacatcatgccggccatttctaaccgctgtagcgtttgaatccaatgcggtcacggggttaaattgagaggagaggagatggtcttcacagaggaagacagaagggagtgaactgaggaggagaggaagagcaagagaagagaggaggcagtgcaggcagtggagagaaggaaaaaaagacacgtaagttgattagttttctattagcacaaattcgtaagatgaggatttagaaaatattagttcacgtagttaatatttgtttttaattatgtcagagaaaaatttaggtatgtattagttactactattttatattttgttaggtcgtatgtaaaaatagaaatgtagaaagttaatagagtcgattcgggttaaaaaataggtagacgtaattaatttttaaggtacaaaagtataatataagttacaattaatttatacgtagcagtaattataatttataattaattagtagttcatatgatgtttaattttatatatacgaccaatattatatgtaacaaatgaaaaaaactgaaatattaatagttatatttgtagttattgatattgatattaatagtattgataattattaaatatggtacaaaaattaaattaaagttgtaattaatttgtagtaattttaagttacaattacttagtagttcatgcagttatttattttgtaagaaatggaaaaggtataaatattcgttaagtagctggaaatatatggtgtgcttaaacacatgcttaacatggtaggtagttacgaacgaacaaagaaatatagtactacgaagaactttgaaattgggacttttatatgagcaaattggttgaaaagaagaaggcaagacaaggtatggttctataacggaagaagatgtagtaaatttttactataattaatagacagtttgtaatttatttggtattgtaattaaagtgcagttaaataaatttatgtcgctgcaactagttttatactgttggaggcatgccatgaagcccttcggccggacctgccgaaactatagtactagcaaggattcaagccaaagacgtcaaggccattcaggcgaagccctatggcggaagccataagcgaagatggcgaaggctggaaagccgcgttggtattatgaaagtaaaggcatctcgggcgaactacaaagacttcgccatgacgagttcggcatcaaggaggcccaacaggccgcccccagccttttaggcccgtttgccatagaccaggcccagcctatcagcccatgcccatatgtgcaaatgacactgcatacccatataaatgtccctttcataagggcaaccatgtaaaatctcttgcaaccctaaaccctaggaggtgcaagcttgtgctaaggctataaatagacctctagggccatgtaatgggggatccccaaaaaaatatttcacgaatcaatacaattgcttttacattccaactactattgagagaaccacgcctttcgacgtggcatagttgtccattcgacaacagctggcgccgtccgtggggaacctagaccgaaagggcgaaatgggacccctttcgccacacccacacccttcaccacagtacccgtgaggtacggcgacaagggcttggggcaaaagtgagttaagtccaagctggggggctacgaagccaccccagcctctagacacctttcgccatacgccacgcccttcgccatagtgccaataaggcacggcgtcaagggctgcgggcgaacagggttcgccaaacgccacgcccttcgccatagtgccaataaggcacggcgtcaagggctgcgggcgaagagggttcgccaacccacgcccttcgccatagtgccaataaggcacgacgtcaagggctgcgggcgaacagggttcgccaaacgccacgcccttcgccatagtgccaataaggcacggcgtcaagggctgcgggcgaagagggttcgccaacccacgcccttcgccatagtgccgataaggcatggcgccaagggctgcgggcgaagagggttcgccacacgccacgcccttcaccatagtgcaaataaggcacggcgtcaagggctgcgggcgaagagggttcgccacacgccacgcccttcgccatagtgccaataaggcacggcgtcaagggctacgagcgaaacatgccacgcccttcgccatagtgccaataaggcacgacgtcaagggctgcgggcgaagagggttcgccaacccacgcccttcgctatagtgccaataaggcacgacatcaagggctgcgggcgaacaggtttcgcccatccacgcccttcgccatagtgccaataaggcacggcgtcaagggctgcgggcgaacaggtttcgccacacgccatacccttcgccaaagtaccaatgaggtacggcgtcaagggctgcgggcgaagagggttcgccaacccacgcccttcgccatagtaccaatgaggtatggcgtcaagggctgcaggcgaacaggtttcgccacacacccacgcccttcgccatagtaccaataaggtatggcgtcaagggctgcgggcgaacaggtttcgcccacccatgcccttcgccatagtgccaataaggcacggcgtcaagtgctgcgggcgaagaggtttcgccacacgccacgcccttcgccatagtactaataaggtacggcgtcatgggttgcgtgcgaagaggtttcgccacacccacgcccttctccatagttccaataaggtacggcgtcaagggctgcgggcgaacaggtttcgcccacccacgctcttcgccacagtaccagcgaggtacggtgacaagggctgggggcgaaaataagttaaggagttgctcccaagagcagccgaaagagatttatcatttttcaagatactccgaggggccggcaaactcaattggacacctgagtgtcaagctgccttcaatgggctaaggcagtaccttcggcactagtgtaaatatccgttcggaaaaacattttctgccgattcagtgtgccgaaagagttcattaccgacaataacaagtggtttgactccgagaagtccaaggaaatgtgcaaggggctaaaacttgaaatcaagttcgcattggttgcacacccgcagacgaacggggcagccgaaagggacgaacaacaaaaccctagcagcactaaagaaaagaccgaaagctggtaacagttaaaaaggttgaagtactaaaaagactgaaagccagcaacagtcaaaacgatcaaagtacctaaaaatacctttgccaaaggaaaaaaggggaaagtacgagccgaatagctgtaacacgcaccacaccccatttatttgccaaaaagcacaagttacagataaattccattgcccgccaaaaggcattcagactttatatccgattcatcagcaaaagcagtcctcaaaggcgaaggactacccccttagcatcttcttcatcgctagttgttaaatcaacacaaaaaatttttaagcggtgaagaaggaaaaacggggattatgctacgtcgacgctgggcaatggcaaactgacgctcagtcatataaaattcatgggtgtcttcgccttttttgtgtatgatatttcgtggaaaaatcccaaggcaaacatttgatcgacgaaaacgccaggggggcgatacgaatcggccgaagcatagctcgccgaacgttgaaaccgcgacagctcgttttcggaaaacataccgatcgtcgctacactcgacttatgcaaatacttaagcgtttctggacgcacatgccaaaatttgagagtgaatgatgagggctgaaaagtcaatgtgaattcctttcgctaacacgcaagggggccaacacgcctcgcccttccgaacgtacaagttacaaaatgtgatgatagcgaaaagaaacataaaaacatgcacaagctccatcgagcaaaagcacatacgtgttatgcaaaggagcaaaaaattatattatccatttcagaacatttttgcctcgcccctactaagtcccgcgaacacggttcgtcgtctatactgtacacgactctaaggggggaaggaagcgaaatacacaccgacgtcaagcgataacaacttgacgattagtcatttcgaagtctaaccaaagtgtggcaatgttatcacggcgctggatgtggcaccggtcataatcctctaaggttcgaccaggaggtcttcgcctctaattcgccattttgcaaccacatagctacataaaaggcgaacgcttgatcgacgaaaacgccaggggggcgaaacgaatcggccgaagcatcactcgccgaacgctgaaaccgcgacagcttgtttcggaataaagatacggaacgccgttgcattcaacttacgcaaaacacaagcgtttttcccagcgcaaaatgctacaagtcgaaaacggaagtcgaaagctgaaaagtcaacaaatcttttcgccaatccccaaaagggggccgaacgcatgactttcggtgaaatccccgctaaaacaatagggaaaaggggaaagaaaaaaaaaatacaagtcaagaatcgcgcaaagcagacaaacttggcaaaatataatcacccaatgtcataatagagcttcgccattctcgaaaggcgaacgccagtgttcatattttttctacagaagtctaaaaagaggtttcggcaggaacattggccgaaaggggacgcctcatgccataccatatagtttgcacggtctcggccgaagctccttactcacccttgcccgtgaggggcttgttggaggcatgccatgaagcccttcggccggacctgccgaaactatagtaccaccaaggattcaagccaaagacgtcaaggccattcaggcgaagccctatggcggaagccataagcgaagatggcgaaggctggaaagccgcgtcggtattccgaaagtaaaggcatctcgggcgaaggcatcttgggcgaactacaaagacttcgccatgacgagttcggcatcaaggaggcccaacaggccgcccccggccttttaggcccatttgccatagaccaggcccagcctatcagcccattaaaggcccatatgtgcaaatgacactgcatacccatgtaaatgtccctttcaaaagggcaaccatgtaaaatcccttgcaaccctaaaccctaggaggtgcaagcttgtgctaaggctataaatagacttctagggccatgtaatgggggatccccaaaaaaatatttcacgaatcaatacaattgcttttacattccaactactgttgagagaaccacgcctttcgacgtggcatagttgtccattcgacaacatatactataataaattggtagttatgattaatttgattatgtaagtaatcaagtgaagttgaacttagttctattaattttttatgttatgattaatttatagataattttgtactaactgatagttacaaatattttgtatttaagtaaagttacggtccgttagataatttatagttaaagttgtaatatattatatgtactcatccaaatttgcaatagtagtattgttttagaggtcatatctaaataggtacaaacagtccgtagcaaagaacatgatgcggctcaatgagtgtcattgtcctagataaagaatagaaagagctagccaaaatgatttttaacttagcttccgtcaatgtttcttcggtgcaagtagtcatttgttgtattaaaattaattgatatgtataattaatttgttagttaaacatatggattatgcagtgaaataaactttgaggcagcaattgttatacgagcaagatggttaaaaaggagtaggcggaatctgataaacgcaggtaaatattttgtcatatttatgtacgatatggtttggttgtattgttttaagtattacatactcttttacttaaattaattgccatagttatgtttaattacgtgttttaattaattaatatgtattaattttattgtcatgtgtttatttttttggtcaaagttgtagtaaaattataaataataaattgcgttgtcatgtattcataagtaaataatttatgtttacataattatttatttataaatttttttattacaagtacatgaattttttataaataatatggaaatataaataattagttattgataaagatttttttatcaaaaaaacagtatgcgtgtaaactaatttttgtcgtgaataggacacgtttgttctgtaagacttccttacggagtagtccgtgttgactgcaatggtaggaatgtcggcatttagagtgtatttcggtgaaggtgaaattatgaaaatgaaagtggtctcgatctgagcaactttaggcaatgcacgctataccatccaaatcctgacacccttactatgcccgaagtttggtactggttaacatgcacattttctttagatccgggtatatatagtgttaacgtgagggttatgtggagccgatcggctaacaacataagataggagttaaaaaatgtgacacggagtaaggcctggcaggattggctcgctggctgtaggagacggggatatgaatatgtcatgctggtgctagcatgtcaaggaagagtccctacggagagcgctgcagggcaatccagcaaccgtgaggtgttggggtctagttcacacgaagaagatgaagttgtagctccccatcgtggtggcgatgttggtcctgacattcaaaatctatccatacaaggagatgaagtggtcaaccgccatcctactggtgaagccgatgaaggggaggacatacctgctatagttgaagaaattgagagggtggaccgacatgcagtcgaagatgaggaaaacctcactgctgaagagaatgatgatgaagatgaacaagaagttgatgaactacctatgcctgcttcgtggaaccttgaagaccctggttatattgcagaaagctcttgtcatgattcaatatggttctacggggatggccaaatcaatctgggtgcaatgttccgtgacaaaactaggttgcaagacacagtgaagtcatggtcattccagatgcaaaggcagttcagggttgtgaagtctaacaagactgagtacacggtcgtctgtgagatggaaggttgcaccttccgtcttcatggtcacgtgccaaagtacgagtcttactggattgtgtccaaactgcaggaacactcctgtctgattcggaacactagggagtcgcatcgcaacctgaccgcggcatatgtcacgaacaagtactacaaggaaattattgaaggtgatgacctgcctgtgcggcacataataaaactggtggagaaaggtgaacaatacacaattagttaccacaaggcttggagggcgaagcagaaggccatggagaaaagatatgggacatttgaggaagcatatgacacactgccacagatgcttaacattctaaagagcaggaaccctgggacctatgttgctgtgcagaatcgggagtcaattcgtcctccaaattattttgtgatgcaatgggcattctttgcattcggagcatgcattcatgcgttccagtgctcgaggccgatgctgtgtgtcgacggtactttcctaactgggaagtacagaggctagatattaacagccgttggtgcggatccgaagataattccagtagcttttggttttgttgaaagcgagaactacgaaagctggttgtggttcttgcaacatctaaagtggggagtggtgcaaaaacacacattgatatgcatcatacatgaccagaatgctggtctgttgaaggcaatcaaagagctccaggaggatggtgatggtgcatactactggcctgacatgcacagccattggtgcatgcggcacatgggagccaagtttttcaaacaattcaatagccgacagctgatgaacatgttcaagcggttgtgcaaggcaaatcaacctacaaagttcgatgagctttggaaacaacttgacgaggggacaaggacacatatccggtcaaagcagaccaacaacaacccgcaggatgtacatgtcacccaggccctggaaccaatggatgatcttattccatcaaatggaaagaagcgtaggtcatcaaagaatatcaaatgttttacccattggattgagtgcgagccgaatgataagtgggcactcctgcatgacactaatggggctaggcatggcataatgaccactaatcttgcagaggcgtacaatgcggttcttcacaaattaaggcctttacctctaactgcttttgttgaaggcattatgcacaggacaacgatgtggatgaggacgaggcgggccgcggcgttgcaacaaatgtctaacgcacaaacacctttctgcaaaaagatggcagagtacctccaagagaaggctaacaaggcaagatttctcacggtcattaccaatgggaacgtcagacgaaggtgggaagtcacatgtcgcactaaggggggttttggatcttctactggggtcatcactcatgaagttactctagggcacgaatctgataacaaatgttcgtgctcttgcaataagccgaagcttcttcataagccatgtagccatgtccccggccgcgtgcgctaaaattaagcttgattcaacatcatacgtgttgacgttctacctaaaggatagagttctgaatgcatggagtgctgagatcctcgggtggaggtaccttcaacacctagtcgatactaggggtgataaaaggatctatgtgccagacttggatttgttgaaggctggtaagggtagaagacagacatgacgcttaagaaatgatatggatgcatccgaagcgggagggcctgtgaggcgatgtgaggactgtcttcagtacgggcaccgcactagagattgcaagaataacatggagggtacatcttcaagcatggaacctaggcaacaacgtgccaggaggaatagaaggggctctcagggtgctcacgatagggaggaaggaaacctgcagtagttgtaacatgagtgaagggtcatgttcaccggctcgcacgggaacactgtggatgccaggctaatcccccttgctcgccaaagtgctgaaggtaatatagcaccttctgcacagtttagttggggatcagccatccttgcagccacataccgtggattctgcgacgcttgtattaagaccggacaaagggaggcgattttcatggggtgtccacttttggtcatgttgtggtcgtacgagctcttctcgttcggacgtccatacatgagtgtggccgtggcccacaaggacgattacactgacgcagttgatgatcgtcctaccttcggtactcgctggtgctacggaccggtacgtatgcttgcattaaaggaatatttctatcatttcaatgatactgcattactaaatctacaatctctgatcgtgcagccatagtgggcgagaatctaggtgcacaatgtgtatgagtacttcaccgaggcgttcgaaagccttagggaaaacgaagttcgatggattccgtacacgaacgaagaggccattttgcgtgcaccacatggagtaagcatcttatgctaccgcgatgaagcgtactggatgacacgaaaaatactggtgtacgacatattcttcgaggggtataatgttcaaagggtaatgcgtcaaatgggattgtaccaacaagtcccagttcctgttgggcttcaccttctaccagatgtgcacacgtatgttgttatttcaatcctgtctaatttctgtgctctccaaaattgtcagatataactaacaactaattgttgtatttttgttgcagggaaaagaggcaagctgacaacaggtatcatcgatctatgcactcaaggatgatcccatggatagaggcgtggtcacaggccttgaatgatgtcgtccaggagaccaaggcatacgaccacaacacttacgaacaatacatggcctagtactcatcgcagactcgcatccggctgcttgcacccgaggatcccgacgagcgaggtccaccaacaattgatcaaatatatgatatgcagctagcaccccccgctcacttgacggtactactagcatttaaatattttgttgcatctgtgtgtccttatacatagggttccactttctaacattgttgctacgcttcatgcagaccgacattgcaggggagttagtaagggatgcgaaaactttgtgggagaagtttagagatggaatcgtgagtaccaaccaggaagttatggccgcggttgactccctccgtagaaaaggtaagcgaatcatgtggctcgcgtcgtgccgacattcctcggacgtctatactccggcaacatcaagaaggacgttcaagccaatgctggagcgtccctcttacctcttccctgccgtccacctcagcccgcccttcagcctccgcgcgacgatccagcgacggtcgtgctgcagtaaggtcaacttcgtttcgtgaggcacccactattccgactatcccagaaatcactgaaatttcggaacacttaggaggctttggttcaactcaaggtaaaatacgttattgcggaatgctaaaataagtgccatttatattaaagactaatttattcgttcgcagcacaaccggaacgagtacccccacatagctctacgcccatcacctctcaatggcagggtgggtttacgtcgtttgctggtacaggatagctcatcaatatgctaattttttcccaattgtttatgtgaaatgactaaatgatgttttccaattgatgacagagggaatgtgaatggtccgtcttgtgcctcatatgcctcctgcaaggccacatatgattcctcaaatggctcacgatgtgccaacctcactctggcaaggaggatttgcaccatttgcaggtccgtgtacattcagtaccatattggcatgcatatgtccactcgtaattttactttttgctaattaattgcatatacagggactagccaaggtatccctaccataccccaattgtctgcagattttatcagttaaggagggtttacgtcgttaggcggtcagtctccacttacatctaatttcatatttttattatttcaatttattaattttgcatgtatatgaatcttattgacaatttacttcctgatattaacagggcctactcagtcggttccactgcatgcacctacatatggcaccaacccatggcaaggacaatccatggattacggtggtacgctcagccatcattctccatacacatatatcgatggcactttcatgccatacatgactcccacttcaacttaagacaataactccgtgacattttatatggatgcaaggcacgtcgtttggtggtggagtacagggttatatggacttcttgcaacaaggtgattggctatttggtcaatattcctcgcatcctaatgaaattccatatatgcaagcactgtcaacaggtttggattttttttgtgttattgttgtgtgctccagctttgataatttcattgatatctacattgcttctgtagggtcatttcgccctaaactaatgtcagggtttaggccttacactgcatcataaggcgacatgtccagcttcggtggagggtcgtcatcggtacccaacgagcttcggacttcacaaattgatgatgcgccccatgtgacacagcccacacaacaagaggttggcgaaggaaacgacaatgacccgcgtagatctaaccgtgagctccatgagccaaaccgtctgtcactctcaggccctcgacatgccgcacgagcaagaaaaaaaactacaaaaaagcgagctggaacatctaggactacgactgaccatgatgatgatgacgagtagaagtgaacattacgtctttcagttcacctggcaaacctatctgaaccttgctgtgattttggctttctattactagcaatgaacattatttttttgtactgcttattcttcatgttatgtacgatgtttcgtagttcataaatatctcatatttttatgccctattttgtatccagttaacacatatgatttttggttaactaataatttttcgtacgagagctaacaaaaaataatagtctcacaaactaaattaatagtgcagtttcgatgttactcgtgcggttaaaattgcatattacttttactttttactaatatgacttaaattacccacttatgacttaaattacccagtaatttcttttcacagagatgcaatgatacgcacctaaaatggcatcctctctttccaatcacgggacatgccacagagaataaaatcattcacaattaaactttgaagattccgttgcgctgcgccgaaagtgacttcgtcgctttgtaattaataaagcaaacagttatgcagcatgtgccgccgaaagtgatgctgttgctttgtaattattaacttcacgagtgaaacagtccgacgctattgaattgattagtctgaagctagcagtccgacgcgccgtcgtctctttctaataattgagattgcgcagcttcttgccatcccctataaataacaaccaaacgtagcacacaactacatctcttcttcataaacgttctgctggttccaacttcgtgttgcatattcttaggcctggtcttgaggcaggaactgagtagttggtgaactcgctctatgttgttcgttcactcgcgacgcggttcctgtcccaagaccgagtctgtgaatatacaaatgtgatttttttaatacattcttacacccactctttttttcaagttctagcatccgtttgtgaatatgacctactcctgcaaattcataaactcggtgttgcatattcttaggcccggtcttgtggcaagaactgagtagttcgttaactcgctacgcggttcttgtcacaagaccgagtctgtgaatatgcaaaggtggttttctctgtgaatatgacatattctaaattcctattctttgtcaactttataaaaattgctcccgaatgatctctctactcctttatatatttttaataaatatattatcaatttatatttttctataggtaatatattgtttctttctctgatatcattattttgcaaattccaagatatttatttttcttctcgtagctgtgtacacaatctttgcctattttcaatataaacatatttctcatattcatttatgtatatatatgttgcacacataataaaaaaaatatgaaaaaaagttatactttctactccctccatcccaaaaaaaacgaatctagtactacgttggttttttatgggacggagggaaaaaaattatgaaaaaaattatactttttactctcttcgtcccgaaaaaaacaaatctagtacaaggttggttttttttgggacggagggagtacgtaccaatggcgacatgaaatattagcgatttgcacaatggattaatgtaattagctgatcgctctcgcgcgcggggagagccatatcgctcgcggtctcgctctttcaaagagcgagaccgaaggcgtcgctgtcgcactgccgtctcccaggattagcagatgaattaggggacgtgggccacgccgcaacggtatcgcggttggaaagagcgatatcgctggcgctctcattgacacgtaccgcgagactgactcgctctcgctatcgcgtagcgcgagaccgctcctgtcattcctcgggccccacatgtgtcagtcagcacacgccgctacggtctcgcgcagcccgactgtgataccgcacgcgctatcgcgcccttgaagagcgagaccgcttcgtgccccacgtacgtcaggcggcgtcggacggaccacggtatcgctttacaaaagcgcgagatcgcctcgctctcgtgctttcggagcgcgataccgatgcattagtgctccctcactccaaattagtgatagcgccaccgctttcgcgcacgcattacgcgatgccggtatatttccacaaatccgcccctaatcagcttattcttgcaattccattcaagaaaacgattactttcaaaaaattttctgtgtgggaagttgtcagctagggactaatgtcagctcatgcccagagtttttccatttaggccctgtttatatccactgagaaaattttacaccttgtcatgttgaatgtttggacatatgcatgaagtattaaatatagatgaaaaaatagctaattacatagattgcgtgtaaattgcgagacgaatcttttaagcctaattgcgccataatttgacaatgtggtgctacagtaaacatttgctaatgacggattaattaagcttaataaattcatctcgcggtttacaggaggattctgtaatttgttttgttattagactacgtttgatacttcaaatgtgtgtccatatatccgatatgacatgccaaaactttacacccctggatctaaacacagcctcagattgctataaatcggatgtctgatattttgcaaaacatcgaacaatgttgcattgtattgtttaaaatgtttcacatgttgcactcctcaatgaaaaatgtttcagatgtttcatcaatcagggaaaatgtttcaggtgtttcatcaatcagggaaaaatgtttcatcatttcaacaaaagtgtttcaatcaaatgcaatcgaaacatatcatttgcaagatgaagaatcaatatatgcaacatcgaatcaaaacaaaatgaaacaccttaatacaaaaaagtgcaacacaaagctaaacccacctctatcttatttttcaactccggtcgccgcccccggacgattagttgcacaaagtgggcgacctcagctaggactagccgcaacagcatcaaccccccatcggtggccatgtccagtgccatcgctaccgtgtcgctgggatgacgctaagtttttgtgtgggcaccagctgcaaggctgttggtatttcttaacgacattactagaaatataattcccagcaatggcgcataaatactcctggtatattatggttacagagttcatccgcaagcgcatagatataccattataacatttcacccgagagtactccaagggtatcgtatttatttaatcctgtgggaagatcatagtagagagaaccgtactaacaatttatatgttacttgtaataatcagtctaagcaggggttaagataaatcaaagggtagagtgacacacaagcatggagctactcgttctcatactaaaatatctaagctaagtggaaagaaaatagaaagagaatctactcctatacttctagtatacatattatacacacactctagttatatgattatctagctaataccctctatccgatgccctcctggtacttcaagaagccacccctggttgccgagttccttacaacagcccgtcatgaccatacaaccggggctaaatacggaggagtaccctccccaggaaattaacttatgattatatacacgcgcggagtaatacccatactaagctatcaccatcagcggcccacctctcatccacagcatataaccccaaataatgatatcccgtaatctagacaccacgcctaaactaccagatactactctaatatcatcatcatgacatagagtaattgcataagtaaacattatacccgtacctatgcatctcctagataagctagcagtataatcagtataacatgaatataatgtaaagttggtattcatatacttggaaagtatttcaatactagaaatgtataaagaagagtattctaaataaagtacaaaggttacaaaagaggaaatgaaagctactagagccatacccgaactcttccggactctgatttctattctattcctactcctctagcttaagaacactaaactaaatttgagagaatatgagagagctttgcttggagtgtgtgagtgaagtaagaaggtgaagtccttatatagaggtaggtatgaaggttgtgggaggggaaatgtccgaagtgccctccaaccatcattgggatgcaatcctggacgtccacgccaaaccctgacatcaacggtttagatgggggttcggccgaaccccctggttcggccgaaccatgggctggcccaatccagcccattttcggctggtgacctcctggactttttctctttacagacttgtgaattttggcccaattgatcatgacatttctaagttgtcggcccattctacataagtctaattctcgacatcgtccaattgatttatcgtttgatttgatgtcgattctccttcactttataattattctatgcaaaaaggttagtaaacctaatactagtggaatattattattctaacacaaatatgcattgcaagcataactagttctcctctattttggtaatattgacggtcgaaattgatcgccaatgaccgtcaacaaaggctagccacatgtcaaggatgtagaggccaaatcggtcgacgaggccgtccgccgccaggtcgatgctgatgagtgccttgcagaggaagcggaagatgcactactggagcgggataaggtagctggtggaggccggctgggtcagtcgccttgtcttcctcgacggcggcgcggagctcggtggcccagttgtgtgcggcacgatgaggaggttggtgctgaaggccttggtgcgcgtgtggtcaggctcctaggtatcgtggtagacaccgatgtgggtgccttgggtgaaggcgacgttgggaacgcatgggctgatgaggacgtcgcacttgtcgatgagcgtcgggtcaaagagcatgtgaaggcagcggtgccgaaggcggtgggtcaacgccgagaaagaaaaggaaggtgctcgggatagagataggagggagagatggaggagtttgcgtgagaggataaagttgatgtgtgcggtggataaatgctgactcgagacgcgtcgtccgatattaactcagcgtaagacgatcgatcataagcattttcgtttaaattagggttggcaactgggcaggtgggggtgggttagataggaacaaccctgccttcgatcctcgatttctccacctggccccggcctctaagcgacgaacatggcaaaatagccccctaccatgcccctgatacccgacgtcttactagggcctcgcatggtcagctggcctattgagaagactcagaattgggtggcttgggttgcagtgagaaggttccctatggacagtgacaacgaagaaggccaatgagtgttggtgccgcaagatggtgtaggccacctagatgcgtcgggccatcggcaaggagcagctcgtggtgctcctacatcgatgacgtcggccgctaagatgtgctagtgtgaggtcgcaaaaggagagtgaggataggtagagtagaggaggcagtggtatagggcaaggcgagacgggataggcggttgtggctaggccggggtcggccgatccctggctagctcccctggctgtggcctttctcctaggccttggcaaaatactccttggcccagtggtgtattgattgggcacaatttttggtattcgatgagtttgtgagcccaagactcaatgggtgaaattatccttcattttctatatgtatttcgtctcaactttggtagtttgtcacctg

SEQ ID NO: 28786 - DNA, 687 bp, Oryza sativa
ctgtggcctttctcctaggccttggcaaaatactccttggcccagtggtgtattgattgggcacaatttttggtattcgatgagtttgtgagcccaagactcaatgggtgaaattatccttcattttctatatgtatttcgtctcaactttggtagtttgtcacctgcatacacatatagaccaacactcgtggaaattgttagaattaaaccctaccactatgttgggtgtttcatattttctgatttatgcaagtattggcggaataaaattggcatttaccagccgccaattctccactccgcgtaaatgaactagataagtcacgcataacttatgcagactccacgccgctctactcaccggattgtttggcaccaatgagctattggcactagtacatactgatgtatgtggaccaatgagctcaactgccagaggtggttttaggtactttattacctttaccgatgactttagtagatatggttatgtctacttaatgaggcataagtctgaatactttgaaaagttcaaggaatttcataatgaggtacaaaatcatttggacaagacaatcaagtatctacgatctgatcgtggtggagaatacttgacccttgaatttggcaatcatctaaaggagggtggaattgttccacaactcactccgccaggaatgcctc

SEQ ID NO: 28787 - DNA, 789 bp, Oryza sativa
acaaggcagcgacacgaagaaagcatggtgccctatacacaagacggacagacattctctagaagattgcctcgtcttcaaaaagtcgctcgccaaacacatggcatcggaaaaaggcaagcgagtacgcgtggttgagaaggacgctaaggcgcctactcaggaatcagacttagcatacccagattacgatctccatgtctcacacatcttcggaggttccacggcatactcctcaaagcgagaatacaagaaagtggaacgtgaagtctgttcgacgtggcagggggccgcgcccaagatgaagtggtccgagcagtagatagaattctcagaagaggaccaccccaagactgctatcatcccagggcaatatccgatcatggtcgaacccactattcgtaatatcaaggtcgcccgagtactgatcgacggcggcagctcaatcaaccttctcttcgccagcaccttggacgcgatggggatcccacgaagcgagttgacacccaccgatcaacccttccatggaatcactcctcagtcatcgtccaaaccattgggcaaaattacgttgcctgtgactttcagccaagcaaacaacttccgaacggaacagatcacctttgatgtcgctgcattcgatacagcatacaatgccatcattgggagaactgcactcgtgaagctcatggccgcatctcactatgcgtatcaagtgctcaagatgccaggaccgaagggaacaatcactattcaagggaacgctaagctggcagtacaatgcgacaa

SEQ ID NO: 28788 - DNA, 552 bp, Oryza sativa
cggaccttcgtgaagccggtgcttccacaactagttcaacctgttgaacaacgtcttgctcaatttattgtgattgtgtggacgttgaagcgttttccggtgattcctgaatttcttcaagtcgcactatgctcccactatcctttcttgagataaactctttctccaagaaaacactgtcgggcgacaaacactttcgtttccttaggataccccacaaagaagcatttatcttatttaagtgtgagtttgaccgattgcaaacgttttacaaaagcctcacagccccaaatctttaggaaagacatactgggacggttccctgtccatatctcatatggtatcttatccacggattttgatggaaccctatttagtgtgaacacaactgtctctagagtgtaacaccagaagcttaacgggagatcagtttggctcatcattgatcgcaccatgtccaacaatgtacgattcctccgttcagacactccattccattgaggcattcctggcggagtgagttgtggaacaattccaccctcctttagatga

SEQ ID NO: 28789 - DNA, 14318 bp, Oryza sativa
taatagtggactgggagcacaagagcaccagtccttctgggagctttagagttgttctctagactcaggtgcagaacactattctttgccttgcagtagtgcagttccatctcgtgttctggtaatacgtatatcggcacattgctaatttacatgtagctcaggccctcctatttagttctctggctatagcggaactggctatgcacaaaagtgctgctaagcagtataatttttttggtactattatgaactcaggttcataacattgtctgctatccatatggtactatttagtatttctgcacacttcgttactctgtctgctgttagaattcaatctaatctttctccattagaaatttttgtgtatagtgtagtgctaattatttaattgcctaatgtgtagaatagcagcattggttcgttcgactattattcgcttattgtacacatcatgtccacttcgtccatctcgatggttggcagtgctgaggaatatggtatgaattaatacttccttcaaaattcaatacttcattttttttaaaaaaatttctgcatgccactgaagaattcacatctcatttatggcactaacttttgcctattctcacatatgctgctgttccattaatgcccgttttacatgacattatctcaaacttcaatccccctgctgttatgggggatgggaattacctttttcctcgggtatttgttgccagtgataaaagaagtatgcaactgggaggagtcgacaatagagttgggacaagcagagagagttgggttaatacatgtttcattgatcttgacaacactgatgcagttggtcaagctcattactttcttggttgtgacttgtttgcttttgctacgcttgcaacgttagatatgcatgatacccatatttgctcgacagccctttatgcaataaaatgtatttataccttgtccaacacatggtcaagaagcagcagaaggtgttggtggcctgtgaacgggaccctgagccagccggtggtggtgacatcaagtagaatggcagtgatagcagcctcttggacagcacggaaaactcatggctggagctgccagcaagcaggaggccgctaccatgtcaggggtggctgctgaggtgatggagatgggtgaagcagcaccagtgcaggacaatctggccattgcagggccactgccacggtggtggaaccttccatcctgcagctggggcagagttctcgtcgttattttcagtctcttacactttggccatggttatgggtgtcatggactgcttggctgaggtggccaggaacctatctcagccccagcacagcatgtccaccagagctttcaaatagtggaactcaaggccactcttcctccgggcttgtttccacataaaatgggcagtaatggaacagtggaatgtgcatgaacggaaaaattagtggcatatgtgaatggtctccacttagtggcatacacaaaagttcccccaacattagttctagggtttcttgtatttatgcaaaactcataatggttggcaagtttggcatcaattctttccactgcattacatgcataatatcctaaaagaggattgctattactttgttaagtttatgtgctactactctttagtttcttggaagggcatgtgtactgttagtgaatgttgttttagtatcagataccatatctcagttgccactgctctttctgtcaatcacctttctttaaattcatgtagattgtcgattgttgtagttggcatggcaaccatgtttcttatttctagtatcctatttttccttagtcttctccttcatgcacaaactaatgaggataaggcatcattttgccttatcctcaatgcgtataatgccttatcctcaatgcgtctattatgcatgaggaacacatgtattattagtatatttgttacatttatacagaaccttcatgatgaaaatcatgctttggatttggtagatttatattgtcatttttttataacattcaggttcttgctacctcaattgcaagaaacacaagcgaaggtctgtccagttctggacatgatcccgttgacagtaatgcagagaatgatatatactatggagcagatgaagacaacatgatatctagctcaaagcaggaaaaaacaaactggtctgccaataaatttagccagtttccacaaagaaataagcatctgagatatcgcaccagggtttttgcagcagagtatgtctgttagactgttacagatatatatttttatttgcttcccacttattattaaaatgtttatttgcatggaaacagatgtgttagccatgtacctgttgccgttggaacagaaccagctcattttgacctcctattggcaagaagtgcagtagctgaaggggttcatctgtcaaatgactggctaattcttaagctacaagagttggtttcactttcatatcaggtccaaacagaaaacaaatttaatattcagagcacaacacaatttgaagaacttttggagtgaattctccgattaaaagctgacaacaacatttgcatggcagataagtactggacaatttgaaggcatgcagccaataggagtgaagcttctctgtttgattatggacaaggtatattggctcttttggaaacaattttgcgttaacataactacgtaatcaattggtgcagtaatgccaatgatgcactaacttagttaattcaaggaacatatctgaaacttaaattagtcctcaccatctgccttgttgaatattgagagtgcatgttgttgccatcaagatgctgtgaaactagtaaatagttttgtgaggtataatcctactgtatgtatgttctaagatgactttggcacatgatcattttttcctagataagtaattgattatttaggtaaataggtttattatcaggaaaggtgaagatatcctaaacctgggtgagacaataacaagaacttattctacatttctttacagttgaccataacactgcctttaaatttccttattggctgagtgttgtatttttttatatatttctagtttggcatggctgtggatcctgaatttcctgggcatatattgttggagcaatttcaggtgattattacatctcagtttccagtgtttcttctttttttggggtaacatcatgatcctgtaccttagtcttttatatatagccctgtaaacttgatttaatcctgtagttgaatgattgctttactctgcttttttctgtgtttgaaatttaaaatgcaggctcagctcgtttctgctgttcgaacggccataagtactgcttctagtccacttctccttgaggctggccttgaacttgccacaaaggtttctagcaaaatatttcccgttcgttcctttttttcgccctgtacaccagacatattgataaatatctgtgtttggtggaaccaggttatgacaagtagcgtaattgggggcgacagggtagctcttaatcgcttgtttttgctaatatgccgtccgctaaatgacatagaggacctattttatccatcttttgccgattgggttgtatgtaaggtattatggttctccaaaattgccttaagtggtgatacactgtatccaaatttgtttttgcaatttgcctctacggagctcctgagctagcttttgtcatctgacagataaaagtacgtctgcttactgctcatgctgcagtaaaatgctatacttatcaattcttgaggatgaaggaaaatattcctgatgaacatcagcaattggcacctttgcttgcaaatagttcatctctcttaggaaagtattggattggagccctcaaggattatagctcgataagttttggtctgcattcaagaatcaatgtaagatcatctatcaagcctttttaattatgccctaaagaggttataatgttcttctgtgtcttcttaaaaacagcacaagccgttccttgatgggatccagtcattcttggtgtcatcaaaggcaaaggagtatcttgatgaagtttgggcactaattcttcaagcaacagctcttgatgcagctcctttggagttcgaaatggatgattctgaagatacgcttggacagacatttatatctggacatagtatggtcaaactgaatttaactgaattcaagtttctttggggactatcggtccttgtgctttgtcatacacaaccatcaatgtcgaatagtgctataaaaatcaatcttgaccgtaataatgagaaaaagattggaggccttgttgtctgcgctggactagataatccaagaccatgtgatcaaatgttgcttgtgttatcgtccctcacttcacaagtgttttttagcatgaattttcttacagtggatacttgtcaggaactcctacaggtcagtgcatacctgctgttgccacaatactttcaaaacagttaaacttgctggcccctatcttaagttatttacttctattaatgatgaaaacccaagcttatgtgtaaactaccctaattccctacacaatttcacaacaaaatactatacatgctttatttggaaatggagtagcattttctaagtgtctcatacttatgtgttgaaatagtaatggtacacctgggagattacattggataccccttggaaggacatgttcaggattgaagatttgattatcatatgtcaaatgctaggaacatgatgaatatattattgttgtagcttaatatgccaataggcggaagggcacttgattcccaggaaaactaatgtgggattaatattagagttaaatattcattaatattatttagctttaatagttaaatgcttcaattgtaataatttaatgtgcctcttgaagggtgcttttcatctggtagcttttaatgagagtggaagtaggacacttatttaggtgatacagtttgattaaatccatgcttgttaattgtgttgggctagatgactcggcgttcttctcatctcaatgacctctgccactaatactccttcccatgccaagccatacttctcattctttgcttgattaagttattccttgattgacaaggtatttgtacaatgcaggctcttacttatgctgattgttcaagtgctcctgttgtatgcctgttctcccaggtattgtcttgtctttgttaatttgcttcctggacatattgatctacgacgatctacgaccaaatcttaatgctgttgcagtgtctgcagtcctaaaacactatgcttgttagtgtgtcccaaaacactatggtgttagtgcagtaattttgaggatatatgaatattagtgtttggaggagttagaggagataaaaacacacaactaattgccaagaggaaaaaaaaactaacgagttattaaacagcataagaaacaatgcattacgttattcctgaattcggcgccatcttacctattaccttttttgagacggtaatcctcactgtccttgcctcaattgcctcggtggcttttttttttaatggagatagccatttttcccaatttaccttaacatttttttggatttcttgttgatgcttagtaattcagtcattgtggtttctaattataggaggtgcatcatttcacctttatgtcaacacaaattgctttgagtttaaaattaagtatttttttcaaatgcaactattatatgaaaactattgcttttctacagcttttagctttgcattttacctagctacaacaataagagcatgaaacttcattatcaggcaaacctttactcaaggaggtcctatatatatgtcattctctgttaatgtgggctgccccacctgacaacatgtgacgacaacagaattgcataggggaatgaatgacaattaggacccaattgaataattaatttgtagactggtatccaataacaaattgcttcttgcccttaatgtgcaaaattattccattgcacactaactattttgatgggacatctaattgctgacttactttggattcctcatgtagataatcagactgtgccctgacaacttctttgaggtggaggagtttgtttttgttgcattagagttctactcatggtatcttgctactatacttcaaaggtaattctcagattctcaccacactcaaaagtcaaaacctttttctatgcttctggtgattactttatttcctttgacaagatttggcaagcactccttttacccttgtatgttatttcttttaatctttgcagtaggtgcggaagttctcaggaatgcttaagcaatagtttgatttctgaattatctgttgctactgagacaatggcatgccgaatgaaaaatgaggtagtgatatgataaaacctgggtttccctgatcatatctagttggcaaaatttgctacagctacctcagctaattacgcgttttttgcgtgtcctgtagcaaattttgcctatctagttagcgccttttgaattacttttgagatgcattgaatctgataggttgttttttgtggcagcattggtggaaactgatgatgctactggtatccacgtcataccaatcatttcaacaagtcccctctaatctatgcttgtcaaatatcatctcctttctccaaaatactttgccaatcatgaagaaatatcttcaaggtaatattatcaagtcttatttacttgctgatcaacttttcgcaaaataccccttgcggttcagtaccgctaaaagctcaacaaactgctcttgcttcaataaacatcaattcttagccccgtaagggttgagtcctattcttgttttgataaccctggtaagaatactgttttatttttgctcaattatttttatggacattaaacacaaaactaaatctaatgaaataacatagtagcatattactatagcagatttgaatgagtcccccatgtaaccggtaacttaccactctgactccattgtctcccttatcacccacttttgtacaccaatacaaataaataatgtgatgacctcgattctcagtcttttatatgaaccagatgctttggatgtgcttctaagatttggcctttgagtttaagaacaaacattctgttagaaagtaatgttgaatttgccaactctgttgtactttgacctggggcaccttggttatttggtcccattatcatagtccaaatgccccaaatttatggagcaaatctgtgagctgatggctggaacaggactaaaaagagttgcttaacaagtaccttcctaaaaaaccgtgggatggaagagtgctattcccttataaacataaaacaatggttagacaggaagaccattgtactaatttaagaagtgattatttgttttgtagaaagagctgaaccaggtgatgagtgtgccaactgcgaagttgccttgggagctttggttagtctggtggcatacttatgtacacaatgcagcaacaggatatcaatgctggataacaagatttctgattcctacaaactgttggcaaagatactatatttctgtttgggagaagctattgctcttgcaaaacttgttgatgagattggatatcatggtgaaaattgtacaagcaatgaacttatgtcaggtagcttcaggcattgcacacaagttgttcaggcttcactttgcagtacaaccatacaggtaaaatagctggatttgcttactatgcatgccgaaaatgtcatgaagtgttagtatctaagaagatgattcctctaaacaggtacaaatgttgggggtacatgttcttaaagtctctgcacaaagagagctagctgaaggctcacaaacagcaacacattcttttatggtgctatttgtggaattactggcagatgtgttttctgtgattcaaactgcattaaaggtactatttggaagcttaattaatttgggattgtaaatttttggcaagatcagatggcattccctgacaactttattcctccagggatgttcgagcaaggactctgtcagtgtcattgatgaatgtctaaaattgcttttcctcttccattcgctagcacagtcaaagaaatgcccgcaagaggctacaatgcttctgctggatgccttactgatggttttctattcttctagtgccacgggttcacaggtagcacaaattagttagctagttctcatcatgaaatcaggtaaatgtacaattgaatccagtttgatggtctttggctgtgctgatctgatccaggaactcactgaagtaaacaacatatccaagaagttgttctctcattttattcagattccatctgctgccatacatatcaaagatataatgttgtcagcagcacctacaaaaagacaactacttcaggtatttgcattattatgtactgactgatttacatggagctgaacttaatttttttcttttagattctgactttcatgtccatttttgaaaatctgtcaccctactctttactctacagtatgtatatacaattatgttacctacactatgtttgtgctaactaactgattcccatgctactttattttgctgagatgtgacacagcgttgctgcatttttaatatattcaaatttaggtgttctctgaaaattgtatcttaaataacctgtgctgtttgtaggacatgatccgagcttcagtcactcagggtcagacaatagtgcctgggcatatcagcgcaaattcagagcagaatgctcagggtggctttagtcaagaacctgggctcaatgccacagatgcagatgaagagaagaatgaaaaacaagttagtgatgatgattgggatgatgactgggataattttcagtctcttcctgcacatggtaccaacaatggtgcagactctgctacagctgcctcacctttacctgaacagggttctgttgcaagtcctcatgacgaacagatccctcaggtaaatattaatcaagaagttagtgatgtagatgtttcagatggtacaacagaaggcctaagttcttttgataaatatcttaaagaaccctccacttcacatttctcagatactgcacaacaggtcgagagcaaatctcaagagttctcctgtaaggatcatgaggaatccccaaaacatccaaaagttcattgcacaggatcatcagctcatgttactaaagaagagacggatgatgaatcacagcagattcacggtgaccaatttgtgagtagggaaagcaagaattatgacttgtacttatcgaatgagatcgctggttcagcaggtgaagaggaaaatgatacctctggagaaattagaagggccacgggtgatgcgctggatgaaaatatttcttccgtagatgattccaacttgaataatatttcagatggtacagaggataaatcaaataaggcttgtgacaaggtgttggttgccaatgaaaaatctgaaacggttatcacagactctggggaaaaggtgtctgcttcatctgatgaagtaaaatcagatttgtatcctgaaaatgtggataccaaaccagaatcatctggtggtgaaatcgcggagtcagggtcatgattgtgaggagccttggtctagacaaaatctagatcatttgggaacacatccatacaggtgactgcatgccaggattctggaagtaaacagcaaaagctcctagtatgtgtttgtcaagtcccattcttgatactgagctcaagtaatatttgttagaatatgagttctcacaagtgctgtcagaaggaactattgctctgaaatgtttgtcagatttcaaggctggactttggagcaaacgaagagctggcagcggcatgtacttccaaagtcaccactatacggactgttgtacattttacccaactttttactcatgtttacatgctgtggaaatgtagatctatcagattattcttgattgtcaggacaagctggacggattgtatacattactgactaccctgtgcatgtgtttgacctcatgtcccatgttgtgaacatggtgacagagtgtggtttgtgattgtaaacatgctgatcaaagcattctggcgttccatatgttttaagattatcaggccagttgcatggcgaaatgatgtttgtttggtgctagctctggttgttcgtgcgaataaataagtggaagctacaatgccatgactggtacactccacatcttataatagagatgcacaaaacaaacaaccgaaaagaacagaaaactagcttcaagtttttttctcaacatttgaaacattggggaatgcggaggaatccatgctctcgttgatgctgtagcaacggtaaaagcttctccgctccaccgtgagctaagcggatagagctagtctgcccaactatcttgtcgtcaccaagcaccatcctcatgccagcagataatctgtcccctcagcattaacgtattcattgctggcatggcatcatcgtcatagggtaccatcttcaccgagttgctgtagcttatctcactaaaagccattgccctactccattgccatatcacacgaaaacgatcacgctaccccaccattgtcggtgtagaaccttgcctccaccgaactgtcgaaagctggagaatcgcgatcaccacgccatcttcgccgctgacctctgccactacccttggcgctgtcaactgtgttcggctttgctcctagcgcaactccaagcagaccaaccaccaccaccaccaccaacattgccattgtcacctaggcccctagcaccgtcattgtgcacgccgctagtgtgtcgccgttgccggcccttccacctctaagaacgaacctgtcatcatcatgagctgcccaccactaccgatcaacaagccggtattgactggcctctgacttctgccactgccaccatgcctccctaactccgagttcgacaccattatcgaccaccagttcaccttcgttgttgccatgaaccctcgctaggcgaggccgatggaaccgtccgcctccaacacgactccgctccacctcaaccagcgagaccgggaggagcgggagggaggaggtagaggaagccccaccacccctatcgccaagcagcctcccgcctccatctccatcaggctaggctgctccaccatcaggggtcatcagcaccatccgccccaactcagatggctaggtggggggaacgagagggaggggagaaggagaggaggaaggtctaccaccactcgcctccatttttgcagcgcctctccgcgttgccaaccgggtcaccaccgccacctgcctctaacgccgcactacccctactcgggtgatgagactcgggaacaggagcgagggaggagagggaggaaggaaagccccaccaccaccatccttgcagcagtcgagggtgcgcttttcaggcaacgacgaggcggagaagctggtggcggcggtgcttagggttaggaagaggaagaggaaaagttaaaagaacctcacaatgcgtacctataaatgtatcatgataaattaccatgccattttaggatgaaaaacacaaaagataaggtttgtaatgtcggttgtctttccaaactccccgcatttgcctttgtctgtgttttcctcggtgaattaccatgggagttctctaaacgatggctagccaaaaaagaaaaaaaatgattatttcagcggttgtaaattccaattcaattgtttagtgatttaaacaattcaattgtaactttaaaaaataatttttctgttttccgttaccatgttttataactgctaaacggtatatttttttaagtaaagttttctatataaaaatttctttaaaaataaatttatttttcaaatttataataattaatatccgattaatcatgagctaatgtcataccattgaaaattgatacttcctcatcccaaaatattacaatttactactccctccgtcccaagataaatgtagttttgtacggttcgtatccaactttatcggttcattttagaaatttttatatgattagtatttgtattgttagtagatgataaaacagaaatattacctgatgtgtgactattttttttaattttttaataatttttttaaataagacggacaattagacgttggacacagatactcacggttacacttatttttaggacggaggtaccccgtgacattttggaacggaagtagtactcgattagggtatgtctcgttccacgtgttacgcttacgtaccgaaaatcttaccccaactgtcctcatctgaattcatacgcgagctcatttgatcaccacagatgtccgctgcagtctgtctgcatcatacacacagggcgtccctcagtggatgcactcactagaattaatcctctcatcaatttaatggcctataaaattagtaatatatacatcctggaatcggcagctgcaactagctaggagaatactgaatacccgataagagggaatgtaattttcactctcatttctgtcaggaatatatatatccatttattttattcaccgaatgctccaagcacaaggttgctagtagtctcccatttcagcaacttgtagtgcagatccctcactgttcaccattggttgggatctggcaatctctgctgcatgcagatgcggtaaaacaggtgaaaacgtaccgtcgtcgtgtgggctcccggcaacactaggacccactataaaagcgacccataggcaattaattataaggtagcaattgctgtgtatggttcatatggctcaaattacgggcctgctcacttttgatgtcaaaaaaaccttactaaaatttggcattgctaaaattttggcaacttactaaaattttggcaggatttcttatatagttaccaaaatttagcagcaaactaaatgtagccacttttttaggtaactttaccaaaatttggtaagattaaaaatggtatcaaagtgaacaggccctacaatgcagttttgtgtgtgtgcgcgtgtgtgcgtgtgtgtctatatatataaccggttttgagcctgtatcttttttttgcggaacctataatataaagttattcccagtgaccccacgagcggtgggacccacatgtcagttaccacgttcctctgactttacatcagaggatctcaatcccttttacacatgttacccagatggtggctacataggtgaatctcacaaaatcttactaagagagatgtacaagcttgtagcgtaagtgtgtccaccatgataaaccacaccattaatattatttaatattattgtagattttacaaaactacacatctaaggttgggtatcttaattaataaaactacagattttaagaatatataatatcttaaaactaaagatttattagcatatgaatatctcaaactacagattttcgatcgaggtttcgtcctaacattatttttccgcatggagcctttaaaatctgtagattaatttgtgacaataccagtgctaaatatctatagtttgagacattgtggatggaatttataacactaaatctatagttttacgggagttatgttaccctagaagtgatatattataataggacataaaggaatatctatttttctccatacatgggcttgcaacctttgaaaaattagggagacgcaaaagctacgaatattttgtaaagctagttgagtatatagcatcctccggataatgattagtgacatcaagaatatacgtggcttgcagctacgaaaaggcctgggagtgttcccctcaaaataaagttagaagattttccaataaaagatcatatgcctgggatcccttttgttttctccctagaaatgattctgattccctacattgcatgtgctttgctgtatgtgcagattgagacaggtgcaaccgtgcaaggtgatctagtcactacaagaagctcaagtagctctgatagacaaaaaccactactgcaggaaagatcataggtgccagttcgaagaccctcataggtgctggtttcgagcccggtaccaattacccaagacattggtgccgattactgaaccgacacctatgggcattataggaacgaaccggcacctatagtgatctcggggatgacctggatgctttataggtgctggttattgataggaaccagcacctataataccatataggtgccaattctatggtttttttttgctggcacctacaatgccacatgggtgccggaat

SEQ ID NO: 28790 - DNA, 4083 bp, Oryza sativa
ctaaacaaacttatgtggaagcgttgtcaaaaacaaagttgtataacttattgagatctacctattttattttggttatttctccatccgagtttgattgacctatataaaatttgacttttaaattatgacaaattcaaataacatttttaaatactaaatgatttcaactgagaaagtcatcaacaacaaatttatataactcatcaatatctacaacttttgttttggtcattttaccatatgactttgttttggtaatttgaatttgaatttcaaattatgtcaactttaaacaacattttgagatactaaatgatttcaactgaaaaagtcatcaacaacaaagttgtataactcatcaatatctataacttttagttttgtcattttttcatccgataaaataatgataatattgttcacaaaatttacatatctctgttatggtttataaattatataagaggtatatacattttgtaaacaatgttacaaatcactttgccggatgaagaaatgacccaaataaaagttatagatcttgatgtgttatacaacttttatattgatgactttttaaattgaaatcatttagtatttgaaaatattatttgaagttgtcataatttaaaattcaaattcaaatttttgaaacaaagtcatatgcaaaaatgaccaaaacaaaagttgtacatcttgataagttatacaactttattgttgatgactttttcagttgaaatcatttagtatttaatttttttttttaaatttatcataatttgaaattcaaatattatatagttcaatcaaacttggatggagaaatgaccaaaagaaaaatggtagatctaaatgagttctacgactttgtattttacaactttttcatacgagttgatttagtgccataaaaatcgattcaaaatttccaatgaaaattgaaaattttccctccgcaacccttcaaaatttttcatctttcctctcccctctctctctctctcccccctctgatatttcccccttctcactctttttcttactctctcaccctctcttctcttcctctctcggcgccgagcacgagtgggcggcgtgcgcgtgccggcggctggcggccgccgcgtcgtccccgtcgctcgggctgccccctccgcggcggcgccgaccccgacgatgagtgggcggcgacgacaacgagtgggcgacgacgacgacgacgacgcgggtggtggcggcggcgccgaccccgacgacgacgacgagtgggcggcgatgcgggcctcgtccctcccggatccgacggcgggagcggggccggccggcggcggaagcggggaatccggcggcggcgcggaaaatccagctcaggcgcggcgacgacgacctcggcgacgacaacggcggcgggcggtgagtgctcctctcctcttcccctctcgtctcttctatgcctgcaaggacggtgcctcatcgccgttgtcgccatagtaccgctgactggcacccccctttcccctctccccatggtgtcatcctctccgatacggccccttcctcttcttcatcggatggggtgaggtgctcagcggcggcaacgagctcgacctcggtaggctgggcaacgatgtagacctcggtagcagcgcggattgagctggaggaagggggcttgctcaattcgatttcccgggagggtgatggggtgcttgccagatgagtgggggtgtgtgagtggcactgcgacgaagctggtgcctagctatgatcgagtgaaaatttatattagttcaaaccagttttttgggttaatactttctctggtagtacaagcattaagattcgatggaaatatcaggtgttgattcagatttcacctttgcatgcaatctatttctaattttctacttctgtgttagtaaaacttatataagtgatattaccatttacttgcaacaatctatcagtgtcagacctgaaattgttcaaacttggctcttcagttccagctgcacaatttttttgtatgggctttactgatgatgtactcaggtgacacaatcgtacgatggttaaaaaaaggcctaggttatgatgttagacagttcataataagataagggaatttggtaggagtacaatttactctgcaagaaacagagaatttatgcttgttaatccctgtagatcattgagccatcactttgttttacagcagtagctttgctcaagaaaatgtttgccttttactgaaagtttttttgtcctcgcagtgcgaccatcatcactgtcaacatgcccttgtcgggtgcatggctgaggccatctgcatatgctccatgaactcaagctctgtctgtctctggtacgggatggatgttgctggtcaaggtagggctgatggtaagggaggttggagccagctgaggtaagtgcctgttctctgaagccctgacttcactttgttcactattcaagatggaacaactgggttaacatattacctctcttctgaaaatcttagcagaatactcaggtttctggtacatgtttcgtagagtaattttacttcattgcttatgctacccttcacttgttcataattttgcatctcaagcttgtacgaaagtctgaatgtcatttgtttgcatctcaagcttccccaaattacctacactgagatatcacaaatcagtttcagtatttttcagctagaagtaaaagatgcagatcgtctatgttttctttcatcatactagctgttgtacgatggtctgaatgtcatttgttcttctgtcggtgctactgttgaagtatggatgctaccgaatctatattatgttccatgattttttttcctaaattatgtgcatgttgtaaatgtttagtacaattcaggagcagagaaactggctgaacagttaaattaaaaaatatataaatttgctgttatttattattctacccaacagttagaattacgcaattataattacagtcactgcaaaaaactaaactggccaatctataattacgcacagcaaagccgtgcgaccttcctagttagtacgggttacttctgaatatttcagtgctgtttttatactctcagctgctatactactaggtgtccattgcagcattttgactgatctgtgtttcccttttttacctttctgttttccttttttacctttcagttgaaatatttctcaaggcagctgggtacttagagtgtgctatccagcacgctctcccgaagatatcgcctgaaaaaaggtggtgtgcttgccctctcattgttggatgaacagcgttccatttgtaattagtgctccataccacgctgaccaacacacggccgcgagagaagaggcaaaccacgcgatcagcaccacactttcttcattcaattgagctataaaatctttccataactcaaagaaaagacgcctaaaaatcattcgggtctcttggtatccttattgttactaactgccattttgtgtaggaaaggtcttcctgtggacctaactgaaggaatcctgaaagctatctgcatgcaagctcagggtcaagtaaagcctttctccctctgcctccttttttttctaggtgaatctttctttcaaacagctagaaatcacatgactcatgtaaatagcagttgaaatgtccatttctcataacatcatagtaatatgatataatccaaattcataactttgcgtacatgctagtttttgtggcttttatgtctgaagaacatctggaattgcaatagatggaatcattctttctgctttgaaagttgcagtccacatttagatcttttttagatcttacagcatgtatattagtgaaaaatgtgaaagaattgaaaaaaaactgcaatcttccattctttgagaatgaactctcattttgcactccatttgctaaaagaatcttttgtttactttgcagatatggaagatcaatttctcaaatagcttggttttgctacacaaatttttgttgcttgctgtggaactattgtttgattctggaagcagagatgaattcttttgaatatga

SEQ ID NO: 28791 - DNA, 10999 bp, Oryza sativa
  unsure (1)..(10999): unsure at all n locations
caaccatctgtgacgtttaatttcgtcacaaaggttgggcctcggctagactacactggcccataagcgttttatgacggttaaaaaacgtcatagattgtgctgatccgtgacaatttcggagaaaacgtcagacagatttaatctgtgacgctcaatagatgacgataagtataatcgtcacagacatttcctgtgacgaattttcagtgatccatgacgaattttttcgttatagattaaatagattcttgtagtgggacaaatgtcctccttgggttgatgacggcatcgtacggcagtcgcgtatgtaaagatggacttacagctccactcgtcagttgggtcaaagagagatggaccaaacaacgagctggacctacagctacactcgtcagttgggtcaaaaagagacggaccaaacagcgagttggacctacatctatatttgtgggttgggtcaaagagagacggaccaagcagagaaaggtagcgggctgggctgggacttaaaattagcttaatgtacaaaacaaaagagtaaaaatgtacagcgattcaaaaatgtttttacccgttgcgttgcaacggatattttttctagtataaataaaaaatggagagaaattgacagggtaattaccgatcgttgcctttctcctcacaggacctcacccagtatacataactatatatggcagtagaaatcatgataccggtaattacgcaagttacgcatcatgtttccttcaaaaaagaattcgcgaaggatgagctatatatgtgtcgcgtcttcctcccgccccatttttggaaacacttgcactaattattactcctcgatcgcgtcctccatcgtcattcgcattgcagtgcatctacggcgtcgaggttttgaggcgcaaagcgcgacgcggagagcagcacagagagaaggagaaggccgcgcaggagggcgatggtgaggtcgcgtgggaggccgagcctggggaggcagaggatcgagatccgccgcatcgacaacagcgggcggcggcaggtgaccttctccaagcgccgcaacgggctcttcaagaaggcgtccgagctgtccacgctctgcggcgcctccgtcgccgtcgtcgccttctcctccgccggcaacgtcttcgccttcggtcaacccaccgtcgacgccgtcgtccgccgcttcgacccgctccacgccgacggcgccgaccccgcccccgcggccgtcgaagacggcggcggcggcggcgacgacgtcgtcgtcgcagaccccgaggagctggatgcgttgaggcgcgcggaggagcagaccaaggcgcaggtggcggcggagcaggcgcggatgcgcgacgtcggggacaaggtcacgcaggccatggcggggagggccctctggtgggaggcggacgtcgaggcgctcggggaggcggagctgccggagttcgtcagggcgctcgagcggctcagggacagcgtccaccgccacgccagcacgctggcctccacagccacgccgctgccgccgccgccggagcaggaagaaaaagttcctgagctagacgtctcggattattccttttaggtgtgttactatcgcatgctgttaaaacctcattagcggcgccgctggttaattaattaattgcatgtgggtttagggtttcgatgctccgttttgttcatagaagcagctagtagtaaattttgcatgatcgaagactcaaagtgagctaaagcctaaagcttgtccttatttacccataaaatgtttttcttaattagcttgcttgatgccatgaatggtttgataaaaaaaaacattgttatgcatttgtgcttgctggtgcttgtatttataaatgaatgaattgttaacattagtagttataattatggtgcgggtgcagatgagtaactcaaaaaaatcattgatcactaatttgcaattaacttgtacttataattactttcttgcctgccagttgttactccctccaatttttttgtgacgtttttgtaaccaacatccacacatgaggaaacagaggtagtacttcgtgcaggtgcagttgaaaataattgtcgtttcgggcaataacattatctccaaaaattaactttggccactattttttattacaatataaagagaaatatcaacaaataattttattacatgtagtttccatttttctatgcaaatatattagaagttattcatagtcaaagtaattaaagtttgatatcaatcttgtctagaactatagttatttggaaaaagtacgaattaccccctgaacaatcacggtcgaccgaattacccctctaaacttgaaaaaccagactttcaataccggacaaaacaccaccctgagcactgttgcaagcggtttagggttcaaatagcacacgtggcagtccagtcatctgtttttttaaaaaagaatcgctagggcccactagtcagaatcctcacccatctctcttctccatcccttctaaggaagcgcgcggcggccggcctgagagcgcaacgcaacgggcgctcttctccctcctcttctgaagcgtgcggcggcggagggagacggggcaacacagcacggcggcctgaccgacggcggcatggaggcggaggcaagggcggcgcgtgccggcagcggcatgaaggcgaaggcgagggcggcgcggcgagcgcgcggaggacgcggcggcggtcggagtaaccgggcacgaggacaacaaggatgggcggcaaactcgtcgtcgtagcctgccgcctccaatgtcctcggcgccacccgcctgctgctcctcgccctcacctctgcacggagacggaacacgggagtactagtagtttttaatcaaacaaacccagtatgtatgcacgacacctgaagcaattaatctctctgccataaaatcaagaacagataggcgttcatccgtagttgagacttgagaggaagttgatttagccaattttatcacaccataaacatatcactgtccatgctagcttgtatccagtctcggtacggtctacgtacggtgtgaggtcgtcgtggtggcaaggaggtgatgagagcgaccgatctagcgccggggatgaatccacagtgtatggacctctatcaggtggtaccgatgactttcaacaaaacctatgcttaaattgcttatccatatattatgacattatgatccaagtataattagtatactatgacaccgctaaacatttgacaccaacgaactaattttctgaatcctccattctggcgcagaggcagttgaggagacaagcgatgagcagggtggatccgagccgagccgttcccatggatatggcgacggagtggatccccactgctcctactccttgctccaaggcggcattggccggtgagctctagggccggcgcacatcaaggcaccacacgggccggcaagctacgggattggcccagagctcacctctcctctacgagtgtcgtccccctccagtctcccgaattttttacattttggtcctttttaaaaatttattttacgaatagacctttggaaaaacatattgcaggaatggtcttttttggtgcgctagagaggctggcgtcgtcctccatcatggcggcgccagccaccctggtgccgtcaccatgccagtgcggcactagggcacgtggttgggctgacgtggcaaagaggggcgccaaccacactggcaccgttccacatatcacggcgccagccgtgctggcgcactcccccaaggtgggccaccccttaacctgcacgggccccacccactctctcctccccccactcatttttgccaagcccccagcccgagcacacagagaagcccttctccctatctctcccccctcacctctactcatcaaatacactcaatttgaagtcgtttttcgcaggatttttttgtggaaatcgaagagaaagagaaaggtatactcctcaattccaatctttttttaattttaatcggttgaatttgtagattggagggtaaccctagaactttttttttgcctaaatttatgattttcaacatccattcttgggatttgcttattatagtgatacatgtgtgcaatgtactcggtagtgccatgattttttgaactatatatgtggtaatgtggatttttaaatggttttgttggatggatggatggatagatggaggcattaaagaattattaatttgatggactagaggctttaggttaaatttttaggtatgaattatatgttcacttagatcttccgaaaaatgttcacttaagatcaagctcctcttgtacttatatgttcacttagatcattaccgcaacgtctctttgatggtcatgtctcccctcttctttccttacccatacaagtcttcccgctttccttacccatccaagccttctcatacttatatgttcacttagatcactaccgcaacatcttctttccttacccatacaagtcttctcgctttccttacccatccaagccttctcatacttatatgttcacttagatcactacnnnnnnnnnnnnnnnnnnnnnnngtctcccattttctttccttgcccatccaagtcttctcgctttccttgtccatccaagccttctcataccaactcttttaccaaatcaaagtaaatttaccattccaactgacctagcatatttaatatatacttatgcccttacaacatcgtacctcctataaaaacgaatctccacatttatcctcgatccattcaagaacttctttcactcgtgaccttaattagttatatagagttgggtgggtgggaaacgaaaacctcctataaaaacgaatctccacattatcgtcgatccattctagaacttctttcactcgtgaccttaattagttatatagagttgggtgggaaacgaaatggtcttcaatgacatatccttaaactcaacatgtgtaccaacgtaaggtttcatcactctaccaccatagtaaacatgaacaattctatccatctacaccaaagaataaaatgtggctttacaactaaaattacatcttccttcctaaacgtagttcaaactaacatattataaccaatgcataacttagattgtcccaaagctactacttcacgaaaaatatttaatccacatccaaaagtaccaacaactttactagtgcattaaacatcaaaatattacaaatactccatcatacaacccaacttagttctaattaactttaataaatttctataatgctaccaaattcgcctccccttcatataattcaaacctaaaaatttaacttaaagcctctggtccatcaaattaataagtcattaatgcctaagtctattttttcatccatccatccaacaaaaccatctaaaaatccccattaccacaaatatagttaaaaaaattgtggcactaccaagtacattgcacacatatatcactataatgagcaaatccaaagaacgaatgttgaaaaccacaaatttgggataccctccgaacgaatgttgaaaaccacaaatttgggataccctccgatctagggaggactttagtctacttagagctgtcaccacctccacacccacctcaaacatactgtgagagatgaagcaaacaccgaaaattaactacccagaaactacgtctatgtagttaataactactttagtgtttataactcactaaagcaatcactatattttaatggactatagtgaacaatgatcccgtacattgattaggaactaaccaagagataactctcatagaataaatcttaattacttaaaatgatattcgattaaagcagagtaattaacagagtaaaacaaataagaagaggattgccgacaactccggaattcctctgacttcctctactctactctactctctacctaatctagtatacaataaagtacaatagagcctcttataattcagcttatgctttggtgtgtgtgagaatgaaggaggagaggggtatttatagtgtggaggtgacttgagagagtggagatgctaaggaatattctccatagaatccaaagagcatcttccttctccctttgccatgtatcccttctgatgacagtttcaaccggtattaacggccacaaccgtcataggattatgataactatcagctggtgaaaaatgggcctggttgggccagctggtggtttggccgaaccaggggttcattcgaacctgactggccattcagcccagctccttctctggtgttatgacatgtaggtcccactatatgtttgttgacagttgttaagtaccaaattaacgtcgtcaatacctgcataagaccataaatatgaaacatccaacatagtggtagggtttatttcaaacaatttccacgagtgttggtgtatattcgtatgcaggtgacaaactacctaagttgagaggaaatatacatgaaggaggagaagaatcaaactcatatccgaacttaaggagttttggacccaacaacccaatcaaagacctccaaatgggccaaacattcatacgaacggattgaggggcccaaaatgaatgtccaggccaaaaaccggagtgaatggagccgtctcgggttcggccaaaccctcagtgaggccgttggctctgcctaagtccagttgggtagcaatccgcttcccaatgactgttatgaccgttttcaccggtagaaaccatcataagtatggatacttggcaacacaagagtgaagatgctctttggatgcttggaggatctccactctcccaaggcacttctccacctataaatacccctctcatcctcacttgtaaacacacaccaagatgtagagctgaattacaagaggctctaagtatactttaggttatttacatgttctatagtatacttggaatagggagatagtaaagtagaagaagttggaggaatcctctccttattcttgtactttgttaattactctggtttaatagaaatatcattctaagtaattgagatttgcttcgtgagaattattcttggttagttcctaattatatagtgattgctttagtgtttagctggcactagagtataattattaattgcgtagatgcggtgtctgggcaattaatttccagtggttgctgcgtatcccacagtacgttagaggtgggtttagaggtggtgacagccctcaagagcacttaagtcctccctgtccaggtacgtagtagagcgacatcagcgaacagcgggttgctagtgcttgaagtattgcgttaggattaaaattaagctttcctcagacattgtttctcactaggaaatcctctttaccctttgcccataaccgactaggatcctgggtatttccttgcggagcagatgtttgaaatttaacccgagtccctttaaatatattctatctatgcatggcaccccatacccagtcggatatatatgtcgtataggtatacgatgaaaacaccgagccgctcggcaaggctggtgagcgcgccgacgtgcaccggctcatgctccctcgcgatcctcttgacgtcgtagacgcggcgcacgaagatggaggccaccagccgcgtgaagccgtcgagctggccgggagctcgatcccttccggtgagcaacttgacggcgtaggccacgtggtagccgacagcgaacgtcgcctacgacgacggccgcgcccgccggatcaggccggagtcccagagcagccacgccgtagcctgtaccaatcgacgccgccgcgcggcagcctctggcgaagtcgacgccgcgggctcgcatcgcaggtgcgcgatggacctggcgtccctctggcgtggcaagtccaggttgccgacgtcgaagccgttcaggttggactcgaagacgaacgcctcgccgccgccatcgccagtgcggatggcgaggccgacctggatggccctgagcgcgtcgacgttcgccttgagcaccccgtaccgctgctcggcagtgagctgctcgaacggcctcggctcgccgccggggacggggcagccggggtattgcacgttaatataagcgcgacgtggcgggcgcgccgcgcgacggagcgtaggatgtcggactcggccttgaagttgtcctgccacaccgagtgcacggcggcggcgtccattaattgatgttaattagatccaagttaatttcgtagtccgttttgcactctgatctgaaccaatcggattaattggtttttgtacatgtacatgaagaactaagaaattatgatgggctatgagtaagggctcctttatagtaacaagaaagaaataatgaacgcactactacataaaacccttttccctcgtatttaaatatttcaattattattttttctatcatatataacttaatgtttcattcgttgatcaactgaaacatttggccgtccaattttttaagttatcagacgtccgatgtgtagttttctcctaatttagtttttccattgtaccgagcggacagccggacactatgctagtatcagttaaatacgggaaattatatctattgtaattttgagtttcaaactatttttggacaatgactgctttaagcgtggtagaatgttttgcttgttgtttacccatttgagccatatgatttgttcgccatacttattcgactatttttaaacacaagaaatctgtataaattatttcaatcctttttaaacacaggaaacccaagtttataacacgtctaactaatactacaatccttttttaaaaaaacatttcatgagcgtacctcatttggtaattgctcaagttatctagaccactttagaaaaagttatgcagtaaagcaagcaccatgagaacatttttgcattgcagagtttctattgctaataaaagagaacacagcaaatacgattcattacaattattgatgtgtaatcgagacatggaataacttgtgttaatacaaagttgcattgtctaaaagaaataatccatatatattcatctaacattgctactaagtaattaaaagaatggaattatattacatagaaaaaaaaaagcctaatcacatcggccgttaaaccgaagggcagaagcctcgaatcaccgcagatgatcgaaattgaaaaaaagatcaataagcgcggagcccacacatctgttggccgtgcatcgccacccgggcctcaccgaggcgctccctcaacgccttgaagcattgcagcgtcgagacggcgccggcgctggcgaccatcccatgttgggccgccaccggcaccacgccgatgcacgcggcgatctccctgagcgagaacccgcacgctgtgttcacctccgccgccagccgcttcacgtcgtagacgccctccccgagggtcccggtcgccatggtcgtgaaggcgtcgaggccggacgggagctcggcccccgtcaggatcttcatcaagtacccgacatggtacgcgccagtgaacgtcgcccatgacggccacgcttggagcaggccggagccgaggagcagcaaccggagcctgtgcggctcgacgccggcgcacgggagcctgccgaagtcgacgccgcggccccgtaggtgtgcgatggaggccgggtccctcaggtcagccgggttgttgatgtcgaagccccggagattgaactcgaatacaacgagctcgccgctgtcgccgtcgtcgtcgttggcacggatggcaaggccgacctgaatggggtggagctcgtcgatgttagccttgaccatgtcatagcgcttctcggcggtgagactcccgtactttttccggccactggtgcccgcttgggcgacggcgcatccggggtactgaacgctcaccgcgacgtggacagcgcgcggcgcgacggcgaggagctgggctgattcggcgtcaaagttgtcgtgccataccgagtggatggcggcgaagttcatggtcggcgctggggctgcggcggcggcgttcatggcgagcgcacgtgcacaaaccgaagcggcagcaagagttgggacacctgcaggtgggctggctactcggaagtctgcaaaaaaggttggagacaaagctagctaggcttggcgcacgatcgatcgaagacaagcggcggcggcgtggcagcgtggcgtctaaaatagttaatggagcacgggcgcaatgattgtgtcgtacgtgcaggctgctggacgtaacgtggggaatatatatagggaagatgtgttcaggtgacgtggtgcgcggccggccgcctgtccggaacagactcaggttggaagtcgcgtttatttcgttaattgacatggttgatgactttgattgtaattagatccaagtttcgtagtccgttttgcactctctgaaccagtcggattaaatggtttttgtacatgtacatgaggaactaaaaaaaataggacgcgactagactagggagcggccgttcgctgatttatgttttaatcatcaaccacttcatacacatataaatctctctttagcttaaaaaaaatacaatggtgcatttcttttttaacctatgtaatgacttatatcttttaaatcacatattatttttaaaatctatttgcatcattgtaccctgctcaaaatatgtgacaaaatgagatgcatgttgaatatattaaaaaacatattagtttaaaagtaatttatttaaattatagaagtaacttccctatagcatgaaaagtaattacattctgactgagttaaaataagaaactatgtggagtaaattcataagcaaagtgtagagaagattttcaagtaaatacatttataaaagtaaattcaataaagtctaaaggtaatttacataaatcataaaagtaactttgcacaaaatggaagtaaattgttacaacattagaagtgaattccttgtatggagaaaaata

SEQ ID NO: 28792 - DNA, 5953 bp, Oryza sativa
caaaatatgtgacaaaatgagatgcatgttgaatatattaaaaaacatattagtttaaaagtaatttatttaaattatagaagtaacttccctatagcatgaaaagtaattacattctgactgagttaaaataagaaactatgtggagtaaattcataagcaaagtgtagagaagattttcaagtaaatacatttataaaagtaaattcaataaagtctaaaggtaatttacataaatcataaaagtaactttgcacaaaatggaagtaaattgttacaacattagaagtgaattccttgtatggagaaaaatatggtctatataataattaaatttaaagtccataaattatagaattgactaaaaccaataataaaaaataatcaacttacagcattatgaatgcataagaagtaatttaatcaaatctaaaagtaatttatatacggagtatatggtaaaagtaacttacatatataataaaagtaatttataaatataaatatttttttatcgtaatataatcatgtaagatcttgttgtgaagatttaattgcaacgaacacaatggtgtaatcagattgtaatggtgtaatcagattgtagatcggaaaagtaatttgaaagaaaactttacaagaaggggaaaaagatatgcatgtctaatagaaaaaggcatgcatgtgtagttggcttctccaccgttcccatgatcgaacggatatgacgcagcgtgcgtgattggacaaatctaagcagcgtcgtacgataagaatcgagaggcctcgtcgattagtttttgcgaaaaaattatgatgacttatgagtaagggctccttagtaaacacaacgaaattatgaatgcacttctaaatattatttttgctggcggccaaattaaaatatattttcgctggcggtcggcggtgcctccagtgaccaaaggccagtgaaaataatgcatattcactagcggctattcgaccgccaacgaaaatcgagtttcgcaagcagcatgctaaaacaaccactagcaaaaatactatcttcgttggttgtaagctaaagagaccaccagtgaaaacaatttttgggtaaaaaaaatgaaaatcggcaacgctggccgctacggccacatgcaccgccgggctccagccatcgctgacgtcgagagatctgtgacactgacgtcgccgaggccccgcagcctggcggtggcagatcagtgttccctatggcctagcggcgatggatctgtgctcctcaccatcgccttcccgacccgccgccaccttcccgagcaccgtcgctgagccgctgctgccactttcacactccccctctgccgtcgctgagctaacaccgccgagccccctccgctgctagcttcctgccgtccggtgatacttgaggaggggagtagaggagatggagagttgaggaggggagtagaggagagggagagagttgagggaggcagaggaggaaagaagactcaggatcgaaaggctaaggcaaagagagcgatgctctctagggatttaattatttaatttatatctcgattttatttgctcaggcggttctcctaagcattcgcaagtgaaaattgattttctctggtggttgtttaagtgggtcactagcgaaaatagctatattttttttgcgatctatgtaaccgaatcgccaccgaaaatcgattttcgccggtggttcatagccctccttgttacaatttcgctagcagttttcacgtatggccgctagagaaaaaaaataggttgatgtcatgaataatcgattttgtagtagtgacaatttttggaggatttaaatatcccaaaaatagaaatcctatcaggccattttggaacaaaggactaatccctaaaggttcctttgaaaatcatatgaaatgagcacctctttttgaaattttagaggaaaataaacatgggcgtgcacagctctacatgcagccagtgtcaactgccttgcccagtttttgcacaccgattgtcgaaacaaattttcggcaatatgaaaaggggtagcgcacgagacctaaaagtggatggatgcggagaaaaatgatttagacaggttcatgccctctcgatgagaggtaataccctactcctatttggggatttgaatccgccggggtgtagtattgatctgacgatcaggttgtctcatgccccctagagggcctcctgccccccttatataggatggggggcaagattacaagatagaaaccttaaccaatacggtatcggtttcctaaatctactttacaatcttatcaaaccagaactttaggccgttccataatatacagggaaacgtaatacccaagttatgatccgttacatatttcataaatataagtcatcccctatagctagtcggataaccatgccgtgtgggtatggggtacccataatctccacagtagcccctgagaccttcacagtcgaaaagataatcttctctcgaactagattactccaaagctgagtgcttcaatcatcttcgccatggtctccgaagtacttttaaatatgaagactgtggaaggctgaaaaataaagtcaggtgcatcgactagatgcacctaataggtgtagcccccgactatgtggttagctgaacaaactaagcatatagtcaaggaataaataatccaaccaaacgagtggttttgataattgtaatcaaccaagtgacttgatatcaatatatagcatatgcggtgtgaatctatgaataacatgatccgagtgatataccgactgttttgtaaaatatgatgagtgtaacctaaagttggctacatcattgaaaattcacatagcaaaacagctattaagaagcttgtatgttgtgaataaagaaattttcaaagtattgggcatacgccatgcgcacaatgctttaacagatgtgcttaagtccctagaagacacatggttccaccacacctggaaatatatggcatatgtgctataaaatccgagtaaataaactcataaaggatttaccaaccgcctagaaaatgaccaaaatatataatcagcctaagccataatattggtcaataaaagtgcacacttacgtggcaaaaagcaatgatattgtatccaatcaattgctttatgaacccaaacaacgccttgacttatataaaaaaagtcagcggggagctatataaagcattactgtttggcaccttttaaaatgcattgtaccaactcctaaaaagttgagtaactgcggtataaaaggattttatggtattgggcacataatcacgtgcacttttgcctaagcagaaagatgcctaagtcactaaaagaacgtgacaagccacacctgaaaatatgggctgcagacatattaagcctaggccaaaaaatatgccttcgacaccctttaaaggatgacgcatgtaacatgctcccgagtaataaatctttcgggtgatatagaccaagtgtagctcatatgaatagctcctgatctgagtgattatcctttatgggatgctccaaaatagatataacaattgaattctaacgggcgcaagtattcggttgataacccttacggggaataataaatagtccagtctttgagcatagaaaatagacccatgatcatcaaattcatgttgtatgtatccggaataagtccaaattgaaggtacggtacttgtgtttgagatagtaagcccctgagtatatagcttgtccttctgtcgtagtcacaattgtccattgatggtagctgacgcagttggcatagagacaagacgaccaatatagagataatattgcccaccagaggtggcaaaaatattggtagtagtgaagatagtgataccaatcaaaagtgatgaagttgcatagccgtggaggcgaagaaaccagtcggcaacagttaggtcagccagcaatgaatatgaaagtgcccagcgataaagttgtttagccatagcagcgaaataatcagtcggtgacagatgatgcagctggtgaagaagatgaagatgcccattagtggcgacataataatccatccatgaaggcgagcataccggtcggtggtgacgaaaacaagccgacggtgaagatgtagacacgcatcaaaggcgatgacgaaatccaccaatcatgaagatgaagaaaatagtcggcgacgacaaacgcaaccgacagtaatgatgataagcagcaatcatagatgatcgactatgatgacgaagttgcccatcaaacagcagtagaatagggctatgttgaagaggcttgacaggatattgatgaagatgatgatgtcggtgatccagtcaatagcagtgtagcaaccgatgataatgacgaagacgctcatcagcgtttgcaaagtaggtcaaccgtgagggtgaaataacaagtcggcaatgacggaagcaaccggaggagaagacgtagtcatccattaacaacagcagagatgtcagggccgatgaggtagaggtgctggtgatgaagtcaatgacaataatccatcaaactgttgagaagatatcgaagctcgaataattttcttgatacgagcgtgtgcataatgaagactgatgcaacgccccttgatttatgaagatggctgtagaacttagtgctatagctgttgcagatgcttcacttagaggaaagtatatgctgttggtcaactcattgaatctgatctgagttaattggttgatgactccaaactcccagacatgtaaattaaatctcaaacttgagaaatttggagtagattgtagcggcatgaagaagccaaaattgccggtgtaataattggagttgctgaaattaaatgtcggctctgaagcgaagacgaagataataactccccgagttgacttgttgattgattgattgcttcatcttgacataaagcttgtcgaattttgagagtcttgtatttgtgtagcccccgactcttggttagttgagaaacaactgaacatagagtcgagaactgtagcttcttgtcgttgagtagtcattgcttgagtgaatatacgcatagaagatgtccgagtagaaatcttgaatattggaacaccacttgttgtagtaaaataacatggcattatacttgttgacgtatgctaaggtgtcgaaactcttgtagtcgtcatggttggtgaagtagcaaagcttgcgaagtagaggcaatagagtttgccgatgccgaagataataaaaatgaaattgctccaccatggtgacaaagttgcatagccgtgatgaagtgaacatgagtcggcggcaatagaagcaaaccggtagtgaagatgcgcaattgtgaagataaaagcaccagtcggtggcggcataaccagttggcgacggaagacgatgatgtccatcagtagtggtagcagtcggcagcagacgtaggcagcttgtgttgaagatgctgacgcctattagcggtgacggcgatgtagccagccgtgaagaagatagcatcagttggcgtcataacaggccagccgtgcaggcggtgacaccagtcggcggcggatgaggcggccggtcggtgaagacgtatacgcccaacaacggcggcataataggtcagccgtgcaggcggaaacaacagttggcgtcggacgaggcggccggtcggtgaagacgtagacgcccaacaacggcggcataataggtcagccgtgcaggcggaaacaccagtcggcggcggacgaggcggctggtcagtgaagacgtagacgcccaacaatggcggcataataggccagccgtgcaggcggaaacaccagtcggtggcggacgaggcggccggtcggtgaagtgcaggtggaaacaacagtcggcggtggacgaggcggccggtcggtgaagacgtagacgcccaacaacggtggca

SEQ ID NO: 28793 - DNA, 5770 bp, Oryza sativa
ggtcggttaaaaggtaaacgcccaacaacggcggcataataggtcagccgtgcagccggaaacaccagtcgccggcgaactagtcgcccggtcggtgaagacgtagacgcccaacaacggcggcataataggtcagccgtgcaggcggaaacaatagtcggcggcgaacgaggcggctggtcggtgaagacgtagacgcccaacaacggcggcataataggccagccgtgcaggcggaaacaccagtcggcggcggacgaggcggccgatcggtgaagatgtagacgccagctgtgcaggcggtgacaccagtcggtggcggcgaaagcaaaccggcggtgatgttctgactgatccattcctagagcgtaagagataagcttaaagccatgaatcccttttatgcatatctggatttggatcctgcagaacaaacatataggatgagtagtatctgatataaatataatactcgaggaaaattcaagcattttaaaatatttataaatatgtatttcttctcttgtcaattttgatttccccgagcagatgactcattacgtttaaacactctgcccgactagtcatagccaccaagcaccgggagtcggcctaagcacttcccaaacatgcatatgagtgacatgagttcgtcattaatggaacaaagtttcacgggccggagtttattactcgggtacttttgcaattattaagagcagaaaataaattatcttatctctatgcttttgatttattccgaataatacttagcaccttgcgttattcggtccatctaacaaacccccgggtgctaggaatcggcccaaaggcaactatccattggcaaaccaaacggaaagcataggaagatgaaactccatcactcgataggcacttttgtactcagattatatcgcaagcaatcaagataaatattataaaaaatgtttaaaaaatatgatataacatctgtagcccccgactcactagtcaacggcgaaccagttgatgtagtgaggcaaaggaaaaggcaaaatatcatataaagaataaaataaatgatgacttagctttgtcgtattccctcggtgacagcagaagtagtcgatctaggaacaaagtcgtccatcaatggcgatgaaaacaccagccgtggaagcaacctaggcggttggcggtgaagtcgtagacgcccaacaacggcggcataagaggccagccgtgtaggcggaggcaccagtcggcggcaacggaggcaggccgacggtgaagtcgtagacgcctaacaacaacggcataacaggccagccgtgtaggcggaggcaccagtcggcggcaatggaggcaggccggcggggaagacgtggacgcccatgaacggtagtgtgaccaaccaaccgtataggcgaagacaccagtcggcggcgacggaggcaagccggccgatgaatacgtagacgcgcaacaacgacggcgtaataggccagccgtgtaggcggagacaccagtccacggcaacgaaggcaccaatccgtggtagcgaatgccacgtatgtacgtgtatataaaaataacagatcaaaaagtaattagagatctataaattaaatgactagaaaaatcaatagattaatctggtttacataaagaaaataaaaacgatagacctgatgaaggtttatgacccagactcttgatgcacgtatgttgtcggcattacatgtatcgacctggttagtctactgatcaaagaatttggaggtccacgtgtccttttgcatgtccaggaagcctcagtgatgagatttaataaggatatgtgtcctgtgtagcttgtcgtgctcctgcttgcatgcatatatgaacgtgggccggagcaaacttgaacaaactcatgttgctctttaattgtgcctgtatgcatgcatatcgacattcagcaggaaccgggcagacagcttctgtcttgtcgatcgaaaaaagaactcgcggcggtggaaattggcatcaaactcgccgagccgagattgatcttctggttagattgatccactcggtgtcgacgaagtaactcaaaattcacgggctgcgcagcatgctaccgatctcgaattcgatgaaaattatcttcccgactgagttgaatcttgaagcgaagacaacgccgataactcctaatattagttccatcacacttgtagacgggtaattcgacgccacccctacctggcgcgccaactgtcaaaacaaattttcggcaatatgaaaagggggtagcgcacgagacctaaaagtggatggatgcggagaaaaaggatttagataggttcagaccctctcgatgagaggtaataccctactcctgtttggggatttgaatccgccggggtgttgtattgatctgacgatcaggttgtctcatgccccctagagggcctcctgcccctcttatataggatggggggcaagattacaagatagaaaccttaaccaatacggtatcggtttcctaaatctactttacaatcttatcaaaccagaactttaggccgttccataatatacagggaaacgtaatacccaagtcatgatccgttacatatttcataaatataagtcgtctcctatagctagtcggataaccatgccgtgtgggtatggggtacccataatctccacaccgattgagattgtgagaattataagagagatagcatttgcacatcccccgcccacaaatccctcggcgccaccgcgttggggcggcatccgatgtcgtgcccccgcccaccccgacgtcgtctgctcctgtggggatcgatggcgcttcctccggctttggttctaggtcgtccgggaaaaggaaggggagggcccaagcttctccgaccagtggccgggaaggatgttctttatgtttgttcggtctattattttagtgtttttgaatgtttgttcagcttgtttatgtgttcttgggtgtatatgattttttgataccgattaatatattaatgaattctggtcagggtgaaggggagctgctcgagcattggctcgattttttttattcttagaccacctcaaatgtgtcgttcactgggtgccgtttagaaaatttggcattcatggatgtttcccaacaggtatctatagttgttcctgtagcagtgggtacctgtgtgtagtaccgtgtaacatgcatagtgattgctactagagagaattaagagatggtacctgtctatactacatgtagcgtgggacactgttgttctcattttcacggacctatgcttgaaaccaaggtatcatgtcctaaacctatgtgtactatatatatcggcacaatgatcccgcggctctatgcgtttccaatgagattcgcctcggcgatgttaaatttcgagcaaaataaggtccgaggtgtttctgatgacaatagcacttcaggtcacacgttggctgagtactatacctcagttttcgcgagcactctttctaatcaaaagctgctaaacttaattaataatgggcagcatttattaaaataaatgtaaaatttattttccaaattaataatatataatacttaatttatcatgagtcaattagccgttgaaaagtgtgcctggttaataagctcatccatgaactgagtctaatgggaccttagggcatggttctttttcaaggaatagaaaaatagattaacgtgacatgttacgtggagagtgcatttcaaactcttgagggaaaatcctattgttgtttccatgtcacttaaatacttatgaacaaaattgaaaagatgtattaacatataatatataacttcataaatatgcaacttaaaatttaacgtctctatatatcgcaatgaaaaaacaagtatgacatgtacaagttgaatgttgcatgtttgtggagtgatatatcatatgttaatatatcttcttaaacatttttttaatttctttcataacaactatttgagtgacacgaaaaaaaaagagacatcctctcgaatacattcccatgtaatgtgatcttgtaagtggtgtgattttcgacaaaacttggtatatctgagttcttaatttaaaaactattttaaatttaattttcaactttatttgcattagtacctcaaacaatgatcacaaaatcattcgtgtcattcagcttttcaagaaaaaaaaaagaaaacaaacaaaaggaagacaccgaagacggctcgaccgtaaaggcgaagcgatatattcagctgcagcagtggagcaaagagaaagaggagtgacactagctgctagagaaaacgttttttttttgtctggatatgacaaacggcatgtaagtctgcgtctgtaaaaatcaacccacattttcacatccggcttgttaagaagagtgcatgcaaaaatctatttttaaggcggatctcttaacaaaccgtatataaaaaaaataagcctattttcacatgcggtcctaagtagccacatgcaaaactctattttcgcgtgcggacgaataagtggttcgcatgtaaaaatactcccttttttttctatccttctctctctttccctcctaaccacttcaaaaattttcacccatctctctccctctcctgatattctcccctctcttaattctctcctcctccgaatccgtgtgggcagcagcaggtggcgacaccaacaaggaagccaaccgttctgtgtggcagcgggcggacggcgagggtgcgacggaggatccggcggcgccaccctcgggtgcggctgtggcttcgcgtcgatgggcggtgatggtgggcggcggatccggcggcgccgctctcggcggggcggtggggaggggggcggatccgtcgcccttcgatgaggctgtgacctcagcgacggcgggcggcgagagtgacggatccagcggcggccgctccccctatgcgtcgtggcggatctggcgccagcgatagcaatggcgggagtagcggcggggtgctcggccggcgctagcgaaagagcgggtggcggagggggttagggtttggttttttttttgaaattttattttttttcgtgatttgaaattttatcagtgtgtatgtttcaaacagttaaaacgtaatgtttcatacacaatagtaatatgttttaatatgtatcttcagtgtatttcacaaaatttatggaactaccagccactattctccctcctctctctccactccatgcttgcatgcattttagcaatgttcaaaataatttgtttttttaaactacttttccaatctgtgttccggtcgtactgttgtattcattgtaattacacattaacaataaggtattgcatattttgatggaaaaatatatgtttcaatctgctaacacttgttgttttatttgtgatagtgacatgtatcaacccgtgtttctgtttcacaaaatatttaaatatttaaattatgttttttcatcatatataacttaatgttttactcatggcaaattttgctacaggactctgcttatgtgtggttttagcactaggacactgcccaaactcacttttaggggaaaacactccataaacgtggtaatttgccagtagacaccgcgccgattaaaataatactttccggttgaagaggagagataaatcgcgtgaaatatcaaaaatgcccttgggcccacatgtcagctctatatcctatctctcttctcatctctctctatattctctctcactctcatagacg

SEQ ID NO: 28794 - DNA, 6960 bp, Oryza sativa
ccccatgcgcctctagtagtgagagagaatagagacatgagaagagagataggagatagagctgacatgtgggcccaagggcatttttgacatttcacgcgatttctctctcctcttcaaccggaaagtattattttaatcggcgcggtgtccactggcaaattaccatgtttatagagtgttttcccccaaaagtgggtttgagcagtgtcctagggctaaaaccatacataagcaatgtcctgtagcaaaatttgcctttactcattggtcaactgaaacatttgaccgctcgacttttttttaagttaacgggcttccgatgtagttttctcttaatttaattttttcgttggacagcacggacactatgctagtatccctaaaatacggtaaagtgcacccattgtaattttgagtttcaaactacttaggacaatgactgctttgagcgtggtaaatgttttgcttgttgtttacccctttgagccataggatttgtttgccgtacttattgactctttttaaacacaagaaatttgtattaagttatttcaatttccatatggttactctaaaatttccttttcccaaaagagacctagaatgtgaatgagtgcaaaccgctaaattatttggcaatatggattacaaacaaatccgttgtactgaaggttagtgataccgtctaactaatactataatcctttttttttcaaattccatgagtgtacctcatgtggtaattgctcaagttatctagaccactttagagaaagttgtgtagtgaagcaagcaccatgagaacatttttgcattgtagaatttctattgctaataaaagagaacacaacaaatacgagtcattacaattactgatgtgtcaatcgagacatggaataactagtgttaatacaaagtcgcattgtctaaaataatatatatatatatatatatatatatatatattcatctaacattgctactaagtaattaaaagaatggaattatttacatagaaaaaaagaactcctaatcacatcggcagtatccgaaggcaaatgacagcacggttaaactgaagggcagaagtctcgaatcgccgtagatgatcgaatttgaataaagatcaataaatccggagcccacacagctggtggctgtgcatcaccactcggacctcgccgaggcgctccctcaacgcctcaaagcattgcagcgtcgagacggtgtcggccccggtgactatcccttaggccaccgccggcaccacgccgagccacgtggcaatctccctgagcgaaaacctgctcgccgtgttgacctccgccgccaaccgcttcacgtcatagacgccctccccgagggtcgcggtcgccatggccgtgaaggcgtcgaggccggacgggacctcggcccccgtcaggatcttcatcaggtacccgatatggtatgcgccggtgaacgtcgcccacgacggccgcgtctgcagcaggccggagccaaggagcagcgaccggagcctatgcagctcgatgcgtgcatgcggaagcctgccaaagtcgacgccacggccccggaggtgcgcgatggaggccgggtcccttaggttggctgggttgttgatgtcgaaaccacagaggttgaactcgaacacgacgagctcgccgccaccgtcgtcggtgcggatggcgaggccgacctggatggggtggagctcgttgacgttagccttgaccatgtcgtagcgctcctcggtagtgagttgggcgtacttcctccggccaccggtgcccgcttgagcgacagcgcatccgggctactagacgctcaccgtgacgtggacggcgcgtggcgcgatggtgaggagccgggtagattcggtatcgaagttgccgtgccataccgagtggacgacggcggcgacggcattcgtggttggcactgggcagctgcggcagcgttcatggcgagcgcacgtgcaggcgggaggctactcgacatcagtaaaaaggttagagagaaagctatgtaggctcggctaggcagcaggttttgcataatgtagctataagaggtcgacaaggcggtgatcaagtcggattcgaaaacattgtcaacctaggcaacagacaacgagcaaagttctggttccactcggtttccgtcagggtttccaaaaccaccaggaccggggttaccgtgccccggcggtaagcacggttaccgcacggtaaccgtggtaactgtgaaaaaccgtacaaagccgtgcaaaatttatcaaaaatttaaattattttttaaatttatttaaatttaaggaggttaccgcggtatttatattaccgtatccccgcggtaagcccggtaactgcggttaccggcggtaagggaaaccctggtttccgtctccgtgtgcacatgtgtaaaccgttacaaacttatattgtttcagttacaattatggctatgtttagatccaaactttggatccaaaatttgcagccaatcattgggaagtgacatttcaaacttctaaatcggaatggggtgtttagttgactgcccaaaattcaaatgagggttcatagaagacaattgtacccctatttaatgcagcaacttgcatgtaacagcatacacaaaaattcaaatcagggttgcattcacacacattcctactgcatgcacacttctcagcagcatgcatgaccttacatgcaatccatgcacacatgcaaatcatacaaattaaaacagtccatacatatagttgcccttcaaaattacattacaactgttggttatcacatactgctagctgacatactattgctcataaattactacaccaacaaatgacagccacaacattgccttcacacatacatgtcctcacatattacaaacaacacatataaatcctcacatattgcagcagcacaaattattcctcccaagttacaacaacaattccatgtggtgacatgcaccacatggaaatacaagtctaaagagaattacagcatacaacacttgtgccgcaacattcccatgtctcatggtcgatgcaacaactcgagcgcaattgtatcgtgaaaagcattcatacgttcacattctaatagctaggagcctcatcttctggtggctgatcttcataggcctccggaggaacataattctcatctcggtcgcaacgaccaaagtgtctatccgttaaaccgctaagccttatgtaattatggagagctatgcaagctactatgatatgtgtttgagtttctgggggatacgaaggcacatatttcaatatgcgccacttctgcttgagcactccaaatgatcgctccatgacatttctcagggaggaatgtgcataattgaatacctcctctttaccttctggttctacggcgttttggaactcttggagatggtactttgtgcccttgtacggcgccaggtacccaatccggtttggataccacgagtccactagatagaacttccctgcagtggtaaacacttgtaagttacacgtgattacagttagacattggaaacatacaacaggtagctgtgtacctggaggtggatgagggaaaacatttttgtatctagtcattgcatcgttgaataccctcatgtcatgcacagaacccggccacccagcaaacacaaatgtaaaaatcatgtcaaagtcacaaaaggaatgtttctgaggcagcacatacctaacacaaatagcaccactaattgctaaacagacatagcttgctaaacatacataacacaaaaggcaccctaaacagcgctacatgaacatgtaaagcatgcataagaaggtctagctgtcgacccttgcgtagttctcaatgagggtcttcgttcctccaggattcgacagctcaaacacattaatgtctactgggtccttcaccatcttcaacataccaacccacagctttggggtctcatcagtgaccccgcactctctactcaatcccatgatacgctcggccacctcccgcacgcgtgccatctcatcatccttcttcttctcacgcctgcccaagtagttgtccatggctgctactttgtccttctgcaactcgttgtggaccttcaattcggacaccatggcgcgcaccactgggctcttcaactttttgctcggactagtagctgtactgcgcgtgcttggtgtgctcctcatgctgtgcgtcctcttcgtcccaacgcttaaggggcttaggggtccaagtcatcttcctcggagtcatcttcatcatcgctgtcaatgtcctcaatggggttggccggctgtgctgagggctaggtaggaacaaaggaagtcgagccgtccactgccacccccatgaacatgcggtccagttcgtccagatacttgggcatcccattcttcggcttcttcaactcagcatggttctgcaaaaatcacacaaagcggtcaggtgaaggacaattattgtggacaaaacatcagaatgaacaatgtaagcattgtaccttcgtgttgtcatcccaccacttgtcagaagccacaacggtgccatcaggccagcggcccaacccagtatatgtcctcaacttctgtatgaaggaccacatagttttcaaacccctatatctaaaattgaactgctcattgtcatggagcaacccagtgacagcgtaaaacccctttctgatctccttccaaccgaatttggtcatgcttccccttatgcagttgccgttttcaatttgcttgcaatacagctcgcaaaaaagtttcgtattttcattggtccactatgccctgtcgttcacttcctagaggcacaattaaactgacaaagcaatgaccttaccactaaacagaagtaagcagcggcatcggaatgaactatgtgatgactatgtgctgttagagtactataatcaagcgcaagtaatgttagagctctaaactcaatatgaagtttacagaacaataatcaatcggaactaaacataacacttgtaaacttatggtactttgcgaatccacacattgcacaaccaaaatatttacttacctctatgagccgacgccgtgcaccacaacccctgcctcggcctcgcgcctacgatgcggccggagcctgaggacggatgggaggcacgaagacgccttcgtggcctgcacctccaaatgaaggtggcattggcggttctaacccagcaccaatcgaatgcaggccgccgactcctggtgccgccatcggaccgccccatatccgcttgctccttgaccactggggcacccacgaaacccgaccgtgcggttcgcgctccgagacggacgtgtaagcccagagggcattggctgccctcccatccgccgccgcgaaggtcttggtagccatgcatggcggaccactcgtatgcggagttgaggtcgagcgtcctgaactcgagctgagaggggttttggctgctcgaagaccccttgccgaatcccccaaaggtgaaggacgtgtggccgccttcacgagaggggtgcagaggctgcgcgaggaagtctcgggtcgggatgccggcgccgaatctatgctcggcccagtagaggggcctggtgccgccgccgccgtagacacctccggtgttgtcggtgccgtaaccgccgacggtgctgccgtcgccgtacccgccaccgttatggctgtcgccgtagccgccaccgttgttgctgtcaccgtcgtacgcgtccatagccggttcgggtggtttccgccggatacgccactacggatgtggtggatctggaagagaaccccttggattcacccgggggaggatcgggaagatggagggagagtgacggcggcagagatacaaccctagggtttgcgcatgggaggagccgagggggaatggataggagcggcggcgtggatgcctcccacaggggtattacgggccactcatgccctaggctactgttgggccttcaatgtgtcaattggccaaattccaggtgcccacccgtttagttccaaagtgcagactgtggcctcgtgccagattttttttggcactttggccctatctaaacacggcctcacttttgcctcagattatttcagttccaataaggccctgtttagttcacaccaaactttccctaaactctcaactttccatcacatcacattacacccaaaacttttctactcacataaactcctaactttttttccaaactaccaactttccctaaacttcttcccaatttcagaaaaacacagcctaaccccaaacttcttcccaattttagaaactaaacacagcctaaacacagcctaagatcacttcagatgagcaaagtacgagagaactacactgaggccgtttgaattttgggcagccaactaaacaccccattccaatttggaagtttgaaatgtcacttccttcattgactgcatttggatccaaagtttggatctaaacacagcctgaatccattttgcaattccgacaaacataccgaacaacacgaatatcatgaacaagggtttatcatgttttatcacggatatctacaggcagcttcagtagcagaaacgtagcattcagtcacgtttagatattttagatacaggcttcaagatagaatgaacatgaactggcatcactgaagcacacagcagcgaagccagcaaaccacccatcaagcagaacgaacattcagctgctaccgtcagtaggacgcgacgcagttgggtacacctgagaactcgcaaacccgacaaaagacgccacccttccgaatcgagtccccttgcgcaacttattctagttcttctttggcttcaccgggcccctgggtatcttgctcaaaaccttggcatccagcacctcatagtgcttgcaggcctcagagtgagcccttccagcaaagtggtcgac

SEQ ID NO: 28795 - DNA, 777 bp, Oryza sativa
caatgtgtcaattgccaaattccaggtgcccacccgtttagttccaaagtgcagactgtggcctcgtgccagattttttttggcactttggccctatctaaacacggcttcacttttgcctcagattatttcagttccaataaggccctgtttagttcacaccaaactttccctaaactctcaactttccatcacatcacattacacccaaaacttttctactcacataaactcctaactttttttccaaactaccaactttccctaaacttcttcccaatttcagaaaaacacagcctaaccccaaacttcttcccaattttagaaactaaacacagcctaaacacagcctaagatcacttcagatgagcaaagtacgagagaactacactgaggccgtttgaattttgggcagccaactaaacaccccattccaatttggaagtttgaaatgtcacttccttcattgactgcatttggatccaaagtttggatctaaacacagcctgaatccattttgcaattccgacaaacataccgaacaacacgaatatcatgaacaagggtttatcatgttttatcacggatatctacaggcagcttcagtagcagaaacgtagcattcagtcacgtttagatattttagatacaggcttcaagatagaatgaacatgaactggcatcactgaagcacacagcagcgaagccagcaaaccacccatcaagcagaacgcacattcagctgcgaccgtcagtagcacggtacgcagttgggta

SEQ ID NO: 28796 - DNA, 802 bp, Oryza sativa
gcattcataaatgttcgcctatgatgacgaagttgcccatcaacaaccagtagaatagggctatgttaaaaaggcttgaaagaatattgataaagatgccaatgtcggtgatccagtcaataccagtgtaccacccgatgataatgacgaagacgctcatcagcgtttgcaaagtaggtcacccgtgagggtgaaataacaagtcggcaatgacgaaagcacccgaagaagaagacgtagtcatccattaacaacagcagagatgtcagggccgatgaggtagaggtgctggtgatgaagtcaatgacaataatccatcaaactgttgagaagatatcgaagctcgaataattttcttgatacgagcgtgtgcataatgaagactgatgcaacgccccttgatttatgaagatggctgtagaacttagtgctatagctgttgcagatgcttcacttagaggaaagtatatgctgttggtcaactcattgaatctgatctgagttaattggttgatgactccaaactcccagacatgtaaattaaatctcaaacttgagaaatttggagtagattgtagcggcatgaagaagccaaaattgccggtgtaataattggagttgctgaaattaaatgtcggctctgaagcgaagacgaagataataactccccgagttgacttgttgattgattgattgcttcatcttgacataaagcttgtcgaattttgagagtcttgtatttgtgtagcccccgactcttggttagttgagaaacaactgaacatagagtcgagaactgtag

SEQ ID NO: 28797 - DNA, 1574 bp, Oryza sativa
  unsure (1)..(1574): unsure at all n locations
cgaggagaaagtatgcggcctccgctatttatatagtctccgtttgcttttctgattcttgcataatgtggattcgctcgctggctgatgaccgtggcgttcgccatgcatgcaggaagaagcaaacgagaaaggaggtggtgcgcgtggcggcgagcgggccggcgccggacttgtgggcgtgccgaaagtacggncaaaatcggatcaaggggtccccgtacccgcgcggctactaccggtgcagcagcaacaagaactgcgccgcccggaagcaggtggagcgctgccgcttcgacccctccttcctcctcctcacctacaccggcgcccactccggccacgacgtccccctccaccgcaactccctcgccggcaccacgcgccacaagccgccgccgccgccgccgctcccgtccgccgccgacaagtctccggccaccgcggctgaggcggcgacggcgagccagagccccggcctgtcgccgaccacgccgctgcgcgcctcgtccatggagctccacggcgaggacgacgccgaggccgagctgcaggtggaggaggacgacatggccatcgacgacgaagacgacgacgacgtcgccgacgagaccatcagcaccgtgccgtggggcacgcccatctccgacgcgatcatcgcggcgagctacgagtggagatgaccaccaccacctcggcgacctcgccgtacattgccatacatagcaagcaattcagccgtcttagagagagaaattaagggaaagagacagaaattaaagagagagttgaagggagcatccgatccatgcagctagtatctccaacacccagtagcactagtgtttaattacttaattaattactacaagcacctagtagcgtctatttacagaactacctccgttccaaaataagtgcagtcgtgaatatccgtacccaacgtttgaccgtccgtcttatttgaaaaatttgtgaaaaatttgaaaatatttaatcacacataaagtactattcatgttttatcatctgatagcaacaaaaatactaatcataaaaatttttcaaataagacgagcggtcaaacattgaacgtgaatagtgtaaaactacacctattttggacggagggagtagtacttaattaattagctagtgagtgctggcctggatgcatgacaatcatataatcagacaataataatgtgtaattaatcaaaatctccaacagaaataaaattatcttcatttcctcatatagtttcctcagtttgtcctcctttcttggacatgtttgcgtcttttcttacagattctttatttcgttttgtgcaacattttctttttttttccatacataggagtatagatatgtagtacatacatatgtacataaatagatcgaagtagtaacagtatcagcaggtacccagatgatggaacagctaataattaaaagagttgaggaaaagaggggaaaaaaggggtggggtttgttggtgtgggttgtggtggctctttttggctcattccctttcactgtgcccatatttgggtgtgatatgtggctttca

SEQ ID NO: 28798 - DNA, 5418 bp, Oryza sativa
gtagtacttaattaattagctagtgagtgctggcctggatgcatgacaatcatataatcagacaataataatgtgtaattaatcaaaatctccaacagaaataaaattatcttcatttcctcatatagtttcctcagtttgtcctcctttcttggacatgtttgcgtcttttcttacagattctttatttcgttttgtgcaacattttctttttttttccatacataggagtatagatatgtagtacatacatatgtacataaatagatcgaagtagtaacagtatcagcaggtacccagatgatggaacagctaataattaaaagagttgaggaaaagaggggaaaaaaggggtggggtttgttggtgtgggttgtggtggctcttcttgtctcatccctttcactgtgcccatatttgggtgtgatatgtggctttcagttcaggctagcactgctgttgtgcctcttttttgggcagatgaggaccatttgtagtatgcatttaagggtttgcaatttcggtaaccaccgaaatttttataatttcgtgaatttccgtgttttcttcacaaacttatttgaaatattaacatatttccactgagtttgaacacattttaatcaaattcatatatatttgaaaaatctgaaaattttgggggagatttgtgtttgaccgctgtttacacccaaatttgacacgtagtaggatataaatatgagaatattgccaatgtctgaagagcgtcgggtttccttcatggagccagtctgaccgccgtctatgggcaggtctaattggtggcatgtggtcggtcagatagacagagtctgacgccaagccaattttcgtcggtctcgagtttccatactcagaatatatgtttcaggtttttattggtttctaagttaagttggacatgaaagacgacctgtaggaggcatgaccaacccctatataagggccaagaccgatttaattagcaacacaatctacttctaacacaattagccaattgtatctttttttaatatgcagttaccttttcacttagtttagcctactttcatcaatctttatcgatttgcgctttaaatcgtccacttttgccgtgagagtacgattatccttttgtagatttgtcccatatataaatcttccgttcgccaatgagacgggtaattatcttcaaatcgatttaaatcagccttgagattgatttgatatctaaattggcttcactagctagtttagtcttacaaaacccatcttgatctagttttgctaggtcaaggtggctagcgactcaatccatatccccgcaaggtgtttaggtgtcccgatcatgattgttttcttgccaaaaaaaaaaaaaagttgccaacgctcgcatgttaaagatgatgcaatagcaatggaacggatggcattttagttctctcctttaatttgttcttgacttctgccactagctaccattgcatctattttgccaactgttcctgcttctatctgctggtgtttttttttgctggattcaatgtgttttaaatttgattgtgtggtgtgattaatgttggttaattaattactctttactgtacactttaaatttctatttgatgttaacatttacagtagttgaaagtgtacaatacactttcaaccactgcaattgttaacaataaagagtaattaattaactagcataaattacaccataaagtcaaattttaaatacattgaagtattttttttttcacatgtgaaaaaagacactgctatttattgagtacgactagcttgttgttactactatgtggtgcaaataatattaatccctttagtttttaggtaaattggaaccatgccattataattttgcaaagtttgagatatgccatcggtatttcaatgacacgtaggacccacatgagtcaatgacatgtgggtcaggatggcatatcttaaattttgcaaaattataatggcatagttccaattttcctttttttacgaaccacaaaaaatatctttttccacatatgatttttttaaacattaaccagtaggtgacacaactgaattttgtaagacgcgtgaaatgcaagtagtaacttgttgtttgttataagaacatgttccattattcggaaagttgattcatctaatttccttcacaagggaatactcttacgccctaaaagggcactaacagcagaataatgccgatttgatatatacttttttttaacaaactgtatcaaactctccgtctctcataataaggtacaaaaggagcttttttattttctaaagatcaacttacctgctcgaaaaaagtttgaaaagtcacttgaaagcttacatcacaattgaaagtggcgaacctatgtgcttctcttaatctcttatcgggttttgacagcggtgaacctatatccgaagaactcgtgtaaattatttgactaattaatttatattatgttaattagtataaatgattaaatatgtatagagtctagtaatttttattctaagttcgggattggccaatcgaaagagttaatcgatcaaagccggcaacctgatgaacaacagtgatgattcctgtacgggcggcggcagcggcagcagcagcagaaccagctcagctatgttcgttcatcgtgcaaatcgaccgtcagatcttaccctaaaattttacaccctatcacattaaacattagaacacttacataaagtactccctccgtttcgaaatgtttgacgccgttgactttttatcatatgtttgaccgttcgttttattcaaaaaatttaagtaattattaatttttttcctatatcatttgattaattgttaaatatatttttatgtaggcatataattttatatatctcacagaagtttttgaataagacgaacggtcaaacatgtgctaaaaagtcaacggtgtcaaacatttcaaaacagagggagtattaaatataagctaaaaaataactaattgcacagattgcaactactttgcgggacgaatcttttaaacctaattgctctatgatttgataatgtatgctatagcaaacatgtgctaataacagattaattaggcttaataaattcatctcatggtttactgaccgatactgtaattatttttttattagtgcccaaacattccatgcgacaccctatataatacccgatgtgatatgctaaaattttaccccccagaactaaacaccccctaattctaagatggagatcttttttttttgtcaatgcgttcgtgtgcatgcagttgtgcagtggtagcagttatcagtgctacccctaaatagtagcttgctaagagccagtggtagcagttatagcaggctatataagtcagctataacatcgagaagaaaagagaagagagaaaaaaacgggctacagatttgtagccagctgcaatacgaactctaagacgttatgtgtgtatgagaggtaggaccggatattaatgatatagtatatttttatagttaactattgtatgaattggctattagattagctataggtgaattggagccagtagttggctattctattaaacttgttctaaaaatataagaatatataatgtttcttagtacaatatatttggacatgtttagatttattgtactataaaatattccattcagttttagattattgtatttcgggtcagagggagtacgggtttaacttttgtagcctgatcgatgatacggtagaagcggacgaggcttctgtttgtgtagtttgtacatataccactatactgtaggctatagaaagtactccctccataagaaaaaaacaacgatggtagaatgtgacacagtagatttgttgtaataagattgtcacatcaaaatactaggttgacttttttttatagagggagtacggctcatatattagtgatttaagtgcaaaccgcggatccacttttatcataagcatgtattgtgggttttatatgttctagccctttttaattatttattattactatttccattatttttgaaaaatagtatgaatttgtcgatatttgatgtcgcgattccggtatttgcatagaatggggatcgttggtaccaggatacatgcgagacttaggtaaaagagatagaaacgatgatttttatacaggttcgggcccctgaattgtcaggtaataaccctactcctgttggccgaagccggtcgttgctcttattaaccataaccctactcctatctaactgttgtcgacttggcggtctgaagtgctgactcgtagtcgacaacagggtagccttactcctcgaatccgcatccggcaagatcaaagacagcgctatgtctctcctatcagtatccgtagacaccgtaggggactagccatgctaatctctgaagtcgatatccggcgtcttgtcttgacgtatgttagcttgtatattgatcttgtgtattgatctattgttccgtgtcccctctcctcctagggggccttgtatttatacccataggtgtccgcttgtccaagtagaactagggaaaccaatatggatacaatcacagtagtccttatcgtttccatgtagaactctggttgtctttccttatccggaacttctcctatatccgaaggttgtttccgtataagacatggtatatggtgggtcctgccgagatttagtcgactattattaggtatatggtatccataaccctgacagaattaccctactaaactatcgcggtcgaccgaattacccccgtagacttgaaaactagatattttacaccccaaactattgaaaccgaacaaataccactccctcactcaatccggagaaaaaatggtggggcctactatcagatctctaccctcccacctctctccaccaccatgtgttgtggccgacgatgatgccgcctgtctcccaccatccctctttacccaccacctggcgccgccgccacactcctcgtcctaatcgaccctccccaccgcacgcaagcgcaggcgtccccatagcaatagccgtcggtgatggcggcgccgcgtcgtccgtgtcacgggcagcgtcagcagcgatacaccacgtatccactaccagcttctccttgggtgatgacctcactggagaagccgccaccatggacaacaacgacaacgacaatggccgttccagcatcttctcgcgagacagccttccccaccaagccgagcaacgcaaatgtatcctcttctcttcgatcctaccacggcgcgcttgctgtcacattccccaactccaaatacacctccatcaccatccgggcactgctagggtgcacctcctcttcggccttcgccggcacatgcacgaggagagtcatag

SEQ ID NO: 28799 - DNA, 7803 bp, Oryza sativa
atgatcagtgcgatgataaagaaggcataatgttcacctttgagtccttacatggacattatatatctagtgtccttctctgaatcattataactactgctgcaatgcaaggatagaaagcactgattttattgtacaaaggcaagatatggcatggcagatgttgcgataagctagcactcacagtggcagggaaatgttgtggtgaacatgatgaataatgcagcagcactgtgtgcaacaactggacaaaggagcaacagtcaagcatacctttgccaaaataaatgtacagggttctgattgcagcctgaagttcaggagaattaggccaccttgacgataggtcaatgcaaaatggtcaagcatccgaatcctgttgctggaagaaaacattttctgggacagtaaagcacaacgaacacattcatggactgaagctcatctagttgaccccccactgggccattctggtcttggccactggccagtgctaaattacattgatcccacatcacatttggagctttgcaagaaaaaagaatatcagtttcgtttgggttgaacattcaaacttctcatgttaaatgtcataatattgcaacacagctcaaccatttcttccttacgttctaagtgaacagcacagctcaatactgttgacacatcttctctcgacatcagaccatcaaatctgaagtgttttggttaaattaatagataagtttgttttaaaccgttaaaaataaagaccttcaaatgataggaactcgacatatgcatccctttatccagtgggtattaaactgaacttttagtagtagtatgatatacaaacataaaagcaactcaaaagttcctttacattcgagacataactgaacctaataagagattgtaagtgggatggactatcaattatgctgagataatagactagcaaagtaattataaaagagcatctataatgggcataaaaaactatgtgatgtctgaaatccttggaatgttatgttgttgacccaaagaaagttttgctctgaaaattactgacgtatttttggaaaaatctgattagttttcctagtgactgaccattttctagctctagatcaacctagcaatttagcatctgtgtttattcctttcatattagtggttcccaggatgacaaataagcaaatcacaataagtaaactgcaggtggaatcaaaactgaaatgaccgttctcaaatgtgttttcagaaaccgaaaccattttctcaaaactgaaaagaactctatgctcagaaagtacgtttcagaaacgttacttttgaaaggtgaattgattagtggcagactaagtaataaacttaccacaacaaaaaattgaactgcaagttgtcatgaagcaaggtctttacaggaaaccatttcacaatgatgaccctgatccatgaatctagaaagctaacaagcatttcactggacctgtaatttgcacaagcaactgagtgagccaaaatctgctgtatgctggatgcttcttctacattccagagccttgttaaatcctatcactagtacaaaaacatatgcagttttagtgcaaatcaatatgaatgtctgagcaggtatatgaaattacagaatgtactgctatttacttctggccgataattactatgagacgtgccattcatgaagaaagaaaatatgaacatatccataaactaagaaaaactttggcatgacagtgaagcatattgcaatactctgacagagaaattaagtcacactatcgaaagctttctgcaatgctgaggaaactgcacttaatcatatggaaacaggaaacagctctcgacggaatcttcagctccacgccaactatgcctcaaagataattttaaacttgtagcatatcttcgtggtttggctttattaactaacttaacttcaagtaattccttcccccctactcggagttcctcccactactaggaaaaccatctttcatggcagccatattgggttttcactggcggaatttggagccgccacaaagcaaaagccagagaaaatagaagttttcacaggcgggaattgaaccaccagcgaaaacggatttttgctggcggctatattacacggaccgcttgtgaaaatggattttcgctggcgactgtgttaggcgggccgctggcaataatccatttttgcaggtgtacgtgttaggatgactgccagcgaagctcatctttggtttaaaaaaaaattgaaaatacccgaatgcatcttctctctaaccgccagatgcaaagagcaaatgagcaaatgcattcccattccgcattgcaaccatttcacattgcaaatcaaatccaagacccattcccattccacatgtcgcagtacaaatccacatatctcaacaaattccacaaaacccatttccattccacctatcacagtacaaatccacataaaaaaaccttaacaaattccaaaaaaaatacaaaataagcaaatctcaatgagcacatcgacgagcttccccgcgccgctgccactccgtctgtcactgccatggacgagctccccttaccagaagcagccgctgccgcggccgccgttgcccgtcgccaccgccctccccctcccttcttcggttggatctgggaggggaggggaggggagccgccaccatcctccgccctccctcctttggctggatctcggaggaaaggggaggggagccgccgccacacccaaagcagcagcagccgttgccaccgccctcccccctccctccttcggctagatctgggaggggagccgccgccgcgcccgaagcagccaccgctgtcgccaccgccctcccccctccctccttcggctggatctgggaggggaggggaagggagccgccgccgtgcccggagcagccgccaccgccgtagtcgtcgttcgccagcgccgccaccatcctccggccacagcttcggggccggatccgaggagaggagaggagtggagaggagagaagactggacaaagttggtggtggatgggtgggtggggatgcggtttttaataccgtgcaatgcattttccagtcggtgctcaacagccaccagcgtagattaaattttcgctggctgccggtaaagtggaccacctagaaaaatctaatttttgcacgcggttgtttaggtgagccgctagcgaaaatagctatatttttgctagcggccctcttaacccggtcgctagcgaagatctatttttgctagcggtccgtagcccctcaatccctttaatattttcgctgacggtttccacgtataaccgccagacaaaaaaaaaaaaggtggtgtcactaaaaatcgattttgtagcagtgtctatatttccctgcctgaactaatgtgagtatgtgacctttataatgaatgcatatggagaaccatgagcattctcaaacaagtaatgtatgtaataaagaagaaatatgctgacagtgcacttttgacaattgcaaattgtagaacatagtgatctttaattgacatccattaacagcggcaatgtggcatgagcaaatctgcatttattccttgagactgttgagtattcacatcttattttcacaaaccatttctgctcataccatattcagaatgaccaaatcttattttcgcaaaacatttctgctcataccatattcagaacgaccaactaaacccgataatgcagtaagaaaattcatctgacatagagcccggccggcctgcaaatgtacctggtactgagcaaaaagttacaaaatgaacgaactcggtaacatctagttataccttataaccacacaatgttttctgaatcaaaaacattattcaagattaggcgagcgaagtattaacctctaatcgatgggaagagcagccgctgcttctcgtacggcggccgcggcgggacggcgatctgtcacaatccgcgtcggagtgggtgaccaatccgacttgttcaatccgcttacgagaggacgtaattattttgaaaaaaaaaacgaaataggttctccaattaatttacccttgcctatgttaccccgataagggatacagataagataccgatacggatacagatatatagcgttttctaaaaaacatggatactaggatgcatttgtgaaattattatcatgattaatatttgtgatgaataattggctttacaaattatttatttaatgaattgatttgaaaagatgtgtggatgttggtgtgagtgcgtgtgactaatgtgggttaggtaggttgtgatatatgtgtccagaaacggttgttttgtctgattgtgtgcatgtgacttgagatcagccttggtcaatggtgaggatcgggactatgctcagggaggagcagaggctagtgcggtcggaataacatatgagaaggtgactagagttaggactctcgcaggttaactgttgagattataggcatataatgatttaatctattccataaataaatcatgacattacagatgaaaactagcatgaacgcatcattagatctacacatataactacacagtataacatgaacatatcaaatatgcgcaacatattgaacacgtaccaaggtggcggaaagactcggtcgaaacttttcgcaggcatctacgaaggcacgcagcacgcgagcgaagaggaagacgagccgtcgcggaagaacagggagcagtcacgcaaagcgctccccaaaaaccttattgccgccttctcccagtgcagaatgtcgaaggtagaggttccggagacctgctctcccgatcgcaggtgcacgccggcgagcgggatggagtaatctacgagcgacggcacagcacagagtcggaggcaaaccctagattgatttcgcgtgtgttgcgtgaaggtggcggctcggtttatataaagaagggtcgcttgatcagggcacccgcacgatctccactgcacgtaaccgaaccggataagtcgcgcgtaacttatccggactccacgccgatctgaatttgcagcaaaacaaaactgcaaaaggaggctgcatctgcgcaaggtgaggaaccaattttgacggaccattcgacgcgtagccaggcgaggcgaggcgagcgagcgcgcgcgtgtgttccccctcttctctccaccacacatgcttcaagtggctaggagggcatcctcccttttaaggaggtccccctctcctaaaataagcaaggtggtactaaactccacatgcatgccatcccatgaggtgggcttttttgatttttcaaagaattaatcttcgagtgggctaaggcccattcattaattctgacaatcccccaccaaatctcaaaatcccactgagatttgccttttccaatgtactgtttatatactagcggttcgatggagaccgattaaagttgaacatccacctagaactccaagctacatttactcacaacttgaacaatggactatgccttgaattgcaagtcttgtgcaagcaagtttcactcagaatcttatcttgtactagaccgtctgtagactacccctcgggtggagcgtataagtcatactcctaggtctttagtaagcttcctagaagattcacccaaaatctccatagactgcgaccaacagtcaagctcacaaaggtgagttctttcaagaatgctctacaggacagcatcttcgctaattaaagccaacagaactcattaaggcatagccaacctgccttgcagttcacgagagtacatgcatcttcacttagagagggtatagattggtactctcctctaatttacttatggtttgttcttcccatattctaattcacgggatctccgatcacatagactgggttaccaccatagtataactcacatgggtctcaaatccatctccttcgatgcattgtctatcacatttcatgatagtcccttcgtgaagggatctgccaggtttctagctgtttggatgtaatccaacgttataactccggagtttcttaatttcctgacagacttcaatcatcttttcacatgtctagacgatttcatattatccttagaactattcactttgacaattaccgtttgattgtcacagttcataaggatagccgcctccggtttttcaacaatagtcagatccatttgatagatcacgcagccattctgcctcaacagtagcggtatccagtgccatcagctctgcttgcatggttgacctcgtcaaaatggtctgtttgcaagacctccatgaaacagcaccaccacccagtgtgaagacatatccactagtggctttgatctcatccacatcagagatccagttagaatcactataaccctccagtaccgcaggatacccagtatagtgaagccccaattccacagtacctttcagatagcgcattactcgctcaagcgcacgccaatgatcatctcccggattagaggtaaatcggctcaacttgctcacaacaaaggagatatcaggcctagttgcactagccaggtacatcaacgagccaatgatttggaagtattccagttgattcctagcaattctcttgttcttgcgaagtaacaagctaggatcataaggtgttggagaaggcttactatcaatgtagccaaagcgattcaagatcttctccacataatgggactgcaagagtgtaatcccattctcacctctaattagcttaatgtttaagataacatcagctactcccaaatccttcatatcaaaattttgagacaaaaatgatttaacctcatttatcacctcaaggtttgtcccaaatatcagtatgtcatcaacatacaagcataaaataactccctcacccccaccatggcgatagtatacacatttatctgcctcattgactgcgaagcctgcagatgtcaatgtcttgtcaaatttctcatgtcattgcttaggagcttgtttcagaccatacaaagacttcaacaatttgcacaccttgtcttcttgaccttcaactacaaacccatcaggctgatccatatagatctcctcatccagctctccattaagaaaagctgtcttaacgtccatttgatgaacgagaagaccatgtgaggctgctagggaaagtagcacacgaattgtggtcaatctagcaacaggtgagtaagtgcgaaagaaatcttcgccttctttctgagtgtagcccttagcaacaagccgagccttgtacttttcaatagtaccgtcaggcctaagcttcttcttcaacacccacttgcatctcacaggtttatacccatagggtcgctctgtcacctcccaagtcccgttagcgataatggaatccatttcactacggacagcctccttccagtagtctgcatcaggagatgcatatgcttctgaaattgatttaggagtgtcatccacgaggtacacagtgaaatcatcaccaaaggacttagccgtcctttgtctcttactccttcgaggagcttcactgtcatcctcctcagtgacatgttcatgtgtatgttcagtttgttctggtggtgtgattgaactgagaattatttcagatggttggctcgaactactatgtgtatccttcattgggaaaaagctctcaaagaaggtagcatcacgagactccataattgtaccaacatgtatgttaggtacctcagatttgactattaaaaatctataggcaatgctgtgatgagcatatcccagaaagggtaccgagctcgaattcgcccta

SEQ ID NO: 28800 - DNA, 2702 bp, Oryza sativa
agcacccccatgtgcgcaaataagaaagtgatggttttctcccaatcaatatctcatatggtgttttgtccttatttctattaggaactctgtttaacacatgattcgaggtcaacaatgcctccccccaccatgctttaggtagtcccgcagtgtccaacatggcattcaccaagtcagtcagtgtgcggttcttcctttcagcaatcccattagactcgggagaatagggaggcatcctctcatgtatgatgtcatgttcctcacagaataagtcaaactcgtttgagaaaaactctccaccacgatcagacctaagtctttttatttttctgtcaagttgattttcaacttctgccttataaattttaaaatagtctagagcctcgtctttcgttttcaacaagtacacatagcaaaatctagtagcatcatcaatcaaagtcatgaaatatcgttttccatcctttgtcaacaccccattcatttcacaaagatctgaatgtaggagttctagtggtgccaagtttctttcctcggcagccttgtgaggcttgcgaggttgcttcgattgcatacaactatggcacttagaacctttgacaatggaaaacttaggaattaaacacatgctggaaagccgagacatcaagccaaaactaatatgacataaacgtgagtgccaaacattagcctcatcatccacactgccacaaatatggttcacagacttgttgcagaaatcagaaaggtaaaagcggaacaggcctccgcacttataatctttaccaataaaatatccatgtttagacacgactactttattagactcaaaaaccaacttaaatccatctctagtcagacgggagccactaacaagattcctgtcgatagaagggacatgctgcacgttcttcagctgcacgatctttcctgaagtaaacttcagatctaccgtgccaacaccatgaacagaagcatgtgacccattccccattaggacggtggaaccccgtgcgtcctgataagaagaaaacaatgagatgtcagcacaaacatgtacattggccccagtatcaacccaccaattagtagactgattaactgaaaaaacagtaggtaaattaccatacccgcttccatctccagtgttgccaatggtcacattagcagacttagaagtatgccctgcaggtgccttcatccccttgcgctgtggacacttcctagccagatgaccaagttggccacacacaaagcaagtcctctcatcctgattaggattgttgttcttcttcttttgcttcttgaagttggtggtctgttgagctttgtacttccctttgctcttgttctgggccttgcgcacaacattggcactggactgtccaccatcgcccttagatgcgacatctttttcccgagctttctcctcaacatcaagagacgctatcaacccctcaacggagtattcctgtctcgtgtgtttgagtgcagtaccgaaacttctccaagatggaggtagtttcgcaataatgcacccggcaacaaatttgtcgggtaagacacacttaaggagttcgagttccttagccatggtttgtatctcatgagcctgttcgactacagaacggttgtcagccatcttgtattcatgaaactgctccatgatatacagatcattgctagcatcagtagcatcgaatttagtattcagtgcatcccacaactccttagcgtcggtcatatgcatatacacctcgaccagacgatcgctaagaacgctaagaatgcatcccacaaagagagtagtggcttcctcaaattgcttctgctgttcagcagtaagaactccttcaggtttgccagtactcacccagaagcatttcatagctgtcagccacagagtgaccctgatctgccatctcttaaaatgcacaccggtgaatttatccggcctcagtgcatcggcaaaaccagccatagtaaaatcacaatgcctacaataagggatttggattgttgagattatagacatataatgatttaatctattccataaataaatcatgacattacagatgaaaactagcatgaacgcatcattagatctacatatataaactacacagtataacatgaacatatcaaatatgcgcaacatattgaacacgtaccgaggtggcggaaagaccggctgctcgatcgaaacttttcgcaggcatctacgaaggcacgcagcacgcgagcgaagaggaagacgagccgtcgcggacgaacagggagcagtcgcgcaaagcgcttcccaaaaaccttattgccgccttctcccggtgcagaacgtcgaaggcagaggttccggagacctgctctcccgatcgcaggtgcacgccggcgagcgggatggagtaatctacgagcgatggcgcagcacagagtcggaggcaaaccctagattgatttcgcgtgtgttgcgtgaaggtggcggctcggtttatataaagaagggtcgcttgatcagggcgcccgcacgatctccactgcacgtaaccgaaccggataagtcgcgcgtaacttatccggactccacgccgtttgcacgcaccggatttttcggaacgtttccaaaacaaaaacgaatccgaatttgcagcaaaacaaacaaaaacgaatccaaatttgcagcaaaacaaaattgcaaa

SEQ ID NO: 28801 - DNA, 2866 bp, Oryza sativa
tatttatagatgcaatttaaaaggtatgccacttaggaaccgacacttaggcacatgcacctaggcttgatgggtaagtctggccaatttacatatggggaacataaattaatttaatcagttattccaatttattcttctttgtttctatgcattgcaatgccaatttgagtgcctatcttgtcatgctattcagcataatgtcttggcaggctctgcatatgttcatgcttatatatgcagcattcatataagtaaggattaattggatcgcttgctttgtctaatgcagcctcaccatttaatttgtggcgagcaccttaattccatcttgccattaccgagggagtatatcatatgcacctaattctgtatatagagtatttattgactagggtcttggaaatttttgaattgctgtcagatgtaagttcctcaggttgatgatttgattactttcacagctaataccattgatcacagctaaacaccacttatagaagtttaatggatttttatctaaaaagggaaaaaaggaaattaataactgaaactgcatagtagtactatgatctctgaacaaagaaatttgctgagtttcctagcagctgctgggtgcattttcctcttgttatgtgtgcctaaccttgcatccattaaatttcaaaagtgcaaatagagaattattgcatgcattcctttgatatcaaagattgggatgaaatttccagcttaatcctgacagccacaatgtgtcttgagcaaaaggaagcaaagctgcaactgaaacacggtgaatagtaaataaaaatctcgcttttaggaaaaaaaaaggtgagtcgtgcacaagtgctgtaatctggttttggcaaatttttatcgagatatacaactccgttgctttgtttacacaataaacctgaactctaggtgtagcagcttgaagcgttaaaaaagaagatggcagcaaacatatgtttgctttattggatttaatacttggatattccactgtgcttcccaaattgagctgaataaatagcttgacgaattgttctcttaacatgtctcagttgtcctttgtatcaaatgagcagcataagccattcatggattgttcttttccactgtgatacagatagttacttctaatgtttcatggaaaagtttgagcgacaaaaatttcttaagcaagcttacggattgtttctgatgagtttagcaactctatggaaacaagcataagtgcttctcatctaaccagttccaagagagaagtagccaagtaggtagaacaatcccaaaactgcaaacttattttactgtatatatatatatatatatattttcctttttagcattttctgtaaagtcccagttctgtattgcagttggcatggttgtgttcatcagaatattgaatgtcaaatcgaaaggaggcgccaacctatagctatcaacgacatggacaccatggttcagattcataaatttggggatcatggatgtctaggttcagaaatttttggattttagacaacaaattttgtagaattaccaatttagaaaaacacattttgcattttgttataatgtaataaaataccaatttatgtttatttgatgaattatcaaagcaacgcttacagtacttttatttttatcagtgcatatgagctacaatgtatcaatatatatcgctgtgcatcaacaatggatgtgttgttctccaatatacttcgcttagtatatatatcgacgtgccttgcacgtgcacgctcactagtgctaagtaaaagtgctgatgagtctttctattgggagtactgaggctaattagttatcaccaaccatacatccataattattgaggatagaaaaaaatgcacattgatcgattaactttatgtagctactgtcccaaccgagaaagagtaattcacggacaattgattgaatcggcaagttttgtcaatgagaacaacaataactaatttgaaattgagctaaacaatactgaaacttaatccgatggaattctatgaacttttgaggtctgactcaaactaaaaatatgggcgggcgaggagcatacatatacctcaacaaacatacaaatactgaaaagagcgaacctatttagttacacccaatcggtgcatacatatactcgaacaaacatacagtgtaaactgaaaagaaatgaacagatgttgttaaagttgtttgctgcaaaaagataattgagtaaataaaaaggaaaatacaattttattttgatcaagaaaaaagagaagcatatataccagggttactgtgggggggatctgctttgcatcttgtgctatgcaggttaaagctccagcagcatattggtgagagggagattaatcgaaaggaagtaaaattaagaggtaatatatagcaatgctcaccggatcagatcgatgccttgcacactactaccgaagtggtctttccatgcaggcgaaaacgatttacggtccgttcgcatgcacgaaatcgtctataaagatcacgatctttgtatacggccagggcaaccgcatgcgaacatcagatctttgcatgtgggcgcctaagccgaccgcatgcaaagagaaaaaatcacgaaaaaaaataaaattcaaaaaaaaggaaaccctagccggccggccgctcccaccgccgcccaccccccgccgccggccaccccagtcgccgaccacgtcgtcacccgcatctaggggcggatctagaaaaaaatagtagtagggctgaataaactatatcagcataaattgaaccttcagtccccacatcctatgatctatggaaaaaaaattagtgggggcttaagaggatc

SEQ ID NO: 28802 - DNA, 3008 bp, Oryza sativa
aggggaaagggtaaaaaaatagaggggagagagggaggagatgtgttagaaaaaaattgaagtggtgggagggaaaagagagtggagggagatgaaaaagttggggtagtatttttgcatgcagaccacttaagtagccgcatgcaaaaatagtcattaaaaattaatttaaaaatatgagaattttgaatcaaattttatgatattaaatgaactcatatgaaaaggttgtcaaaaacaaagttgtagactcgttgagatctaccaattttcttttggtcatttctccatccgagtttgattgaactatataaaatttaaattttataatgtaagaaattcaaataatttttcggatagtaaatgatttcaaatggaaaagttgtgaacaataaagttatataacttatcaaaatctacaacttttctattggtcatttttctatatgactttgtttgaacagtttgaatttgaatttcaaatgatgacaacttcaaataacattttcaaatactaaatgatttcaactgaacaagttatcaataacaaagtggtataactcatcaagatctataacttttattttggtcatttcttcatctgacaaaatgatttgtaagatttttcacaaaatgaacatatctcttatatagtttcataaactataagagagatatgtattttttgtgaaaatgttactatcactttatcggatgaagaaatgaccgaaataaaagttatagatcttgatgagttatacaactttgttgttgatgactttttcagctgaaatcatttactgcttcaaaatattaaaaagttttgaaattcaaaattttaattgataaacacaaagtcacaacaaaaagttcccaaaataatagtagtaagaacacaataacatgatagagcatgattttagaaacatttaggaaaaagaatcatccaatttggagttcatatgagtaaagatacactagttttaaatttttaaaatttttcaaattttattttcgcatacggctacttaagacacccgtatggaaaaatcgatttttctatgcgggcgcttaagtgagccgcatgcaaaagtgaccttatttttgcatgcggatctcttaagaggcccgtatggaaaaatcgattttttcatacgggcgtcttaagaagccgaatgcgaaaatggcgttcgatttgtacagacgccactaattatggtccgcatgttaaaatgatggggcctcgtacagaaaaatcaacttttcagtagtggcagttatcgaagtcgagaggtcagttgacagtttcgattggggaggcaggataggctgacaaatcaggcttcgctaccaattactactggttgataccccgcgcgttgctgctgacttttgtaaaatgcaataataactaaatttgaccatgaagttagaaagcgatatgctttagtgtgattaagcacggagtatgctttagtgtcaaaaagatgttatcaagattaataattactagcaaaagtgcctgtacgtcgctacgggaagtgtaaagactagaaaattgaggaaaagttgaaaaaaaattacattatgtaattaattgaaatacaaatttccttaaaaacttggaattttctaagttggtaggtgtataattaaatcaattaacaagtaaaataagtgtgaaaacaattatatggttggatttacttttaaaaaaattattcataattaattacaaacataattaattcttcatattttaaattttcagagcttaattgctaattttgataatacaaacataatttcagcatttattctttagcctgcgaattgaaatttcctgttcgtactcttcatggtaaccgaaggtgaagtgttatttgatgcgaactctagatgatttgttgtgtgttggacttgggatgtgtcagggttacggataaggcataccctctatcctacgacttatggaatataccgataaggtataccttcacatatacggatggtttccgtatacgccgttaggaatttgcctcaagttaaggaatatcccccacgaagttaaggaattgccgaagttctactcggaaaaggtaaaatctctaatatatcgtgtcggtttacatatctccaagtcttgcttgagagtcgaggtattccacagtataaaagggacccctagggagaggcaaagggcattgcatctcatcgccaacacacccaccaaagtttacgaagccggagtccacgaagccaactcgccgggagatctcgtcgaaaccctcgacaaagatctcatcagtatcccctatttcggttactctctttgtaatctattctcatcaacatcaatcccatataaactggactagggctattacctgataaggggcctgaaccagtataatccttgtcttttgtttgttttgatgtcgtactacgtagatccctgttccaacgtaccccaataccctattcttctggtccgcgagtatcactcgtcgacaggatgttgcggacaaaaataggtgaggacggacgaaaatttcaccggaagattaggtataggtatttaggtatatagaaagttagattagagatagagaacgtataaacgatgaatacgatagaaatcggacttttttgctgcactttttttccctttttacatacaatcggacttttttcgctcttttttttattttaggcggacaacggaaacgttttcaattatttaggtagtagagattagccattttcattttcaattatttagtttattaatatataattaattaagtattagcaaaacttaatttaaaaaatagattatatgttttttaaagcaactttcatatagataatttttgtgaaaaatgcgtcatttagtagtcttagaaggaaagaactcagccctaagggatcaaaattgaacttattctgtgcggagtgtacatgcggcccataatgcagccaattgtgtggtgagccacagccatctg

SEQ ID NO: 28803 - DNA, 823 bp, Oryza sativa
ttttggaaacaatttaacgagtatttaacaatcctatcctcctcaacctgcaaattgcattgatcgagtcgagccttccagggcagagcacgcaaagaaggaagaagccgcaccgcccacgcccccgccgtctcctccgccgctgcctctgcctcctccgccgtcaacgcaagagccagccatgggtcggccgcgaggggggactagcaaggggaagcagaagatcgagatgtgctgcatcgacggcaaggagaaacggcaggtcaccttctccaagcgccgccggggcctcttcaagaaggcgtccgagatatccacgctctccggcgcgtccatcgccatcgtctccttctccaaggccggcaacgtcttcgccttcggctcgccgagcgtcgacgccgtcctccgccgccacgtcgtggccgggccttccacctccacctcccacgcccacgccggcggcgacgtcttcgcggacgacggcggcgacaaccccgaggtgctgaacgcgctgaagcgggcgacggacgaggccgcggcggaggtggcggcggaggacgcgcggcagagcggcgtcgagggaaagatcacggaggccatggcggcggggaggcggcggttctggtgggacgccgccaacgtcgaggcgctcggggaggcggagctgccggtgttcgaaagggcgctccataagctcaggggcgccgtcgtgcgccgccgccgccgcctcgccgcagcaagaagaagctcctgaattagacattacaccgtgaatgcttgttaattaggtgccactgattaatcaattgcaaacgggtttagg

SEQ ID NO: 28804 - DNA, 992 bp, Oryza sativa
ttcgaaaaaaatgtgcgccgccaacgcacgcatgagctagcttttccgattataactagcgctgaggctcaacaccaacaaggttagtgttgaaacatttgaccccgacgccaaggactttggcattgagcttttcccccaatttgttcaataaatccctttaggggtctatatttggaatatctttcattttcaaatataaatacttctaattaaggatctagacatttacgttcaaatttataaaaataataagaaaaaaagtgtgacttaccccataaactattacggccgatcgattaccccctaaacttaaataccagacattacatatcctcaattattcaaacgagacaaataactcacctgcatcaatccgacgtggttttcatcctacgaggcagtctagtcagtattttttttcaaaaaagaatcatgggacccgtttgtcatattctctttactctctctttcccctcttccctccctctatctctcttagtccctggttgcgccggcggctacgagtctcctcgcgctcgtaccggcgaaggctaaggagggaccaagcactgtgcgccgatggaggccgaggagtcgtgtgccactgctggcagagactgagggaccaagcgttgcgcgttgacgaaggccaaggagttgcatgccgccgccagtgaagacggaggctgaggaggagttgcggccgccacgcgtgcgtttggtggaggccgaggatcaggagccacgcgtcgtgtgccggcgtagcccgaggaggagctgcagcgactatgactctcctcgtgcatgtgccggcgaaggccgaggaggaggtgcaccctagcagtgcccggatggtgatggaggtgtatttggagttggggaatgtgacagcaagcgcgccgtggtaggatcgaagaggagaggatacatttgcgttgctcggcttggtggggaaggctgtctcgcgaggagatgctgggacggccatt

SEQ ID NO: 28805 - DNA, 621 bp, Oryza sativa
acaccagtcggcggcggatgaggcggccggtcggtgaagacgtagacgcccaacatcggcggcataataggtcagccgtgcaggcggaaacaacagttggcgtcggacgaggcggccggtcggtgaaaacgtagacgcccaacaacggcggcataataggtcagccgtgcaggcggaaacaccagtcggcggcggacgaggcggctggtcagtgaagacgtagacgcccaacaatggcggcataataggccagccgtgcaggcggaaacaccagtcggtggcggacgaggcggccggtcggtgaagtgcaggtggaaacaacagtcggcggtggacgaggcggccggtcggtgaagacgtagacgcccaacaacggtggcataataggtcagccgtgcaggcggaaacaacagtcggcggtggacgaggcggccggtcggtgaagacgtagacgcccaacaacggcggcataataggtcagccgtgcaggcggaaacaacagtcggcggcggacaaggcggccggtcggtgaagacgtagacgcccaacaacggcggcataataggtcagccgtgcaggcggaaacaccagtccgcggcggacgaggcggccggtcggtga

SEQ ID NO: 28806 - DNA, 707 bp, Oryza sativa
ggctgctagggaaagtagcacacgaattgtggtcaatctagcaacaggtgagtaagtgcgaaagaaatcttcgccttctttctgagtgtagcccttagcaacaagccgagccttgtacttttcaatagtaccgtcaggcctaagcttcttcttcaacacccacttgcatctcacaggtttatacccatagggtcgctctgtcacctcccaagtcccgttagcgataatggaatccatttcactacggacagcctccttccagtagtctgcatcaggagatgcatatgcttctgaaattgatttaggagtgtcatccacgaggtacacagtgaaatcatcaccaaaggacttagccgtcctttgtctcttactccttcgaggagcttcactgtcatcctcctcagtgacatgttcatgtgtatgttcagtttgttctggtggtgtgattgaactgagaattatttcagatggttggctcgaactactatgtgtatccttcattgggaaaaagctctcaaagaaggtagcatcacgagactccataattgtaccaacatgtatgttaggtacctcagatttgactattaaaaatctataggccatgctgtgatgagcatatcccagaaagacacagtccacagtcttaggtcccagtttgcgcttcttcgttattggtacattgactttcgccaagcacccccatgtgc

SEQ ID NO: 28807 - DNA, 652 bp, Oryza sativa
acagaaaatttatgcatcagcttatacagcagcatctgcatcgtgctcagcaacagatgaaggcttatgctgataaaaatagaagcttccgggagtttcagccgggtgactgggtttacttgaagattcagccttatgttcaaacatcagtggctagaagagccaaccataagctatctttcaagtattttggtccttttgagattcagcataaagtgggtcaagtggcatacaagctggttcttcccaatacctgtttaatccatcctgtggtccatgtatctcaacttaaggctgccaagggtttccaacctgctctacagcatagcttgccatcttctttggggtccttggaaattcctgtgcagttcttggatcagcgagtggctaaaaaaggtaacgctgttgtaactcaattgctcacacactggtcaggtactgcagctgctgatgcgacttgggaggaccaagaagatctgaaggctcgctagctcattttccattcgcaccggcttgggggcaagccggctctcaaggaagggaggatgttaggaccagcaggagcaaccctgaaggagtacagtacggcggagatgacggcaacacggtggatggagaacaggacggaggcggtcgtaaagattgcgtcttc

SEQ ID NO: 28808 - DNA, 15887 bp, Oryza sativa
cgagatgacactattgctagagtaattggggtggagcacactcatagggttgatttgatgtcagctgatgtaggatgggagctgctttggaggagcatgaacatcaaccaagagaaacaagtgcaaaatctcaaggacataggtattgagattgttcgcaaatgtggtggccttcctcttgcaatcagagttattgctacagttttagcaagccaagaacaaacagagaatgaatggagacggatattggggaaaaatgcctggtccatgagcaaacttcctcgtgaattaagtggtgctttatatctgagttatgaagtgctgccgcaccaactgaagcaatgttttctttattgtgcacttttccctgaagatgaaaccattttgcgcgacattcttactaggatgtgggttgctgaaggctttatagatgaggaaaaaggacaattactagaagatacagcagagagatattattatgagctgatccatcggaacttgctccaaccagatggtttatattttgaccactggagctgtaagatgcatgacctcttaaggcagcttgcttgttatttgtctagagaagaatgttttgttggggacgtagagtcactagggactaatactatgtgcaaagtgcggcgtatttcagttgtcacagagaaggacatgatggtgttacctagcatcaataaggatcaatataaagtgcgaacgtatagaacctcctatcagaaggcactgcaagttgatagttcacttttcgagaaacttacatatcttcgtgttttggatttgactaactcacatgtacaaagaatcccaaattacattgaaaacatgattcatctgcgcttgcttgatcttgatgggacagacatttctcatctaccggagtccattggttccctgcaaaaccttcaaatattgaacttgcagaggtgtaaatctctgcaccgccttcctttggcaaccactcagctgtgcaatttgaggcgacttggtcttgctggtactccaataaaccaggttccaaaagggataggaagactgaaatttctcaatgatttagaaggatttcctatcggtggtggaaatgacaataccaaaatacaagatggatggaatttggaagagttggcttatcttccacagttgaggcagcttggtatgataaaattggagagaggtactccacgcagcagtacagacccatttctactaacagagaaaaagcatctcaaagttctgaatctagactgcactgaacagacagatgaagcatattcagaggaaaatgctagaaacattgaaaagatcttcgagaagctaacacctccacacaacttagaagatctttttggtgggaatttctttggttgtagattccccacctggcttggttgtacccatttgtcttcagtgaaatctgtgatcctcgtagattgcaaatcttgtgtgcatcttcccccaatcggacagctaccaaacttgaaatacctaagaattaatggagcaagtgcaatcaccaagattggacccgaatttgttggctgctgggagggtaatctcagatccacagaggcagttgctttccccaagctcgaaatgttgatcttcaaggagatgcccaactgggaggagtggtcctttgttgaagaagaagaagtgcaggaggaggaagcagctgcagcagccaaggaagggggagaggatggaattgctgcttcgaagcaaaagggggaggaagccccgtctccaactccaaggtcgtcgtggctgctgccttgtttgaagcagttgcaacttgtggagtgccccaagctgagggctctccctccacagcttggacagcaggccaccaacttgaagaaactctttataagagacacaagatacttgaagacggtggaagacctcccgttcctctctggttgccttttagttgaaagatgtgaaggcctggagaggatctccaaccttccccaagtaagagagctgcgtgcaggtggttgccccaatttgaggcatgttgaggagttgggtggttttggagcagctatggctgtcaaagaatatgcagaagatctcttcactgtgggtcccagggcttgaggagcaacatcgccagctccatggagatgagcataagttggaggtcaacgagtagttatggagacacttctagagactcatccagtcttattttcaatgacggaatagtctactgctaccaggtctttgaaagttttcttgaaactgcacctttgtcaggctactgcattttttttgtgatggaataattatgaaaacactttcagaggcacataaactctgtttctctgttggacgaacctgagttggaaaccagtttagtttgagctcatttcaaccccttctttcaccagaagcaattgggttaaacccaagcaccaatcattctcctgtcagtccttaatgacaagcctgcaggacaaggaaatcaatgaagatcactgaggcaaaaatatatttatcctcccatcatgatagaaactgattgtgctttgtgaattgtgatcgagaggagaggaaatggtggataaccttcctagtcattcctttgtactgacaatgtttcagtacttgaggaaatctcagtgatgatacctcgtattgacaatcaatacctgtgttaatagatggatacaacacatctttgactgaaatttgcatcggcaatgattgtgtccaaggctctttctccaccagctgctgcttatgtgggatggaacccatgtataacttgaggaagagaagtaaatccaccttttgtttatttcattgaattcatcctttttccttttgaacactgaaaataacagcttgtatgtctttaggattggttcaggaaaatgttattatgacagtgcactagcttttcaccttgttatcccattacattgttaaattaaccatggttttattgccttcgtattttctggacggggatgcaaaccagtgtcttcttggatacttgcatcttcctaactagcatggtggcccgcgcagattgcgcggctagcatcattatattttctatcatataatagcatatatgttttctcattatattattcaaatatattaaaatgacaacataattttaaattttgcaatatgtgtaatattcatattatattttatatacatgttagttattaattatttttaatatcaatttttagttatttgtaaattatatatattcctatatggactctagactcgtcttttaatatttcctttttttaattccgaattttctgtaaattgtatttctatatagactctatgctcttcttccaatattatttatttttatttctgaattttcatattatattttatatacatgttagttattaatatcaaattttagttatttgtaaattatatatatttctatatggactctagactcgtcttttaatatttcttttttaaattccgaactttttgtaaattgtatttctatatagactatgctttttttttcaatattattttttcaatattatttatttttatttctgaatttttattatttctaattgtatttctatgtggactctaaactcatctttcaatattcttcaatttttaatttcgaatttcagttactaataaattgtattcttatgttgaccttaaactcttcttcccatatttttcttaatttcgaattttagttatttgtaaattgtattttttatacagactctagactctacttttaattttattatgtttattccaaattttagttagttttaaattcctatatggactctatactctacttctagtatttcttttttaaattccgaatttctattttttttcttaattgtatttctatatggactctatcctctacttctaatattccttatttttaatttcaaatttatattatttcctaattgtatttctatatggactctatactctacttctaatatttcttgtttttaattccgaatttcagttatttcctaattgtatttctatatggactctatactctacttctaatattccttatttttaattccgaatttcagttattttctaattgtatttctatatggactctagtctcttcttctaatattccttatttttaaattccgaatttcagttatttcctaattgtatttctataaggactctagtctcctcttctaatattccttattttttaattccgaatttcagctatttctaaattgtatttctatatggactatgctttttctttttctccgattaatgtgagaatttctaagccatgagagcgaacgtggaagctcctttttctattcctttaattatataatagatgttccgtgtaagctgatttccttattttgcatagtgtaatgtgttctactagcaacgatagggtttgagatattcggttttgacatttcatttgatggcatttgatcattatgttcaaagatgctcactactgatgctgtagagctcactcccccaaatctgcaaccttctcatggactctgaaattagaatcgaggtttgtgttcattcatgtacacaattgagctattcagtttgaattttcatctgaatcattctgtgttcatctacaacggacaaattattcttatcgtgactgatcaaacgcagcacaaagcaaagcacagctatagcgcatccaccgatgagaagagaaagggggaggaaaacgaggggtcctctacctcggttgtgctcgaggttctccggcgccggcgacgtgggactcggcggcgatttacctcgtcggagcgctcactcgcttgccgtcgtcgcatcaacggcaatgtaaacatataatgtctccctgactcgtggggcccacttgagggcaagaacgcaagaacgacgcgtgtctctcctgcttgagaactaaccggcagccgctcgccggagctccctccggaaaccccaaatctcggcgcccgtatccagaggcggttcgtgtcccgttggttcttgggctcctatcctcgttcagatcagggaggctgttcagttcttgtttatccagcggggcgcagcgaaatttgcagaggaatctcaatctccaaactggtaggaagagagtttggtcgatagaagttgagttcttgtttgttcgttggtctgcagagttcactagttcagataatcatatcatcaacaccatgaattgaaagagatgctgcactgctgtttattgtgttcactgtttaattcatagcatccatcaaacctgtatctgtttgggagaatgttcgatcaatgctacagttggaatcaaattcaactcaggaccaaattcgtgttaggcaaatattcatgttcaatctgttaatacgtttaactgcagttctcaacatctcttgacgaggaagcagggctgctgctgcaattcggcctgcaattcaagtgcagcaatatgttgtgtgcaatttgtgcattagtgcacaagttgagaatggtaatattatttcactcggaagagatggaacagttgcgaaacgcagaaccactcggttcagaggagaatagtcctggacaaaaggacagaaaatggtccaatggtgagcattgatcatttttacagtgaatggtgagcaactgatcagcatcaaccatggtgaagctgaacctgataagtcgacagcactaggggtgatgatcctagccacccataaatcctttcttgtatgtttcctaacatatataagtcagcaagtcaaatgttcttatcgttttctttagtcgatggttcatcgattctgacatcaagacaagaagccaacatactgctagccatgttactttcctcttggctcacatacggccatttgaatggattagattcagaaataatactatatctcgtctttctttcttacttacatgagttgaaatattcttggcctttttttctctacttactagggcagaattaagattttgaagatgagctgcaccccaatccttaagagatactaggaggtactccctccgtttcatattataaaacgttctaacattgctcacattctagacacacacatatatatatattgattcattaatatatatatatatatgaatatgggcaatactagaaagtcttataatatgaaacggaagaagtaccatattttctaatgtaaaatttggtatttctcgataccttcggtattaggtctttctttctctatttactagggtggagtactctgaatgaatttcagtccaaatatctttcctgacatgggaatctttttagtagcacgatggagaaatttatatatgcagctgaaacatcttgttcatacatcagactgccatttgcacaatttgcaaacttgttcaaacatctttatctaagatggcttgtcttgttccgtgcaatttgcacactggaaaacaaactcctcatgcacagtgggacataaatggtgagacggataaaagagccattgtactatttgaacactgcataagagagccagcccatctagtccacgagacataatctcataatgggaacttgctcgttgtcttccttgtgaccggcgatgcctcggctgcacgcatcaaaggccttgctctcaggctcagctgagttttctctcacaacatagggtttgaacaattttctgcttgtcacgttaggagctagccaatcgaaacgttggctcgctcggtcatcatcttgcattccagaagacacccgcctgctccactgccgttcctgtcgatccgattcacttcagcctcagctcggctttcataccaagcaagttagctttgtcaacttgagcaaaattaacaccgcaatttgagccggttacttctttctcgtttgcctgttgatacaaagaagccaccgaaaggtaaaccccttaatgatttcagttcttcagcttcagtaatcagtatatacttgctcaaaacagattgcaaaataacttgctagctacaaagatactctgaaaccacttcaacttttgtccattttcagacggtattactcttgcatgatttaattggatatattgcttacgccaaaaaaaaaacttggatatattggagcatcaccctcgacgagtttctctatggcaaccatactggattctttgattggatcatgtgctaagaagttgcaagagatcattaccgaggaggcaatactaattttaggtgtaaaagaagatcttagagaactgcaggaaaaaatggaacaaatacgatgctttataagtgatgtggagcgaaggggcatggaagactcatcaatacacaattggatttctcgtctaaaagatgctatgtatgatgctgatgacattatcgatttggttagctttgaaggaagcaagctattaaatggccattcttgttcaccgagaaaaacaattgcatgtaatgggctttcacttctctcttgcttttccaacattcgggttcaccatgagattggtaataaaattagaagcctgaacagaaacctagaagaaatagcaaaggataaaatatttgtaacacttgagaatacacagtcatctcataaagattcaacatcagaattgagaaaaagttctcaaattgctgaatccaaccttgtggggaaagagatattacatgcttctagaaaattggtgagccaggttcttacacacaaggaaaagaagacttacaagcttgctattattggaacagggggaatcggaaagacaacacttgctcagaaagtattcaatgatgagaaattaaaacaaagcttcgacaaacatgcatggatctgtgtttctcaggactactccccagcctctgttttgggacaactacttagaaccatcgacgctcaatgcaaacaagaagaatcagttggcgagctacaaagcaagcttgaatcggctattaaagataagagttattttcttgtgttggatgatgtatggcagtctgatgtgtggaccaatctactacgaactccactgtatgctgcaacctcgggaatagttttgataactactaggcaagatactgtcgctagagaaattggggttgaggaaccacatcatatcgaccaaatgtcaccggctgttggttgggagctactctggaagagcattaacattgaggacgagaaagaagtgcaaaatctgcgagacatagtgattgagattgttcagaaatgtggtgggctacctcttgcaatcaaggttattgctagagttttggcaagcaaagataaaacagagaacgaatggaaaaagattttagctaattacgtttggtccatggataaacttcctaaggaaataagaggtgctctatatctaagctacgatgatttaccacagcatttaaagcaatgttttctttattgtattgtatatcctgaagactggaccattcaccgttattaccttatcaggttgtgggttgccgaaggctttgtagaagtgcacaaagatcaactactagaagatacagcagaagaatactactatgagctaataagtaggaatctcctccaaccggttgacacatcttttgatcagagcaaatgcaaaatgcatgatctcttaaggcaacttgcttgccatctatcaagagaagaatgttatattggagatccaacatcattggtggataataacatgtgtaaattgcgccgcattttagctatcaccgagaaagatatggtagtcatacctagcatgggtaaggaggagattaagttgagaacttttagaacccaaccaaatccactgggaattgagaaaacatttttcatgagattcacgtatcttcgtgttttggacttgactgacttacttgtggaagaaataccagattgtgttggatatttaattcatctacgtttacttgatcttagtggaaccaacatatcctgtcttccaaaatctattggtgctctaaaaaacctccagatgttacacttacagcggtgtgaatctttgtacagtttgcccagcatgatcactcggttatgcaatttaaggcggcttggtcttgatgattcaccaataaatcaggttccaagagggataggaagacttgaattcctcaatgatttagaaggatttcctgttggaggtggaagtgacaatactaaaatgcaagacggatggaacttgcaggagttagctcatctttcacagttacgccggcttgacttgaacaaattggaaagagcaactcctaggagcagtacagatgcattgttgctaacttacaaaaagcatcttaaaagtctacatctatgctgcactgaaccgactgatgaagcatactcagaggaaggcattagcaatgtcgagatgatctttgagcagctaagtcctccacgcaatttagaagatcttatgattgtattattctttgggcgaaggttccccacctggcttagtacatcccttttatcttcactgacatatttgaaactcaaagattgcaaatcttgtgtgcatcttccaccacacaatcggacagctaccaacttgaaataccttagaattgatggagcaagtgcaatcaccaagattggacccgaatttgttggctgctgggagggtaatctcatatccacagagacagttgctttccctaggcttgaattgttggctatcaaggatatgcccaactgggaggagtggtcctttgtcaaagaagaagagttgcaggaggagaaagcagctgcagcagcccatggaagggggaaaggatggaactgctgcttcgaagcaaaagggggaggaagccccgtctccaactccaaggtcgtcgtggctgctgccttgtttgaagcagttgcaacttgtggagtgccccaagctgagggctctcccaccacagcttggacagcaggccaccaacttgaaggagctcgatataagaagagcaagatgcttgaagatggtggaacacctcccattcctctctggtatactttttgttcaaagttgtcaaggcctggagataatctccaaccttccccaagtgagagagctacttgtaaatcattgcccgaatttgaggcatgttgagatgttgggtggtttggagcagctatggctgtcaaagaatatgcagaagatctcttcactgtgggtcccagggcttgaggagcaacatcgccagctccatggagatgagcataagttggaggtcaacgagtggttttaagagccaattaattagatggcacaaggtatgtacactgattggttgggttttttcactggaataaactaatcatagggttgtacattcatgctgctcctcagctcttcagttgtatgcagctattcttagcttttgatagtctccttagatgttcatgttgtgtgcattgactgattgtttgatgatctatatgatttagttctttttttcattagtgttgcatgtaaccatttcaccgtggttaatgttttcataaaatggtgtatacacatcaacaaattaattagatggccaaatcttttatcttctcatgatcttattaacatgcatcctgcacgtacggtgtattccagatgaatgtattgtcctatatgtactacaacatgatcgtatgcagtagtgttcctagctctgcacacagagatagagattactgctactccaaaagaaaattgtatgggttatattgtcaccaaacaatgctatgatggcattgatatattcactatatatatgccagtagttatatcacatatgcatatatccatccaaggacttggggacaacataaatggtttagcatttggtacacaggctgcataagttcacgactaaacataatggacttcgaagtaatccttaattcagctcttgaatgtgctagctatgattgactgtgtacatccttcaggatgtagaggtcggtttttatttaatccattatctaaaaatgtgctatatatgatgaagaccagctcacatgcatttagccttcaattctacaagtgtgttctatgtcatatcaatgtgcgcatttagcattcactatcttataaaaaaacacaaatacacatgaattttcgcaagacattaggcctatagagtagttttttagatttgacaaaaaaatatgtcaggcccaatgtttcagattccttgtagcctatgagcaggatattgaatatggaagtgttgtgcccaacatctgttcctagcgtagggctcctaattaaggtttgtttggtgaaaaacaaaagccacctaatgtctttgtattggttcaaattgattgatatttttgttcgtattacatctgttaaaataagcagtggatattgccaagcgacatgcctatgtatagtccatatgtgtattttccttatactttttgtaatgcacgtctgatgtttggtaagttcaattgcagaaaatatgattgttgtaaaacggatgtcacttgtattttcttttccttaattaagttatttaattaccaaattgcttatgtatatacatccatgattaattgtgtgcgcttatttgtattgtaggttaatcttgaaggatttgggctgcagtcacctgtaatctatatttttgtctttacctagttactggtctttaaaatattaaaaaaattaaaaaaatgaaaaatttaaaaaaacaaaaatatcaaaaaatgggaaaatgccaaaaaaatggttatattttctttagctcttgtaaaatacattgccgtgttttattaggtgtgtgtttcttttttaaatttttttttattgtaggtgtgtaggtaactccgcctatgtcatcctaggtttagtaaatgacatagccggtcccaagcccggaaaaaggaggggaacatcttgtatagatgttggttgaaatgatgctctccatccacatagtagatcgttgggatatttccacacttttatcagattaatttcattttcaatgatggaatagttatggaaacacttctggagactcatccagtcttattgctctgttggaaacatctgattcagaactatttaagcttgaccagaccaccagagttgagagttatgttgcgaattgagatagacaagtaggtaaaggaaattcagtgccagacatgacaagagacagggcaccccagacaagatgtgcaacgagacattcgagtctcagagcccagatatgcccgaagtcctaaacaacttgatacaattttgctacaagatcaaaccgtaacggctagatcaaggtacagttctatttttatgtcggtttggccgatctagctaatgaattgacaaaatataagtacagttacagacccactaatcaataaagacatcccatgctaaaacaagtatgaaagatgcgcatatccctccgtatctaaaagactatagttttaagttttaacctataaatgtatcccacaaagactatttttacagtgaggttcactagatctctttaatactactttatatttttattcttattttaaccagcaaattaaccagtaatactccctcttcctcgttttttctcctcattaataggatacagtagtcttttaatctatctttgatagctttaactaccttcttttagaaatggagggagtatgtgagtgacaggttacaacaatcactgtctgatgtgtgcttaggctgtgaactttatgtgttgcttcagtttgttgttccctattgttgtgttgctggctgctattcttgtcatcagttcctgtgatgttagaacccttatcaacagaacagcctctcgcaacaagaacacagaaatgtggaactcgaactagattgatagattatctcacgctcaaccgagcggagccgccgccgccatcgccaccttgccgagttccaagccaaccttccttctagctgttgccagcttacatatagttcttagttacttctctctctctctctctctctctctctctctctctctctctctcgttacatgaatttgggccgataacccacaaagcttagacggcccactcggaccccttatacttcatgttcactcgacgattacgcttttccttgacgaagacgccatcttgacgaccgcctccgtcctgttccccatccaccgtgttgccgtcatctcccgcgtactgtacctcttcagggttgctcctgctggtcctaacatcctcccttccttgagagccggcttgcccccaagccggtgcgaatggaaaatgagctagcgagccttcagatcttcttggtcctcccaagtcgcatcagcagctgcagtacctgaccagtgtgtgagcaattgagttacaacagcgttaccttttttagccactcgctgatccaagaactgcacaggaatttccaaggaccccaaagaagatggcaagctatgctgtagagcaggttggaaacccttggcagccttaagttgagatacatggaccacaggatggattaaacaggtattgggaagaaccagcttgtatgccacttgacccactttatgctgaatctcaaaaggaccaaaatacttgaaagatagcttatggttggctcttctagccactgatgtttgaacataaggctgaatcttcaagtaaacccagtcacccggctgaaactcccggaagcttctatttttatcagcataagccttcatctgttgctgagcacgatgcagatgctgctgtataagctgatgcataaattttctgtccctcagccattcctgtaaatcaggtactgcacaatcttccatggtaataccaaaatgagctggttgatggccataaatgacttcaaagggggtttgtttcacagctgagtgataagcattgttgtaccaaaattctgccaaatgcaaccatgctgcccacttagtaggagtggcatgaacaaaacatctcaagaacagctccacacactgattaactcgttcagtctgcccatcagattgggggtggtaggctgaactcatgtgtaactcagtaccagacttagtgagcaaatactcccagaattggctagtaaaaattttgtccctatcagatacaatcactctaggcataccatgcaacttatagatatttttcatgaaagcagtggctactgtctcagcagtgaatgggtgtgtcaggggaacaaaatgtgcatattttgaaaatttatccaccactaccaaaatgcaattgtacctttcagactttggaagaccctcaaggaaatccatggtaatcgtctgccatgctccttctggtaccggcaagggttgaagtaaccctggatatttgactctttctggtttggcttgaatgcaaacctggcaatgttgaagctgacatttaacttgctttttcattccaggccaagcaaacaatcttttaattcttctatatgtgacaggaaaacccgagtgccccccaatgggattgtgatgaagttcagcaattaacttgttctgtaggtctgtattgttgcctatccaaatccttcctttgtaacgaatgagcccatgcgccaatgtatagtgttccttggcaataaaattgatggctaattcagctagcaactggcttgtgtgagggtcctgctcatatccttttgttacttcctgtaaccaagtaggggtacttactgagatggctgataactgtcccccttccccaacttccctacgagatagagcatcagccacagcattgctgctacccttcctgtaaccgattttatactgtaagcccagtagcttagtaaaagccctctgctgccagggagtgtgcaatctttgatcatctaaatggaccaggctatgatagtcagttagaatcagaaactcttggtgctgcaagtaagacctccaatggtcgactgctaacaaaatagccatgcactccttctcatatgtcgacagtcccttggaccttggccccagggccttgctgagatatgctattgggtgtccttcctgtgacaacactgctccaataccagcatcactggcgtttgtctccacagtgaactgtttggaaaaatctggtaacccaagtacaggagcagaggttaaagcttgcttaagttgttggaaggcagcttcagcttcagatccccacctaaaagacactcccttccttaacaactgtgttaaaggtttgctgatgataccaaagttttttacaaactttctatagtagccagccaatcccaaaaatcccctcaatttcttaactgatataggagtcggccatgtaagtacatcctgaattttctttggttcagtggagaccccctgtgctccaatgatatggcccaagtaagacacttgaggttgggcaaaagaacacttgctcattttgacctgccaatgatcttgtctgagaagttgcaagacctgtttcaagtgggtcaaatgtgactgtagatctgggctatacaccaatatatcatcaaaaaacaccaaagcacatttccttaaaactgaagccagagttttgttcattactccctgaaatgtagctggagccccagttagtccaaaggacataactctgtactcatagtgactagaatgtgtctgaaaggcagttttgtgctcctcccctggtaccattctgatttggtggtaacctgccctgaggtctaattttgaaaaccacttgggtccagacaattcatccaacagttcctttattattggaactgggtacttgctcttgatagttaaagcattcaagtgtctgtaatcaacacagagtctccaagtcccatatttcttccttaccaacaaggcaggtgaagaccaagtactctggctaggttgaatga

SEQ ID NO: 28809 - DNA, 8106 bp, Oryza sativa
ctgggtacttgctcttgatagttaaagcattcaagtgtctgtaatcaacacagagtctccaagtcccatatttcttccttaccaacaaggcaggtgaagaccaagtactctggctaggttgaatgacccctgatgacaacatttcagcaacttgtctttcaatctcatccttgagctccggattgtatctataaggcctcaggttaactggttgggctccctctattaaaggaattctatgatcacaatatctggtagggggcaggcccctaggttcagcaaaaacacctgcaaattcttgtaaaatcttttgcactggagcaggtacattctgatgttcctctggtctgccttcagtcaattgaatcatatacatgatggaacccaacttgccatacccattaattgctccccagttatctcaaaacattgcttaggttgagaagatatacccagcaatctaatgagttgactattgtactgaaactctagccacttctaactccaatctatttgcattgggctgtgctgcacaagacaatccatacccaatattatatcataattgcccaaggttataagtgtgaaatcatttctgaaactatgcccctgcatccaccatgtgcaaccaggaattactggattgcacactatctgtcctccatcagctatttgtaccttcaaaggttgtttcagtatctccactctagatagttttctgccaatttgctcatctatgaaggaatgagtacttccggaatccaccagcattagcaattatgtaccctgaatccatccccttagtcgtatggacttgcttgattcagtaccattcagggcttgttgagaaatagcaagcagactcacttcttcctcaacaggtgtttccacttcaggacttgcttcattatcaatgttcatagcttccataagctcttgtactacatgtagttgtactgcattagcacacttatgatctctcccccaccggtccccacatataaaacaaagacccttagactttctatatgccttaagtgatgcaaccttgtcttccttagctctagtggcctctagggccgctgatgagttgaccttctgtggagaaggagagaacaaagttgtctgtgatgcagacctcggtactgacttgatataatttcccatctgttctgacttcttgtaacttccagccttcagtccttccagagcctcttcttgcagcatagctaaggaacaagcagtatcaaggtcttggggcctctgaaccaagataactgatcgaacctcttcctttaagccatcaatgaattttgtaacaaaatattcaatgggagcagaattttcataagcattcagttgatgcatgatgctatcaaacttctcaacatactctgcaacagaagtagtctgctgaaccctcaaccattgcctaatcaatgcttggtgtcgatctcgagtaaatctggcacacaccctttcacataagtcataccacgtcacccctatcagctgattcctcactgattgtaaccagaaggcagcgtttcccacaaaattcagagttgcaatcttaacccaattgttaggcggaattccataaacatcaaaataaacttcacaattagctctccacatctgggggttatctccattgaactgcgggcacgtcatcggtgacaagctgcttcccaaatttgtccttgcactacccgaccccggtgaagcaattggctcaaaattgaaattattcgcagaattcaaagtgggatctcgcataccttgaatctggaacgacgattggggcgtgaattgctcttccttcacatcagctggtttcttctccattcttccctgtttcagcagagtaccctccatgttttcgaccttcgtactcaaggatccgaccaccgaagcgacttcctccacacgcttctccactagcggcaacctcgcctcaaccaccttcttgagctccgctagatctgcacgagtccgctcctctgcttccgctctcttccgctcgttctcctccatcttcttcaacaagagatccaactttgtttcgtgcaccatggttgaccttccccaaatttctcagcgtggttttctggcgtccagatcccgcgaccgctccaaactcgaccaacccaatcgaggcaagttgccttttcgcgagacaccaccccaggaggtgagtctcaatccccgatcggtgattctacggtcgaatcaagagattaaggtcgcaaagctctaataccagattttgttagaacccttatcaacagaacagcctctcgcaacaagaacacagaaatgtggaactcgaactagattgatagattatctcacgctcaaccgagcggagccgccgccgccatcgccaccttgccgagttccaagccaaccttccttctagctgttgccagcttacatatagttcttagttacttctctctctctctctctctctctctctctctctctctcgttacatgaatttgggccgataacccacaaagcttagacggcccactcggaccccttatacttcatgttcactcgacgattacgcttttccttgacgaagacgccatcttgacgaccgcctccgtcctgttccccatccaccgtgttgccgtcatctcccgcatactgtacctcttcagggttgctcctgctggtcctaacatgtgatgaacgtggcggtctgaaactctgtaagcctgcaggtctcactctctgtctctcctcattcctgagtcctgacagcctatggcccatttccgcatttagtcctaattaatgaatttaccaagccagttgacaccatcaggaggggaaaatactgatgactctgtcaaccctgcaatctagtagtatacatgtttattcaaatgagcaaatctgcaactccctcatggactctgaaataagaatcgagttttgcattcatttcttgtgctcttcagttattcagttcagttctatatagtgtcaggactatcatctgaactgttttgggttcatgaacaataactcttaagtccatctaatatgttcagttattcttcttcccctgaatgactaatgcagcaaagcaaagcaatgctgaaaactatacaggtaccatgaaacgctacatcagtaacaaattcatgttaatcatgtaggcaacaggtgcaacaaattcacccttaacaaacagataaaagaaccgctaataattaattctttggtgatacaaatacaagtacagagttaaatacacactgatcaatgaatacatcatccatgtcatttttactcacagaagtacgtaggtgaaaattgttcatttttgacgggaaacaacagcggcgccggcgacgagggtggcggcgccggcgacgacaatggcggcggcgagcagggcatggcgatcaccgactgtcatggttcgggttcgggatgacggtgtccattgcgggacaatcggcaagtccctctcgctgtcccattcaatggtgcaagatgtccagtcctgaccaggcaacatggaattatcattaatgtctcagaaatatttatttatttggaaatgatcatgttgtaaataaacccttagatagttttccatggatatattgttacacagagcattttatagataaaagtcattactaagaattatttgtttgtactatgctactaagacaataattgttttaaaaatgattaccaaaggacatgtcaaaccaatgtattgtatgagggagatttgcaataatgacgctgcaaacattaatctttgctataataacattggacccacatttcatagacacattcaaaacagtgaaaccccaatatttgcaatcccaatattgcaattttcttattgttatgaggaccatcctaatgcagcgcaaccggcactagggccagtcctaaactattgggggactagggtgagacaaaaattagcggccaaaatgcaggcactaaaatatttccttgatctttgttttcatctcgtccaagaggcccaattgttcataactagcatacagtgtactatactgaaataatagtaatatatacttagtatgtctctacatacctggccttctttttcaagacgacaaactaactcgacgattgctcgcattctcttcacatattcatcacaaccagtatcactgcatacaattcataacattagctaaaaatccaagattttgtaaacattctgagccccaactattcattgtaattacatacctgtcatagagcccaggatgattgaaacaaaaagcttggtacatctgcttcagttcagagtaacccttattggtctcggagaacgccacgcccgccgccgtcgtcgccggcaagacctgcacgccgcagccaccgggggagaaggccgagcttacacaagccatggatgctggagctcgccggccgatgttcttcagcagccgcatcgccatggggtgggtgggtcgagccattttggaacgaaattcaggtatatgtgtacgacgagcttgttgattgttgatcagttgattaatcgtggttttgatcagctggtgtccatatcgagcttatataagttgtgaggaagaagaagacgacgacgacgatgacgcggaggaagaaccgaagaaggagatacaacgcgcatggataccgagtggagatctatggaaggaagacgagagggaaggtcttggtagcagcaacctaattagagcaagtttaatagtatagcccactactagctccaaatcatctatagtcaatgtaatagccaattcatacaatagttgcttactatactattaatatctggtcccacatgttatacacacattacgtcttaaagtctgtgttgcagctgtctacagatctgtaacccgttgctcttttctctcttcctttacctctttaaaatatgtttatagctggcttaattatagtctgctattgtacgtgttcttagaattacttagttaatgcaaaggttaatggtggtggtaggttttgatgaccgatcagtcgtagggtcaatctatgcaaggtcttaaattaactaaagatggatgggttagctagtgccaagcacgtatgcacggaaaagagagcactttttcttcttttgaagactgaaaagatttttaaagagagcaagttatgagcacacgattacacatgacacgacaacaaattggaatgcagaggcatgactaatttccgtcataaaaattaccaacaaaaatggtagcataccgtacatcgaccgagatgaacattgaacaatatgcaacaaaaacctgcaactatgcaacagaaacctagcttagtatatatatatgtatatttgttcaggattaggatagatgttatatagtttataaaaaaaaaaagatatatagatgctatgtatgtttataagaaaaaaaatcgagagtgcacgttttgtgatatttccactcattgcctctcatattagtataactaaaatggaaatttagatagttatcaacttactatatcataatgagtacatatgttcatgtatcatggtgcattaacttttgatgaggcaggtaaaactacttgtttgttagatagtatacattctcaagtgcaccttcttttcttttcagcaatcgcttgtacactttgttttttatattacccatatggtagccatatgtagcgggagtatgttgaatatgagacaacgcgtttatttccgcgtgcaaccataaccatgtttaccgagtcatgcgagctattgagttacgagtaggctacaatggcataaaacaaaagtttctaccgcgtaaaccaggaaccatgcgaagaaagagatcatggatcgtaaccactcgacgtgacgactagtggaagaagagtcggaacagattggttcaatgtagaacatgtcggtgtagcggaagtagttgactgcagcaacctgattgtctcctcctcgcacgagcatctcctcctcatgttcccaagccgatccgtgccgcaacgcagcaacgcctccaccggtatccaggaaaggaacggcgtgcgtggtcgtgctagcacctgtgcgtggctagggttagggtttggcttgtgatcaggaatggtggctagggtttcccacgtgtgatgtcgcttgcttcgtgtgctcctagaagtccaacttggatcctctttcgaattgaaccattattggatctccatttaattatcttgttccaaccaattaaatgtgcaaccccgtaggttcatacaaactcgttgcaacctgaaaatgcattttcggtccacgtgtcaacaacggctcttagcagaacgtattgaaccactgagtataccaaagatcatatcgactgaaccacttttagtttatttgtgtatgtctttctttttcatctttttttttaaaaaaatatcaaagtgatagtcgatcaggtttcacatcgtggaatgttgaagtaatttgatcacattgtcatgccctagctaatcgtggcaataggtgagtatgatatactatgaaaagccaagacaaagattcgtactaaatctgttaggtccattggcattagagtttctactttcatttaaaataggactacgtgagctgtaaataaataaatgcatttgggatttgtgtactctcttataggagcactacgggtgttccaacaatatataatttctgaaagataaaagcatacagtgattaacaaatgacagaacggatttcagtccaaatatttttgtaattcagacaacagagcgcacatcttttcccacatgcacaatgggacacaagtcaaacaagctagtgacatgccaacaaacaacatcactagtgtagtatcagtattctactctttgccactgcataagagctagccagcccatctatagtcgtcgcgattcatgaaatcaccagggaattgaacttgctcatcttcttcctcatggctaccgagatgtcgtggctgcacgcaccaagagcctcgctctggggtgtctggtgagtcttccctcgcaaactctgagccaagctcaaagatgaagggacgacactggaataggagcaagatggtcgctcggaatctcgccgtcaagtcggctttggacaccatcaagttcagtaagacgatgcagcgctgccgcctgcgcatcggcggtagtagcatcgcttgattgcttatggtcacaattctcgcaccaaattcagaatttgaacgaaatgttcagtaccaggttcgtgttagcagtgagatgaggtcatgttgtcagtaacttgggttagttgagtactcttccatgattgatggcattagcatttagccacttaattacctctttgattgtctgagatgctgcagcttatttgaaaatccagattgggggatttagaacaagaacacactctcctcttctgattatgaaatgaagaatcaattacaagcagaaacaggagactatctccaaatgctgattacaccaaaatatattggacacatttgaattggtataatttatttaataattcatcatcaagggcatttggtctagtggtatgattctcgcttagggtgcgagaggtcccgagttcaattctcggaatgcccctatttttttttcttttttttccactctcattgctactaatcaaataaaagctttgccagcaaaattctgaatcttctttttttgcgaaatttcctgtgctgataaagcttccccactcttacttatcaaacgacttttttattatgtgaaatttaatatgctgataaaaagcttctccattcttattattaatcaaacgaaagtttccctgcaaattctgggtttttttcccctgttgaaagaaacaaattctgaacaaaatttgtgtgtgtgtgtgaaactttgtttgctgattaatgttggcgcctataggaaattcctccccattgacaagttaactaatctgattaaccaagaatcccaagattaaaaaaggggatggatgtcataatcacaattcacaatttcgcaagtcataataatcaatcataatggaacagatacataatgcagtttcag

SEQ ID NO: 28810 - DNA, 22219 bp, Oryza sativa
ttgttccccagacgttttcccggcaaaatagggagcaaaggtgaccaacacccttctgtaaaaatcatgcgtttgccgtgaagaaaggatacaacagaacagacagacagacagacagatacaccctctttgtatatctttgcttttgccatttgattgtgctattgacatgtgggcccagactgcatgtggcaactgatttatgaaaggggaaaaagattcacattttactgggaagttggaattttaccactcgagcaaatgcatatttgttgctcgtcactcctcaaaaatgaatcagatagttataaaggattctgaaaaaggattcaacattgataactaagcaacttaaggtttacagactagagaaacttaaggtcatcctcttgctgctccaggacaattgttgccagtgctcgtcggtatgccgctgatcttgcattcctaacaaggacacagatgtctttgcgcttcagattttcatgtgtccattgctgccgcctcaacaccgcgagaagctttgcttcgcagaaggcaattgcaacagcatctcgcccactactgtaatatgtaaaacagattgcagttaaggtttattactcagaattgcgctggcatgtagcgagggggactggggataggcaagattaccttccatggacaaaacccgtcgtgacgaagcctatcggtgtcgaaactagatttcggcaataataaaagggggtggctatcaagctaggaaagtgtatgggtttggagacaaaggatttatacaggttcaggccttcttataaaagaagtaataccctactcctgtccggggatgaatccgccgagtgtattattgattgtgtgattcgggaaaaaccaacatatgcccctataggcgcccagaccccccttatatatgggaaggagtccgagttacaaaagataacctatatcccttacggaatatgaaaatataggtaagatacagtcgtaaccgactaagtttcagggtgtttccatgatacacaagttaagaaacaaacccaagatacaaataagatattctatctacgttaggtatcctgtacccagttcgaataccatcgccgtgtagatatgggatacccataatctccacagtagcccccgagtcctttgcagtcgaccatcgtagccttctcaaagatgataatccgagtacttcaaactcttcaagccaaaacctgccgagtggactgtaaagggcgaaaagaagaagaatatggtgcatcgaatagatgcacctaattaggtgtagcccccaactatgtgattagttaacaaactaaacatatagttgaaagacaaaataacaacacaattgtgcattatatgacaaaagcatatgcggcgccaaaataggcatgctaaccgactgctttttagccacaataaaagaaatccgagtggtttacactctaaaaggttcacgaatgaacacacttgacaggcatccgaataaaaattctaaagattacccatcaagtattataaagattatggtaataaataagtcgaatagcctaggccatgactatttaccatgaaaacaggcatataacacgccaaggaaatgattataataaaaacaagtcattcctagttaacccaaacagcttttgtagcctaaaaaagcttgcaaaaacagcataacgcctttctgtcgggcacctttttaatttgcattgcaataattccaaagaattatatgaccgcataaaaagggtttgatcagcattgggcaacactgttgtgcgcataatattgccaaagcaaaatatgcctaagtccctaaggaacacaatgggccacgctgttaaaagtattgggctgaagtactgttcaggcctaagcccattagcacctccgatacccttaactgaaaaatcctatatccaagcgacgcttcgtcttccccgccggaactctcgccattttccccactccctgctacagtgcgaagctgcgccggcgaactagggttcacaactccggccaaatccacctccgaaaagtgcatcaaaatccttcccgtgatccaccgcctcaattcctcacctctcccaagccatccctcgaatcaaatcagcacatttgagaaaaatcgatggcggaagagagagaaagcttcgaaagccaatgggtgccgtccgacgtgacggaggagaacctgaaggagatggtggcgcacggcgttctcccagccaaggagatcatcgggtggcggccagcgtgcggtgaggttttcccgacccctgatacacatgagatcgtagtcttctcgcatttcttctacggtggctttgctcttccgacctcaaaatttttccgcgggatcttgaatttctatggaatcagcttgcatcacctaaacccgaattccatagtgcatatcgccaacttcgtccatgtttgtgaagcctttttggggatcaaacctcacttcgccctattccgccggatcttcttcctcaaaccccaaccaaacaagaacaaaccgtgtgtagtcgggggggcaggattccaactaaggggaactctgagccaaaaatatttctcgatgcccttcaagacttcgaacaaaggatggcatgcaaactggttctatgttcagaatcccgagcctgctcttcccgggtactcttgtcttcctccagtgtgccaagatacttggaactctcttccaatcggagatgaagcagtacaagccttggagttgttggatcgtatgttaaatcttaaagaacaaggcttacagggagagcaaatcactcggcacttcatcaaatgccgactggcgccaatcaaggaaagatcccgcacagcattcgagttcgacggcaaacatgatcccaaccgtgaagaaccagactccctggatttcaaaatcatgaaggagaggatgtataaaatcttctcaaatgcaattgtagtcagctactctcaccaactgccagttgtgccatataatgcattcaatccgcctccacaggtatgcatcggaaaccctcaaaccgtgatcagaacataattttatcttcatgctgagttgactaactatggaagcatcttgtgcaggaatatgcattgatgaagtcagatccaccagtctctcagcgccggtctcctcgccaacacaccgctcagggaggtggagggccaacgatcagaccagatccgcaacctcagacctccaaattagctggtcaaacaggtcctcgcaagagaaagctggtacttgatgatgatgaaggcgacgatgataattctggggataagggctcgcctaataaacccccaaagcgtaccatgcccaggaaaaaactggctggccgtgcaatgccaaagatcagaacatcttccaggtattagatctctcgatatgattccgcttcggcatgttttgcccatgaaaatgatgctgaatactgaaagaacactttgcaggaaaccatctgatatagatccatctggaaaagaccccgatcctgccatgacagagcagaatatatccaaggaccccgagccgactgctgaaaaccagccgaccgctgaaagtcagccgactggcgcccatgcttcgggcgatagagccaatccgagtgacctgccgccgactggaaaccagtcggcaacaactgaaacggcaacaactcaagagcccccgactggaaaccagtcggacgcaggccctgatcaagagatccccgaagtagaagcgcagacgacgacttcgcaaggaccagaagctggtaacgactcgatagctgggtcgtcaggtaaagaacaaagatcacctcacgctcagctaggtacatcttcaggttagttgtcttctcaaacaatggcgatttaaataacctcagtgtatccgtctaatgtcttggaaacacatcaggaccatcaggtgatgacggagaagaaatccctcgcataaaggcgaccgacgactctcgtcctcctatcttgatcaaatggtgggatgagaactcacaagccgccggcatagtcataaaccgtcaaaaagaagatgaagaagtgtgccagctgaagaaagcgctcggagaagccactcgtattgtaaatgtaagtcttccgagtgacggccttcggtaactttgttttctttttagcagaactgaaccatgatccatcatgcagagaatccatcttcgcaatgaggccaagactacaactttggaaaagctggttcctcatttgggaactctagaagcagttagggaccagctgcatgaggccaaggagtgcgccaaaaagacggagaaggagttaagggaccgaatcgctcagctccaggattcaaactatgagctgagtggttcatcaaaaggtaatccctagatccgtttcattggtttaaactggcataactgtatcctcaaccatctgaatttcaaacagcgcaagccgccaggatggaacagatggcgaagcaaattgaagccctggagagagacaagacagaactggttgcgcaaagggactcagccttgaaggaagtcgaaggtaacgccagctgacaatctgagcttctctctttataatgcaataaatcctcatcataaatgtgttttgtagatcgcaaaataaaatcgcaagcccaattcgacgtcttggttggtaagatcaagaggcttgaaggagcaagggataacgtcgccaatgccgctgcaccaattatccaagccatgttcctcaataatggtggtccgagtgcactcgacgcaaccgaaatatttgacaagctgagtgttgctccggaagtatatttcaagaatatcaagaaagctggaagtatgggagctggcatggccttggcgatgacaaaatccttgtacccgagaattgaagtcgacaccattgatgggtttgcagacgggacaagtgaagaagctgcccttgatcttatcagcagtgcgcaaaatgcggctgacaaaattgcgagtgatgttgtagaacaatttcgcaacaacgacctccaaccgagtaatgaagactctgatgatgaaaggactgattctgactgagtttgaatgtaatacatggaggctcaatttgtacaatactggtgtatttatgctgtgcttgatgattcttgcgaagtttttgatttcttaaaagtttttgctaagctttgttgagcctaaaacccaaagaagctattaaaaactttcagtcctcgcaaactaagtagaaaaaccaaacaaggcaatgataaaccaagcaaactgaattgataaaaaatcacactccattattatgatgatagcccccgactgacaacttcaaggagaaaacttgatgtttgacagtcaaaatagggaaatacaatggtaaagttaagcgtagaaacgacgaagatgttcaatgttccaagagttgtcgacgagagtgccgtcttcgcgcttgagtcgatatgaacctggccgggtgacttcagagataataaatggcccttcccatagaggagataacttgtgccgatctcgtgtggtttgaattttccgtaaaaccaggtcgccgactagaaaggcacgagatcgaacattgcgattatgataacgtcgcaacccttgtaagtaccgagcggactgaatcaaagctgcttcgcggacctcttccagtcggtgcaagtcgtccactcggtcttcttcgtagcgttcttctcggaagttacggaagcgcaaagactcaaattcgacttcactcggcaacattgcttctgccccatagacaaggaaaaaaggtgactggcctgtggcccgactggatgtagttcgcaaagaccaaagtactgacggcagctgttgcacccatttaccggcatagggttttagccggtcaaaaacgcgcgctttaatcccttgaagtatcatgccattggctcgctccacctgtccattgctcatggggtgtgccactgaagcgtagcaaatcttaattccaaaatcctcacaaaagtctttgaaaactccgccggtgaattgtgtgccattatcggtgatgatccgattgggcactccgaatctgtgcacaatgttgatgaagaaatcgcgagcattatctgctgtaatcgtgacaacaggcttagcttcgatccacttggaaaatttgtcaatggccacgaagaggtgcgtgtaaccgccgactgcctttttaaacgggccaaccatgtcgagcccccaaaccgcaaacggccaagacagcgggatagtctgcaactcttgagctggtaagtgaatttgtctggcgaaaaattggcaaccttcacatgtgcgcacaattttgtcggcgtcggacactgcagtaggccagaaaaaaccctgccggtaagctttgccgacaatggtgcgcgcagcagcatggtttccgcatatcccagaatgtatatctttcagcaattgtctcccttcctctaaagatacgcagcgttgcagaattcctgaagggcttttcttgtataactcagattcgtgcataacataaagtttgctccgccttgaaatccgctcggcttcatctttatcttgagggagctcttgagaagttaaaaaccgtatgaggggctctcgccagtcggcttcaaccatagctacgtcatgagtgtccgcatcttgagtagtatctttatgaggcacggtcggtgtataaaggtgttcgacgaaaacatctgagggcgccggctcacgcttggatccaaaattggcaagtctgtcggcggcttcattgttgtgtcgaagaacgtgactgagctcgagtccatcaaatttgtcttccaatttgcgtacttcttgtcgatatgccatcatgttgtcgtcaaggcaggaccactctttcataacttggttaacaaccagctgtgaatcgcctcgaactattaaacgctttatccctagggaaattgcaatccgtagtccatgaaggagcgcctcatactcggcgacgttgtgagacgccgaaaaatgtatccaaagcacataacttagtctttctccagtcggggaaattaaaaccactccagctccagtgcccgaaagtctttttgacccgtcaaaatgcatggtccagtgctctattttctccacgggggtatcctcttggcgctcggtccactcggcgacaaaatcagccaacgcttgagacttgattgaagtgcggggcttgaatgatatgtccaaagacatcaactccaaagcccacttagcaatccgtccatttgcttcgcggttgtgcagtacatcgccgagtggaaacgatgtgaccaccgttaccgggtgaccttgaaagtaatgagacagcttcctggtagtaattaaaataccatataacagcttctgaacctgagggtacctcgttttggagtcggccaggacctcgctgacgaagtagattggtcgctgaactttctggacatggccttcttcctcacgctcgacaaccaagactgtgctcacgacctgggaggtggctgatacatacagcaacaacggctcctgcgggtgtggtgaagctaagaccggtggcttggtgaggagttgtttgaaatcttcgaaggccttctgtgcttcgggtccccattggaaattatctgttttcttcagtagcttgaagaagggcatccctcgctcgccaagtcttgaaacgaatcggctgagcgccgccatgcatcccgtcagcttctgaacatctttctgggtgcttggcggtttcatgttgaggatagcagtaactttctccgggttggcttggatgcccctatgagacaccataaaaccaagcagcttccctgacggtactccgaaggtgcacttttcagggttcaatttcatcctgaaagcacggatgctcgcaaaggtttcttctagatccgagatcaaatcatccttttgtttggtcttgacgactacatcatctacataggcttcgacgttgcggccaatttgtgttgagaagcatctctgaatcatacgttgataggttgctcctgcattttttaatccaaacggcatggtgacgtagcagtatgctccaaaaggcgtgatgaatgaagtcttcaggcagtcggattccttcagtcggatctgatgataccccgagtagcagtccaaaaaactgagaagctcacagccggcggttgagtcaactacctggtcaatgcgaggcaacccaaaaggatctttgggacaagacttgttgaggtcggtataatcaacacacatgcgccattgccctgttttcttccgaactagaaccgggtttgccagccagtcgggatgaaggacttctttgatgaagcctgctgctaacagcttggttaactcctccttgatcgcgtccttcctgtcttgtgcaaatcggcggagtcgttgtttaataggcttggcgtcttctttgacatgtaaggagtgctcaatcacctctctgggaataccgggcatatccgaaggtttccacgcaaagatatctttattattttgaagaaaggtgatgagcgcgctttcctatttacaatctaactcggcgcctattacagcagttttggtaggatcagaaggatctaagggaatctttttagtctcggcttcggtttctccactttttgaaatcttggcagcgggcacttctccttcgctcaccgtggttgcagccagtcggatttcctctcgggcagacgccatctcgcgggtttgggccatgtcgcaactctccttgtcgcatgtgacggcttgcttgatgtcgctccgtagggataggactccacggggaccaggcatcttcatcatcatgtaagtgtagtgcgggacggccatgaacttggctaacgccgggcgtccgagtatggcatggtatgctgtctcgaaatcggcgacttcaaagctgatgttctctgtgcggaaattttcccgagtgccaaaagtgactgggagggtgatctggccgagtggagttgcggataatcctggaattactccgtgaaaaggcgcattgcttggttttagctcagagcgaggaatctgcatatcatccagggtcttagcgaagaggatattgagtgcactgccaccatcaatgagggttctgcgaagcttgacattacggaccactgggtctagtaccagggggtaccgccccgggtggaccactcggtcaggatgatccgagcggtcaaacttgattgcaatctctgaccatcgaagatactggggcgtgtcgggctgaacagcattgatctcccgttcagtcaacttctgcttccgtttagactcataagccagggggccgccgaagatatggttgagctccttgcggtggtcttgaaatccaaccggggtgtcgccgtcgtccttcttccttgacgtgctttgttcctcgtcggagttcttccgagtagacttggtgtattgctccgcgaactgcttatagatgaagcactctttggccacgtggttggagtttggatgatgcgggcattgggagttcatgatcttgtcgaaggtgttgacgcgcgaacgctgtcgagaagagtgagcggcggttgcaacaagttcctcaggcttacgcttgcggtccttatgattgttacttccacctcctcccgtagccggcgtatttttcggcttccaactgggacccgactgcttcgatgcggtgacggcgtcttcggctttggcgtactcgttggctttttcaaacatgagcttgactgttctgggaggtttgcgcccaaatttgccgaccaattcttcgtggcgaatccctttggtgaatgcggcgatgatgacgtcgtcggtgatgtcggagatcttgttacgttgttcggaaaatcgtcggatatactctcgaagggattctccggatttctggataacgttgtaaagatcatattgtgtgccaggacgctcgaaggtgccttggaagttggcgatgaagtggtcgcgtaattcagcccaagatccgatcgtaccacggggcaatccatggagccaagatcgggcggaatctgctaaagccaccggtaaatagttcgccatggccttgttgtctcctcctgctgcgcggattgcgagaccgtagacggtaagccacgattcggggttagtggtgccgtcatacttctctattccagtcggtttgaagccggctggccaatccactcgacgcaggtcgtcggtgaaggctgcaactccgtcaaggtcgtcgtcgcggcgatccggcgagtgatggtagccgcgagctgctcggcgctgtatgattgtgtcgcgaagatcgatggggcggcgacgaggtggtgagcgaggtcgttccactcggcgctccctatgaaggtcgggaggtgagtgaacagaccgctcgtcgtgacccctgctcctgcggttggatcccgcgccggtgatgctgaggcttggatgacggtagtcgtgagatcggaagtggggaactcggctgccagtcggcgtgtggacgctttcggagttaactgggaccgaggccgcaatcatggtcttcgtctggttcaagatgttgacgacgtggtcggatcgattgagctcgttttggttgagtagggtgtcgagaagggtgatcgcggcaaccgcattctgttgaggggtgcggaaaaccggtgtcccttcgacatcttgttggccgatgagatcacgcgctcggcgccctgcttccaaagctcgctgacgtcgatcctcagcctccttggcgatccgctcacggtcctgctgctcacgccgtagccgttcttgttcttgtgcttgatgctcctcctccagtcggcgacgttcttcggtttcccgggcttggcgttgctcctccgtctcgttattggccatgaaaacgccaaagtagagaggagtgtagttgtcatctaggcttccgtcgaagtcgtcgaagtcgtcgaagtcgtcgaagtcgtggtagcgagagctgaactcatcgtactccacgatgtcagtaggacgtgagtcgacggtgggagagctgttgtagtcatctagctgatccgtcgaaaccgtgccgagtggttggaggatgacgccgacttccctgaagctaggcgaaatcggtgttgaagccgacttccgcctaggcctacgggatgaagacgctgtcgtggtgaagacggccgctaaatcgtcggggagcttcatcaggactggcgggtaagccccatcatcttgatctggtgtcgttggagaagatgcgatctctgccgagtggtttgaagccgactcgattgagatggtcttgaagtaagtttcagccgcgtttgggaatccaaacgggactgagatccggttctctcccgactggtccgattccgagtcaaggagagaaatcttgccgaagttgttggtgacgaagtcgaggctgccgaaccgaaacgtctgcccgggtgggaagacgaggtcgtcgatgccggaggaaggacccattgcactgatcggcgaaaagcttgacgctacccctacctggcgcgccaactgtcgaaactagatttcggcaataataaaagggggtggctatcaagctaggaaagtgtatgggtttggagacaaaggatttatacaggttcaggccttcttataaaagaagtaataccctactcctgtccggggatgaatccgccgagtgtattattgattgtgtgattcgggaaaaaccaacatatgcccctataggcgcccagaccccccttatatatgggaaggagtccgagttacaaaagataacctatatcccttacggaatatgaaaatataggtaagatacagtcgtaaccgactaagtttcagggtgtttccatgatacacaagttaagaaacaaacccacgatacaaataagatattctatctacgttaggtatcctgtacccagttcgaataccatcgccgtgtagatatgggatacccataatctccacaatcggccatctgaacgcctttcgtgtagaatcatcgtttggcagctgaagattgctggtgctaggatccagccaagagaaataagaagttacatgggattgagggagctggagttcccatttttctaggcgttcttcttcgtcctcttctgatctgttagatgcataaacagggatgagcttcgtcaattgatattctcagcactcatctcatacagaagaatacagtgggatacagaaaaaaaagatctgaacaaatagcagaatctagcaaatgaatatatttaaaacttaaaagccagaatcaacttaagaaattagatgataatcaatcggacagcaccattgatccaatgttgtaaagtcacttgcaagtgaaccaaaaaatttacagctaaatgaataatataccctcgtcatgaggtgctgaagaaataaattgtgagtactgacctggttttctggttccaggctgaaagatctgatgggagtggggcacaaacaacagcaccctcttcaaaagaaccttccttaaatgctctgatcagcacccttacaagacataatctgtttacagagcatcctgttttcacattatcaccagaaactagactggacttatcagtaactgcttccatgacagatgaacccaaatacttctcatgaaattctttcacatgatgtctcaacatatggatggttcttggcacgagtagttggaaggatgtaggagcatctatttgcgatgattctgcatcaccagagttggaatttactgggagactttcagataatgctgtagcgacgctctttaagtcatctacttcaagagtgctcactatgccatctcctttacgaaagttagcaatgatacaatgccacaaaggtgccacgaaagttagcaatgttagtgtgaacgcaaaatatgatcttgcggctaaacctaaagtcggcaaagagatattttgtttagggcgatcgctacagtgatcgatctctcatgaacatccctgatcgggggataaccgccataccctagtgtcggttccccctgtgtgcagtggctataaatagagatcaatacctaagtgttaaaccttaagagatttctctcgctacccgatcaagcaacccactgaaacacagggaagaaccaagacacgattctctctgtgcttccaaactagaagagaagaaagaagaacaaagacagagagatgggaactccaggagatcaaggtatgatccaatcccatttcaatttgtagtcccactttgtgccaaaccgatccaaagcaatccaacaagcaatgcatacaatggccaacgtcaaaggcaactgatacgtgggcgagaggcatccctgccaacttgagacttcagcggcaaccaacgtaggcagtggcgtcgctgctagtgacagtgtacgagcagcctgtcgaacttatcgtaggaagcgatgagccgatgaggctgtcaattgcctttattgttgagagtcgcttgcaggaaggtaatatcacacaattgaatgcatttcagagttagactgaaatccgcatacctttttttcaactgcgcataaggattgtgtatcttttatattaagactttagaaagtttgatgactttagtctttagaaaaaacatagtgatggctaaggaagacgcgggactgggcatcggctgctgattccacgaagcgcagtgaggcggccaagaccgacagtatcatcaaaatatatgattctctcgcagatcaagcgtcgcaactacggatgaagatggtgaacttgtaggcgacgcccgtctcccctccgccccggctgcgtcgacatccttcccatcttttgctaggaaactattctaaactatcgagaggacgtcatcttgttgtttgcatgttgcttaaaaaagtgtgggggagagagagtggtattttcacatgcgaacttgttaagaggctcgcttaggaaaattgattttttttgcatgcggtcctaatgtgcttggagagcatttttttttaggtgagagcagttatgacgcacctgcaacctaaaaaggtctcgtccagaaaaattatttatgcagcaatgaaagttgattttagtacatcgagttatttactacttattatttctttataaatgtgtatcacatctacaaataaattttggatatgcagcacggtgcatatccaaatctctactattataaaaattgaagatgtttttcctggtactttgatatgtcatccgtgtatgagtcggttttaagtccgttcgcttttgaaaatacagatccgtatttgactcgggttttaagttcgttcatttttggaaatacaaaagtagtcgtataagaaatctctttaaaaaattcgcatactaacttgagatgatcagacttttaattatagctcatgattttctagaaaaatatatatccaagcgaattctcttaactaaaccgtataacaataataaaattaaaataaccttcacccgttacaacgcatagtcatttttcctagtaaaaactaatttatcaaaaacagaaagaaaaaacagcttttgttttctgaaggaatacaaggcttaattaggaggccgtcctatcgatcggctgatgacggcggcgccacgagcgaagacaggacctcatcggtggtttaagccgctggtgaacccggcattcttctccggtgaaatgtgggccgccgccaagcccaagcccgcgtccgtgccaccgggtttctccaccttgccttcgggtttgttcttcacggtgcacttcgccgatgcgaggggcacggtggtggcggcgacggtgaggaggatgaggagggcggcgagggtgaggttcgccctcgtcgggatccttgaagacatgtttggggtaggggggtggtgtttgaaaatctgcaagggaggaagcaagtgaaggagatgtatttgaatagggaggggaaaggagagggctggctttatttggcgggaaatgagaggtcaggttgttcccggacaattttcccggcaaaatagggggcaatgctggccggtgacttgcaagttgcaaccaacaccccttcatgcatttgccgtgaagaaaggagaggacacaaccagacatgtgggcccagactccatgtgacaactgatttatgaagggataaaaaaggattcacattttactggggagttggaagtttgccaccctgttgcttctcactcctcgaacatgaatcagacagctgtaaaagattctgaacaaaaaattacaacattgataaataagcagcttaaggtttacagactagagaaacttaaggtcatcctcttgctgctccaggacaattgttgcgagtgctcgtcggtatgccgctgatcttgcattccttacaaggacacagatgtctttgcgcttcagactttcatgtgtcctccattgctgccgcctcaacaccgcgagaagctttgcttcgcagaaggcaactgcaacagcatcttgcccactactgtaatatgtaaagcggattgttcagttaaggtttattactcagtattgcatcgttggcatatagtgagggagactgggtgaggcaagattaccttccatggacaaaacccgtcgtgacgaagcctatcggccatctgaatgcctttcgtgtagaatcgccgtttggcagctggagattgctggtgctaggatccagccaagagaaataagaacttacatgggattgagggagctggagttcccatttttctagacattcttcttcctcctcttctgatctgttagatgtgtgaacagggatgagcttcttgaattgatatttcccagcactcatctcatacagaagaatgcagtgggatacaaaactaaaatgattcaagccagaatcaacttaagaaatcagatgacaatcaatcggacagcaacattgatccaatgttgtaaagtatcacttcagttgcatgtgaactaaaaaatttacagctacatgaataatataccctcatcatgaggtgctgaagaaataaattgtgagtactgacctggtcttccggttccaggctgaaagatctgatgggagtggggcacaaacaacagcaccctcttcaaaagaaccttccttaaatgctctaatcagcacccttacaagacataatctgtttatagagcatcccgttttcacattatcaccagaaactagactggacttgccagtaactgcttccatgtcagatgaattcaaatacttctcatcaatttttttcacatactgtctcaacacttggatggttcttggcacaagtagttggaaggatgtaggagcacttgttggtgatgattctgcatcaccagagttggaatttactgggatactttcagataatactgtagcgacgctctttaagtcatcttcaagattgctcagtatgccatctcctttacgaaaactagcaatgacacaatgccataaaggtggtacaggaacccttggaggtctcatggaagaagggcggcagttggtagctttatcgagaacagcagcctcttcagccataaataatgaataggctttgctgtctggataatcataagggaagcatggcatcttgagctgcaaatagagggatcagtgtattgctatagaacaaacttctcacaattaacaataaaacataaatcaaagctgcacaatcctcagcttccccaaggctgtaatcttactgttactttaactatatcaactatttcatactattgaatgaatacagatggcaatgttaaacatactactgcaccaggaggccaatcaccaatagtaataacataataaatttgcaaggatctaagattacatcattagcttgttttctggcgcattctatctttttatcaataacaatacctttgaggctatccaccgtctctctcttaagccaatagcatgtgcaccatgagatacaagataaaaccagaaaggttttacccaactcaaaggtagaataacagaccacctgtgaagtcaacaaaaatgaaacaagatagctgcacatcaggatgatgacataacaatagcatgtagagaatcctagcttttaggaatattatcgcacaatcctctcaaacaaatcattgccagtaaaaaattattcacaaatgcaccagaaagaaaacagatcattgttagccaatgttcaacaaataatcaagcaaaattagtgataacagatattgaataaactttttataagaagccaaagctaaaataacttaaaccaatatgagcatgatacactgaggtaggtctagttctcatgttaagacttatgatggttgcacttctattatgggaccatataagagctaacataaaagagcaggacagcaaatgtaacatgattgagaaaatgggccttaccctacagagatcagactgccttttgcatgtttcagaagaataacaggacaggatcgaccaatggaatccttctcttgacttgtttgtccttgatcatttccagaatcaaggcagaaaaacttcatacgtctgtggtgtttctccatacaaagaattttctcatccacaggaggatttatcttaaggctggaatcccacaattctctacagtctgaaagggccaaatcgtgatttcctgggttcagccatatcgatgacaaaatattcccaatccctgatggtgtctcatcagcatttggaacttggtattcctccatgagttggttattctggtccagggaaactgttttagaagaatctgttccctcgactgaattatctctggggtcatggactatcatggatagtatagcaccagactgaagaatgtcagcattatcaaaaacagatcttttcaaaagatgagagccagtagagcaatacagaggatcagttgatgtagtcacattatttttattaactagcttggtggatatacttggactgcattcattgaaaaaatataaattagcacagctcgacatcatctttttctccagccaggagtgaccactataattttctcagggaaagatgaacttacttgctaactggcttcaatatactcttaagagattgcatagcattgcttcccatgacttctaatcttgccattttcccctccagtgagcaacaactgattgtgtcaccagattcttgcatctgcaatgtaagaatgacattactgcacatagacgaacaaatgaagcaatatttctaaacaaatgtttatctcaaagctcaaaagctggaagctacatgtagcagaaaaaaaatacaaagaggactaacctgttgatgacaagcggctcttaatgtttcaagcccttcactgagagcagaagggtggatccatatccataattggcgccgtaaagaatttctttcatcagatataatttgagaattggacaaatctacatcttcagtctccaattcaccaccctcccttaaaaatggacgccacatgtatgtcaccggcccaacaatttcgaggtgaggacacccaacacggcaaagctggaaaatacaattaagtcacatttttcattccaaacaatcctctacctatgctgtctgtggtaaatgtataactaccatagcattctcatagcaaacacctcgcataacttgaccatgcagatgcttcaagccaggagttttatcttgaggagatggatgcagaaccattctgacaatcgataacagggagtcctacgtcagttagccagcaacataattagtttctttaagtataaaagaaataggagataagcaaggctaaaaaggaacatagagaaacttgtacctctggaccatctagctcaactggagtgaagtagctagcatcatgaacaactgttccatttttgagccacttcagaacagttcttgaaccccttcctctgcatgatagaatgtgaactgcattactcatttgaatttacatatatgataaaccttagcatgaaggtcatgaagatagcgtaagataaactacatgtaagacatcaacctctacattttgtacaagaatttattgcactctcctcaaggtgatgaaactgattaagaatttattgcacttacaagacgaatgttggtatgaagaacactagcttaatgctttcataatttgattgcccttcaaatcggtttaacttgctctgctagaattctagaactgcctaaacagtggtgcccatgttggactatgaacaaccagaacgagcatataactcttgcctttaatcctttctcactagagatgagctagtggaatacaaactcaccaaaaaaattacaaaatggaaagcaagtggaatgatgggaatttcttctagtataaatgagccccgccaatgcaatgattacaacccagtgagctcatttcaagcttgtagtacactcagatcaaatacaatctaacacagaaattcagtaaagttaatttaacacagaaaattcagtaacgctgtactatttcccctctccgtatgaaagtcaggtcagattatcatctactatcaaggatcttgtaatcataaactgaggattcgaggcgtacctcccatgggcaccgatgggcaagacgaatccccaccgcctctccatggagaacctcttggcgtgccacaggtgcgtgcgcagccgccgcgcgccgtcgccggcggcggagaacccctccgcggtgttgcccgcgagctcccgccgccgcctcaccctcctcgagggccttccctcctcctcctccgtaccgtcggccgcctcggcatcccggcttcggcggcggcggcgcttgttggagggaaggtggcccgtggtgcggcggcgcgcggagcggggctgcgtcaagcggccggcgaggcgggcggatacggattcgtggagggaacggagctcgccggctcgagccgccgcgaagcgccgcacgtcgagctgccgcggcggcgggggaacgccggccatcggagaggaattttctttttctttttttttttttggctagcgggagagagggttttggagagagattaagggtttattatggacacttatgcaattagccccttcactgttaataaaatttcattttggcctctttttcttagcaaaattttattctttatcatacacgagtctagagtctagattagtcgcgccggccgccacctctctccctctcccaccaccgccgtccccgctccgccaccggccacctctcttcccctctgccgctacaccagatcgagagaatcaggagagaagagaagagaaaaagaaaagaaaggagaaatatgggcccataccattttctctcatgtatatgtggggctcgtatattgattttaattattttgctgactaggatgctacatcagcgaaaccaggcatctatactgtatcgggacttttttgaacggttatatatagtttagtggtatacatttatgatattacggttataggacctcaacagactcgggtaaaaggacggccagtgaacttattcctaacgataactagaggtctgtgtaaggtgtaagttgcgaagtactagtacatattaggcctaatagaaagattgaggccctgggatgggccgggaactacaaggcctgcaaggagcatgtagtttggcttttctgacctatatatattcaataaatattaaagacttgatgtgttttctaacaatgaaaatggtttatatctttggtatatatctaccaatagacacaaaattaatgagtcaaaaaataaaaaaaataaaaatactactcaaagtttttttaaataatagaaatgttttacatcttatcttacatattgtggttgtacaacaacttgcataaaatgtaacatctctcttcttctagctatagggcaaagggcatgacggcttgtagctgccggaggggcgatcgatcgatcgactcaacgacgatatatataaccctagctatatctcgatctctggctccgtcgacgtgtatatatacgttcgccgacgacggcgagcgccgccgaagtaggcgtgaaagatccggtccaggtgagccgccgacgtcgccgaggcgacggagcacgccagctgccaccaccaacggatctctgctggtagtactagcagctgcgccggggaagaagaagaactcgcgagggtcgccgtggcggtggggcagcaaccgacggcggcgccgtcgtcgtttctcgcctcagacgtcgtcgtcgtcatggaaccagctagctagctgcagtgcccgtacgtcgccggtgagaatcaattctaaattaatttctactagtaatctaggagtatctagtagttagcttggtgtgtctattattctgggacttgtatactttaatcgcagtttaattatgtagaggtgagccgatcgatatttcctgggtctcagtctttgatagttagtgtaggactgtgaatcgacgatgatatcgattccgactacgtatgtatatactcgatcggccgatgaacgtatatacgttgagatatgaacgggaggcgaaccttacctcccgccaccgcgccctcctccctttcactccctcccctcatcgtcatcggagcgcatcgccggagaactgagcagccagctaggagggcggtggcgaggccaatccccccagggcgccacgcctctgtgcgaggagggcatcgaagacgatgcagggtgggcgcggcggatccaacatcgtcgtggacggatccggttacgctgcatgtggatctgccgctgccgcactagatctggtcagagcggtcgacagcaaggatgtcagcgtggcgatgaggctgcgagggcaaaggcagcgagagacccatgcagctgatggcaaggaggcgcagctagggtggcgcggtggtcgggcggctagcagctgggcatcgacgtcatctccgttggagctgacggtggtggtggcaccggcaccggcatagctcgagacctcgggcggcggccggattcgacgaggaaggcctggtgacagtgcgcaagagagaggcggcagaggaaaaggagttggtggcggtggttcgtcttcctcattgctggtcggcaccctattcctttctggagcttctcccctccttcgtgaggagtttttaggtcgggttgaggcagttgctggtcaacgagggaagctcaagttgccgaaccaatgt

SEQ ID NO: 28811 - DNA, 13106 bp, Oryza sativa
agtcaaaacccgccgaggacctagtttgtactggttttgtgagttgagggatacgttgtatctggttttgcggttcgaggacgattttgtaactcaatagcaagttaagggaccttgggtgtactttttccttatcaaaacggcaaggcccaactacgcgtgggctgtacgtggcccagtactcaagctaaactctttcgagactcgattatcatcatggtttaatttctttcttctcttatgctagctctgaatattttggtttttattttttgttgtgaatataggtcttacgcaatcatttgattttcgtagatgatcatattttggataattatatatgtcaggtttaattatccatcgaaacaaccatatgcatacttacgcttacttttggctctgggagatgatcaaatagatgctgacatttgatgcatgtctagatatataggagtaaagtttcatccagccgctaactataaacacttagtacctttataaggtagataagaatatgagataagtacacatagcgtgtactttggctttgtgttagttaattgcgtttacgcgacagatcatcggtcattgtcgactctcaacttaattttagtccgacgaaattattggcaagttgcagcctgatgtcgacatgagaggccaaaactatattattaaactggtggtcagcagctgtgtgatgtgttcgttttccagggcgtttattacgtcgccctcactttcttcacaacagttgaacttttgtttgtgtggctaattattattagtatttcctttaaaattataattataatgatggatgataaacttgtgggtcaaaaagacgcctaaagtccactgtaaatggagtaaatataaatactagctatcaatggtttttaataggtaattaaatttcaatttgtgctgatagtgtctgcttcatatgcttcctagctagctagttttctcataattagttttgctagtagttttataattcttccttttctgcttcagaggatatactcctaaatatttatgctttctttttagaactcacgtgtggctgactaaagtatctcctgttgactgaaagtgacctttttctgctcaaagagcataaatttctttagaaaaaggaggaggaatataattctttttttttggaccatggaggaggaatataattctttttttgtggaccatggaggaggaggaatatacagaactcattatatattatctataactaaagtgacttatatatattctgacgtacttattatatatgcagagagaaagaaatatgggattcatatccataactgacatgacttatgctagctctgaggtacaaataacagaagatttcgaccttgcaagttgagaagaataagacttttcgatcgactactgtttcatattccatatgaaaatagttaaggttgggtcaataatgctacaaacaagaggtttgaaaacacaaaacgtacgagcaccaaactatgacttctgagagaccaagttaattgcatgctgtatggccatatttcagagaaacgcacggactttttaaaaaaagcaccgggaaaatgtaacaatatcagaaatatgaatattttgattatacttaaaatatggtcaacaatttttatttccattgagcctttgacaatgtctattttgatcagacgcatcatgttgttttcaacatgcaaatttgaccaatgcttttatgtgaattcgctcactcaattaaaaaaatataaagttgatttataacaatatatttcattataataaatctagtattaaatttaaaatttactagaaaaaatgcccgtgcgttgcaacgggtgaaatctattttaatcttattattgtcatatggttttagttaagatgaaattcactgtgagagttcgcttggatatatatttttttagaaaatcataagctacagttaggagtccgatcgtctcaagttagtatgtgagtttttttaatcagattcttatatgatttcttctgtattaccaaaaatgaacgatctaaacaccgattcaaatacgaatatgtatttccaaaagcaaacgaacttaaaaaccggctcatacacgaatgatatagtagagatatagccattctgaatacttcatataggtcaaattctagtattttgcatcatccatcctaaaatacaaacaattatggtattttgcatgaaaattaagataaattggtcaaattaaattagaggtacttgtgattggttcatatgaagaagtaggaaaagaatctaaatgagaaataattacgattagttaagataaaagaatagttaaaagaattacttggatattttagacaaatgccaacactaaaagaagatctattttaagacaaaagagaatatatatagttttaacatttctatgctttttcacttacacatacagaagacaacaaagtggcagaccgcaggcgaacaaatcgatcggttggttatgtgaaaacaaaacgagagtcacagcaactgcgcccggatttgcgtgcgtttggacagacagacagatagacacacgagatccatcgagtagctgctgccgacaggcagcccaatgtactgttcataagagcaagtttaatagcatagccaactaatagctccaattcatctatagccaacctaatagcttatttatacaatagttacatactacactattaatatctggtctcacttatcatacacacagtgtgtcttggagtccgtgctacatctggcaacaaatctgtagcccgctgctcttctctcttattatttatctctttaaaatatatttacagctggtttatagcccgctattgtaacttctctaaggtgaggtgtcgagaggagaggagaaacaaagttttgggttccaaggaggaggcaacttgcactgcaaatcttcaatgcagacaaaaaaacacagtgccacagccacagatcctattcctagacagagggtcaggtgtattacaaacatccataaaaaacagtttcggacttttcaggccggatcgaaaatcataagccgtttataatttttaagttcacaaaactcatattgaattttaatactctttttttacaaagtttgttttttattgtttctttttcgtttatcaatgatttttatgaaatctgaatatacaactctcctcgtatttgcgagaaagtgtctgaatggttgagctcaactaataaaccataaaaatataaataaaacattaaaaattttatatgtgtataatttatgttttaaaagctaacgttgaaaaatatactattctgaaaaaaagccccaaaatcaactttccaaaaatttcattttggctacagctaataaaccaacaaacatgaaaatgatttatcatcaattttgtatatggagttagtaatatcacaccgagcgagtacatatataacttaaaaccaatatagtggataatggatataccagatacgaggagaaaattcagataagtgtagtgtggtgcaaaggtgcagtgagcattcaacacagatgtggcctaaaaaaccggtcagaactcaccaagttcccaccaacacaagcacatgaagaaaaagggcagccacagctgatgccaatcaacatcacatccagccaaaaaggagcacttttctaaataggagtatatactaccaagagcagcaataatctccaaaagatcatctctaggagtagttgaattcttctgaaccccaatattctaatgccaaatattcagaggccacttaatcaggcaaggagagtttagtcagggtgtgtcaatagatcaacggctttcccaagttggtgatggtgactgcaacaattggggcagattgatggagacagatggtgagaaggcaaaagctatccctgtttgagatcatccctgcaccaaaaatccaactcataaagaaattcatattttgcaagtgaaattgtgggaacaaaaggaaaaaaagcccaaagccaaaagccaaagccaaaggcaagacagattgtgacagattccatatattgttttgattgtttgctcctatctctaaggaactctccaacctgaaaggattccaacttgaaaccaaagcttgctgcttcttttctctcatttgtctgaaattcatccattttttcagtagacaaggcaagaaaaggcaagttgtgcaaagttttgttcttcagattagcttggaggcaggcaaaagaaaaaaataaggcgccaaactttgtgtgctcctggatcataggaagaaatatccaagagattggtaaaaaaaggcgccatttttgagagaaaggcgtttccttgcgatcaagctggtgatgtgatcgaagagtagaggcggccatggaggcggcggacctggtgaagaaaatacgggagctggaggagggccaggccgagctcaagcgggagatatccaggatcgtgccggagcgcggctatgcgcggcggccgcctactctgtccgcgcagcataggcgcaccgagctcccgcatgcggaggcggcggcaccgttgtctctgatcctgcagcgcgtggaccgcgcctgactccccgaccggcactacgtcaggatcctgcactcgctggggcaagccgtgcacgtcatctccctcgacggcaagctcatgtattggtgagcctttgttgcttgttttcttgctcatcaagtgcttgacgaaatgctagactagtttgatgcagagggttgaagcgaaatttactgaaattagtttgacggttgagctgtagttcgtgcaatcttgctgctgggaatggtgtattagtgcggtattcctggctaatgtgatggtacctgcattatgacggtgtatagagaaaaatggaggtttagtgggatgaactctgttgctaaattcagaatggagaaatacttttctgtagatgccaggtctttaatttcagtgacatcctctagagttttattaaattagataatgagtatggaagtaaattaatagtggaataattgatcaagtgcctactgtgaatagctatgagtgcaagcaactccaagtatctattccttcttgtattactgtacagagaattgcacttgttttctggaaaaactattagaatgtatggtgcaggacctgaagagacatgttgcaagaataatggttgtagtttcctatttccttatatgaatatacatctggaatacttttaaggtaactaaatacatagcattgttcaatgcatgtaactatatcagatctcatgcacaatcttatcattaacctgcctcagcaggcatgtttgctctaaatttcattttaccacagtttgatgcaacaagtacaacattccttaccagatatttctatttttacttcaacccaggaaccggtacgcggagcatctgtacggctattctgttcctgaagcagttggtcagaatgcccttgaattaattgttcatcctagtgactatggtgcagcaaacgacatcatacagaatatattcatggggaagtgttggagagggaaatttccagttaaacacaagtcaggggagcgtttcaacatcgtcgccagtaacacgcctttgtatgatgatgatggtagcttggtaggcctcatctgtctctcaactgatacgcggacattggaggagatacttggccattcaacctcagggaaagtgtatccgagttcagcaaagccgcgcgttcaactcaatgggtccaaaagtggtttgctaaacaaagtttcttgtgactcccagcaacctcttcaatctgctatcacctccaggataacaaatttggtaagtcatacctctgagcaaacaaaataattgactataatagaaagtctcttctggtatttcttcatgatttattttgtagtgtatactttgatttttagagtaacaaacacaggctaccagggttacaaatagagttcgctctcgggtcaagacgggtcagaattgcgatgatcagttcggtggtgcctgtgagagccattattctgaacatgatgccagagaagagcagacatctagtgaaggaagcaccccaagtggggatgttcttcatggggcctttgttagtgaagacaattactctgggaagtcaagcaaaacaaacagtgatgactcaggagaaggaaaactggggcttcacaaaattcttagctcaacagcagaggcactgtgggccaacaggggaattccatggccttggagaggtcatggaaatgatgatgctgggaagaatcgaacgaacttgccacagttccatgaaattcaagagaatggacagagccataaggaagttccagagccaatcatactaccagactgccaagatactgaatttgtccaggaagtcaaatatgaggtttcaggttcctggtggtctttcaatgccagcacaagtagtatgagcagtactggaagcactaatagcagtgctatcgagagagcagatcgtgaagcagactgcctggattttgaaattctgtgggaagacctggcaattggagaacaagttggtcaaggtagttatttctcacttggtaaattttctgtgtacacatgtagaaacacatttacttcaacacattcgtactcaagcataatcactttagttggtttcatgatctctcaatggtcatggtaccatgactagtcttgcatatcaagacaggctacacggatggcactttgcctccatatggttttttttcgataatggaagctttattaaaactcagtcaaatacaccaagatgatacatttcaactgagcccactcccggcctctgcataaaatgcacacaaccacacacaaagaaagacctatgaagacccctctcacaaaacagaaatattagtggctatcaatccgtagactagatcgccaaccatgctcctgggtaaaaaaaactcctgtgccaccttgtccaaacgtcgcgataccaccacaatagtatcctgaagacccggtttgtggaggatagctcaggtgcgaagccaccgggtgactaaagtaataacctctagatcgtgaattccaagcccaccttaatctttgggacgacaaataatgtcccacttagcaagccgatattttttcttatgtccatccccttgccaatagaacctagatcgaaagtagtcaagtttcttacataccccgctaggtattgcaaggaaagacatcatatacatttgttctccaaagagcaaatgtatatagcctccatatggttatatctgaaagttaatggaacttccttttgtttacttacgaatgttcatgtgcataattagaaaaaaaatgagggagaaataatctattaattgcctgaattgcctgctatatgcatacgggcactgttctgtttttctaatagatatacttctttccatgtttgaccaaacaggttcttgtggaacagtgtatcatgctctgtggtatggttcggtatgtatgccccattatgtgattattgaagtaacagttaacaataaatcctgaatatttatcatgtcctactccttgtaggatgtggcagttaaagtattctccaaatatgaatactcagaagacatgatactcaccttcaggcaagaggtagatatttactgtcctattgagtcaaataattaggactgcaatttctttttcagattgcacacactagagttcacagggctcatagtagttatgtctttctttttttctatgtattgacacggtcatatagacaaacatgaaaaataagggtgagctgctgagagacagaatattttttttatcttgtgaattgttttaggccgtaatgccatagagatcaataatatgctcttagctttgtttatcctattattatgatttataatctgtaattatatacatagcccatatttccatctttcatttgtctaggtagcattgatgaagaaactacgccaccccaatgtgatactcttcatgggtgcagttgcgtctctccaacgactttgcattgttacggagtttctgccacggtatgcttcatatctccttcgactgaaagaatcaagacactgtaaaaaattgtgtacatatttccctctggttgtgaatttcttctttattgttgtaagagagggtgtgtattttgaaaaaggtatatggcttaattatgatgatacagataacagcaaaatttaaatatttattgaggattctcgatgatctatgtcacagtatgaaatctaagtagtacccaacatttgtttttttgtttccactcttcgcaagccagggtgatttgaaggacactttcctgtttaagaagttaacatctaagactgaactttcctgtatacatatattttgaaaagctctgtaaaatttccaatccatagattatgtacctgtgagatgattggagtggggccataaaatgatgaacctgaagtcttgatggttacagacatagtgatgtataatgtattattaacattagttgtgtagtaagtgaaccttttctttatggaacttgaagtattactgcggatttacttgtgttattcttatgtaattgtttctatgctcataagaggccaaagctttctttcttctttcttttttttgcctacctttactttacaccaaaaactgtaccacataatgcagagggagtttgtttcgcttacttcaaaagaatgctggcaagctggatccaagacggcgagttcacatggctatagacattgtgagtgcattttctcttaaaagctcgttctaaaaatggccagtacattatgttctgcggaacatctgtggcatgagcagattgtaacaaaaactggatgaacattcttcacctgaagaaatcaagagaagttttttactgttatggaattattttcacaaatgtgtagaaaaaaaagctgaattgtgtgtgactaaaccatgtctttaagattcagcatgtgaaatgatgaaatgcaaaaaataaaatgatatcatatatgttccatctaacaaagttgcttcttctatttccccgcaaaaaaggctgcttgttctatattatacattccattactatgatttaactgaggattctatcactgaaatccaatcaataattgaactgatatgattatgatgtgaattattgttgttccaaccaacttttgtatcattcttattcttgttgaggctttggaactacaggaataatatattgtgactccaaattttgttcaataattacatattttgcctgtgtagaaacttcgattaccatgttgtgtttcagaacataacttatatatttctgcaggcaagaggcatgaattatctccacaattccagcccacctattgtccatcgtgatttaaaatcatcaaaccttttggtcgataagaactggactgttaaggtaaatccgaaagttagttctttcttcatatcttttatgtattaattatcttctcattgtttttaattttatcaggttgcggactttggtctttcacgtctcaaactcgaaacatttctgacaacaaaaactggaaaaggaacagtaagtgcaagcaagctctacttaatttcacatggattctccggactgacaagacttagataaattttaaatttgtgctaatgttttctgtttattgcaaaatatcttgtttttgttttgatattcagccacaatggatggctccagaggtattacgtaatgaaccttcaaatgaaaagtaagttcaccgttcagaattgctcaacataatttctctgactatccataggtggtttgctcaattttgttttccttttcataaagcataggtctgatgtgtacagctacggagttatcctatgggaaattgctactcagaagataccatgggataatctcaatacaatgcaggtacattttggcaatgtatttgtctgttggttagtttattcatcagagtttttttatcatattattcgttgaaaaactatgcagttgtgaattcgatagcataatttacttatagcatataaaaaaagcaaacctcaataatataattgtgtactggtggtgatattaggacttaacagccgtttgcaagttgcaacaacatatatctttcatcatgtgtttgggtgcactggtcattgtctaaatttatctgcacatagttttcctgtttcagactatgcttgtcagtttgctgttgctaaaaaaaaaagaccatattatcttgtcaaaatggtcctcattgtcaggataggataggagaagtccataaataccatctctgcaatttatacataagtattagcaatgtgtctaattgaactgttggtaaagcattactagaacatgaaagattcctaacagtgtgatcccaaatgttgcaggttgttggagcagtggggttcatggaccacaggttggacattccaagcgatgttgatcctcattgggcgtcgatgatcgagagttgctgggacaggtgcacatactatatatattttttcgacatttcaacatactacttctttgcaaattccgaagaaacaactgttctcaatgtaaaacaactgatcctagtattcaacaaacctatcctttctgcgagcagtgacccgcagcgtcgcccttcgttccaagaactgctagatcagctccgagatctgcagaagcaatacaacttgcaggctcaactgcagcgaactgcagctgccaagatgagtgttgacgattgctaacttcaaaatctgaatggtccatgttcagcttgttgccaatatgaggtcccagcaggccagcaaaatgggattcgttaggagtccagtctaaccaaaaagggttctgaattctgaacattttgctacttttctgaagaagctgtggcagcaattgagtttgtgccagaaaaagatggtgcattcgatctgaagcctgaagctctgcaactgcaattcaatcaatcttccagcagtgatgaccgatgaaatttcggcagtcatcgaatacaatgctgtattcaccctattaaccatgtacatgattttttttaaaaagaaaaggttgttgttggtattctgcaatgtactagtacttgagattatcgccgagttaatcagtgtcagaaaaaaagaaaagaaaattcacagagcaagtgatcaatgctgtcaattatagagggagtatgttacgtgtcaaatactttaacattcgaaattctaaactctaaggtatccaaaatgatagagcacggggaatttactatctcgcaataattacatataattacccttcaaaaataacaacaataaggtgaaagcattgatacgatggtggagtcgtggggtgcataacttctttcaccaagttcaaatcctggtgcctataaatattacgtactctatataagtggactttcaatattgagaaaatttgattcatagcataggaaaaaaagcggtaccaacaaatagcacaagaatttttcgctttcgatcaaaagcacaggccaccgttttttcttcgccccatagcacttccgtcaggtttggagctaacagagttaggttgaagtatataaaaattttgttggacccatttgtccttcgtcttcctcgctgtaatctcccatcctgtgtcatctcgtcctctcgggttagtgcccacgacgacggcgtcggcaccgtcgccaatcagtgacgcagcgacgatccccgtccccaggcgcgccaccgccgtccccatccccaaccgcactgccaagccgaaccacacatcttcaccattctctgtccctgccggctcccgtggcgatgactgcagcagctgtaggagccctagctggtttccatcgggccctaccaccgcggccgagacgagctccgtgccacaaagcaacacaagtggcgcttcctccgccgtttcctccagcgagcaccaaccgtcccgctctcttacttcgtggacgcggtttgggctgttgagcagtgcgctcgatgctgctacagtgagagcgcgaccatcttcgacggcgacggcgacggcaatgactttgcggagatgctgctcctcaacagctgctttatcctcgagttcttggcaaaagctgagccgcgccaatcgagggacgaaacaacgctgtcgaggaactctggatggctcatatgaatcaggacaatatggtctttctaactcttgactaacagctaaactgttcattggaacgatgaccacgacgaaagtgctacggggcgaagaaaaatcggtggcctgtccttctgatcgaaagcgaacaattcttgtgctatttttttattaccgtttttcttcttcttatgctatggatcgaattttctcttcaaaattcatctcttagcgaatgagttaggggacggacgtgcgatatgtgtttgctgtcaactcgccaaaagaaaattaacatcaataataataattatagcccttaaaaaaataataacagcaacaataatccctatgccaattggggcccaccaagagtccaggatatgtatagcatgtgcggtgtgtgagtgtgagccaagctttggtacgcgcagcacttcttctcatcccttccccgaactcacgaacgcacgccgccaccaccgcccaccgtcgtctcgtcggagatggcctcctccgcctcatggccggcgttcggagtgtaatgtgccttctcctcctcctcctctttctcagctgtacaggagcttgattcgttatcacgtcgtttccttagatcgatatagaccccccaacatttttggtggcttgttgctttggttcgaatctctcgccttcgatttcctacttgtagatgatggataacatggaggaatgcttgtgattttgaggattttttttaatgcctactttgtttgtccccccttccttattctaatgggttttagggttaagaatttgtagatctgaacatgatcttgcatgattaaaatatgggtaaagtagcattgaagcatttgttgcatctgggtaccgagctcgaattcgccctatag

SEQ ID NO: 28812 - DNA, 11851 bp, Oryza sativa
ggtagcttgaatggcagtacattccttgctgtggcataaacccatctaaaatcctagatttctgatgtaatggggtttacaccaagaatgtgtggatctggatgcgaaatatctgatgctatgagactaaaattccttcagtaattaccgttcttatgaaaattattaggttgcttatatatactgcacttgctcgtagatctgtgggattataattggttttagttaataatttgcagattttggacatgaatatgaatggttaaaatttggtttaagcaactgatgtattttgagggtaccaccgatggcagtatattctttgtggtagcattttttgtagtgaaaaatcttaggggtggcataaattcaccaaaagtctagatttctgatattctaatggggtttatgtcaagaatttatagattagaaacaaaatctgatgctaatatttcaccaccgattgacacacttaaattcctcatcattcttgaaaacagaaaactattctaactagcctgtaccattctttgattgcttacaattcattcgctagtaaatcaattcctaacctacctactcttgcttgctattatctccagaagcccagaggaagcagggaagggtaaatggtacatcgcaactgctgctaccaaccacatgaccaatgacaagagcctcatctccgacctcaagcctgtcgccgatggccgtaatatcattgctgatggcaatggtgcagggttgaaggtgcagggcaggggagctgtgaacacagaaactgtggttctccctgcagaagtgtggtatgtgccggagattgatgaaaacttggtttctgttgaccagctcaatgaacttggcctcagtatttcgattggccgaggtgtatgcaccgtcactagagttagtgatggatctgtagttggcaaagcgcgtagatcaggtggagtctatgaggtggaattcctcaaggttccccttaattagcaccagaaattccttgctgcagtatcagttggggtagtcagactcgtatgatgatattgcctactatatgcaatgcttgttgggttggaacttaagttggatctttcagtagttaagggatctggagttttctctgaatgtaaaaactaaaaagtgaaagaaggagctgcctgtgagcagaactgaggattttaccatgttggtttgaccttgtcttttaccactgtttttaagttcctgtagcctgttgagctgttcatatccatcgacttgcaattgccatttcagtttcagtgttcctgccctgctgatttattggtgatcattttcaatcttgtgctgtaacctgtaacttcagtatgtcaatgattatctttgcaaggttctctcttgtcgaccaattttccatgcatgatgttacacgttacagcaaagctctttaggctgtgtgtggaggttggcgcacgcaaaatgatgggatagattagcgtatataattaataacaatgggatagattagcatatacttcctccgtcagggcatttgcaaatttgccaccgtttttttcaattttgcaaggatgctattcgaatgacagttctagtggtatttttgcaattttctagtggtagtcttgcaataacaattcaaagtagtggtaaatttgcaattgctcatcctccgttttatattataagactttctagcattgcccctgaattttagaggtagtaattaatttcatacttaattttttttgaaaaagaattagtatgaaattttaaaaacaactttcctataaaaacatttttataaaaaatataccgtttgacggtttaagaaatgtgcacgaaaaacgagagaaaaagtaggacacattgacaaaataacacaacttatacctccattcatgacaaatttggttcagaaaaatagtaattactctaaaataataatagcaatctcataatatttgccgttcaaaaaaaacaatagcaataatattagtaataataacccttcaaaataattaataatagcaataatactccctatgacaaccggggcccaccaggagtcgactagtcgaggatactggatactcctacatatatgcggtgtgcgaaccagcttgtgtgtacacgtagcagtttctctcgtcttctccccgagctctcgccgcctcgccgcctcgggcctcgccaccgcccgccgactcgtcggagatggcctcctacccggtgttccaagtgtaatgtgccgtctttcccctcccatctcctccccctgcacacgtgctctgtacatatgggtttgattccttgtcgcgcgtgcgtcgtttctttggatcgatctggaggaccccatcctttttttggtgggttgtgctttgtttcaagtcttccatgttcagatttcatttgttggaagatgttgtgcaagatggaggaatgctttgggatttgatgatttcttgggaatacctactactttgtttgtttccccttttatattctagtgggttttaggtttaagaatttgtaggtttggacatggtcttacatgattaaaatatgggtaaagtagcatggaagcatttggtatacctttggtgtggcattgcattctttatagtggcacttctaaagtttcaatttttttttttgggggggggggggtgattgttgtagcaaagccctagatttgtgagatttttaggggttttatgccacgaatttgtagatctgatcattacccagaaccacgaagccctagatttgtgtgtattgaatggtctttacttataaacttgcagatctggacatgaacaggaataatgaatttgggaaaagtattgcatttttgcctatttctatggtagcttgaatggcagtgtattccttgctgtggcataaatccatccataaccctagtttcaagtgttgtattttcagggtagcatgaattgcagtacattctttgttgtatcaaattgtacgaatgctcagaacctagtttctgagatttagtggggtttatgccaagaatttgtagttctggatgcgaaaaatctgattctgatggttgcgatctaatctaagctagccttcatcattcatagatttcttgcgctgcattcgctcctagatttgtgggattttaatgggtttttagttaataatttcgaaattgagacatgaacatgattgaaaattaggtaaagtagcaagtgatgtgcttttagggtagcatcaatggtgtacattctttgcaatttcattttttaaatcttgggagagaataaagccacccataagcctagatttatgagactgcaatggcgtttatgtcaagaatctgtagattaagaagtgaaaatctgatgctaatgttttgccaacagtctaaatttccttcagtgattaacgattattgtttttgtgcactaatgtagctagcctgtaccttcttgattgacattcattcctgaatcaagtcctaacctgctactgttgcttgttactatctccagaagcccagaggaagcagcgaagggtaaatggtacatggcaactgctgctaccaaccacatgactcgcgaccagagcctcatctccgacctcaagcctgtgaccggccgtgtcgttagccgtggcaatggcgcagggttgaaggtgcatggcagtggagctgtgaacacagagacggtggcgatcccagacgtgtggcatgtgccggggatcaacgcgaacctggtttctgttccccagctctctctacttgggctcaacatttcgttcgaccgtggtggctgcactgtcactagagctagtgatggatctgtagttggcaaagcgcgtagatcaggtgcgatctatgaggtggaattcctcaaagttccgcttaattagcaccagaaattcctcgctgcagtatcagttgtggtagtcagactcatatggtggctaatatcgcgtactgtttccaatgcttgttgggttagaacttaagtgggatctttcagttgttagttaaggatctggaggtttttctgaatgtaaaaagtgaaagaaggatgatgttggttatgtcgctggctatgagcagaactgatgagtttaccatgttggattgaccttgtcttttaccactgttgttaagttcctgtagcccgttgggctgttcatatccatcgacttgcaattgttattccagtttcagtcttcctgcatcgctgaattatgtctgattatctttgcaagattctcttccgtcgaccaaatctccattcatgttgcatggtagtatggtacatgatagagttccatcggtagtcctaaaatgaataagctaaagccaaaatttaaattttaaaatttaattttgaagttggatttaaggtatttttaacataatttttttagctttggcttttaagttgctaagattatttatacatataagttttagatgcaaaattacctttttttttatctctaataaactgtcactcctgtctcaattctccacgtttggggtaaaaatgggacgtgtatttttcgtccgtccacctatatcaattattcaattcatggcaaaatttggtcagaggaaaacactaattactcccaaaaataaaaggaataataattgcccttcaaaagttactccgtaatactggagtaatagcaataataacccttcaaaaaaattaataatagcaataatactccctatgccaaccggggcccaccaggaggagtccacgaaccacgatacatagggacccgatacatatgtgtgttgcggtgtgaaccagcttgtgtgcgcgtagcactttctctcatcttctcccggagctcacgccctcgccgcctcggcctcgccaccgccgccgactcgtcggagatggcctcctacccggcgttccaagtgtaatgtgccctctctcctccccctcctcctcctagctcaacccctgaacacgtgctctgtacatatgagcttgattctttatcgcgtcgttttctttgatcgatctggacccatctttgtttggtggattgtgctctggtttcatgttcaatttcatttcttggaagatgctgtgcaagatggaggaatggtttgggatttgaggatttcttgggaacacctccctactttgtttatttccccttcatattataatgggttttaggtttaagaatttttagatctggacatgatcttatatgattaaaatatgggcaaatagcacagaagcatttggtgcatctttgttgtggcacatgaggcattgcattatttgtagtagcactttcaaggtttcaatttttaggggtaactacaccattaaaaccctagatttgtgatattttaaggcgttttatgccacgaatttgtagatctgatcatttacacaaaaccacataaccctagatctgtgagtcttattgggttttagtttgttgtggcacatgaggcattgcattatttgtagtagcactttcaaggtttcaatttttaggggtaactacaccattaaaaccctagatttgtgatattttaaggcgttttatgccacgaatttgtagatctgatcatttacacaaaaccacataaccctagatttgtgagtcttattgggttttagttaataatttgaacatctggatatgaacagcaataattaaaatttgggcaaagtagaaagtgttgtactttgcctatttttagggtagcttgaatggcagcacattcctttggtgttgcataaacccaaccaaaaccatagattgctgatactctaatggggttcacatcaagagtttttagatctggatgtgaaaaatctgatgctaatgttttgccaacacccctgaccgtttgacactaaaatttcttcagtggttaccgttcttctgaaataatctagctagcatgtgccattcttagattgcttacactgcatttgcttgtagatttgtcggattctgatgagctatggttaataatttctgaatctgtacatgaacatgaagggttgaaatttatgtaaagtagcaagggatgtattttttgggcagcatcaatggtggtacattctttgcggtagaatttatcaaaacgtcaactcttaggagtgcataaagccacccaaaagcctatatttctgacgctgtaatggtgtttatgtcaacaatttgttgattaagaagtgaaatctgatgctaatgttttgccaacagtctaccgattgacactaaattccttcagcgattaacgatcattgttttgcaaactaatgtagctaaaccttgtaccttcttcattggcattcactcctaaatcaagtcctaacctgctactgttgctttgctactatctccagaagcccggaggaagcagcgaagggtaaatggtacattgcgactgctgctaccaaccacatgacccgcgaccagagcgtcatctccaacctcaagcccgtgactggccgtgtcgttggtggtggcaacggctcaggattgcaagtgcatggcagtggagctgtgaacacagagacggtggcgatcccagacgtgtggtatgtgccggggatcaattgcaacttggtttctgttggccagctctgtcaactcgggcttgaagtttcgattttccgaggtgtctgcaccgtcactagagctagtgatggatccgtagttggcaaagcgcatagatcaggtgcagtctatgaggtggaattcctcaaagttccgcttaattagcactggaaattcctcgctgcagtatcagttgtggtagtcagactcatatggtggctaatatcgcctactctatcgaatgcttgttgggttagaacttaaatggcacctttcagtagttagttaagaatctggaggttttctgaatgtaattgaatgaatgatgctggttatgttgctgcctatgaccatgagcacagaactgaagaaatgcttaccatgttggtttgaccatgtcttttaccttcctagcttgttaaaattgttaccatctttgttcgaccttatgttttttaccatccttgttaagttcctgtagccttgtgggctgtttatatctgtagccttttcgacgagggaagattgccaactttcgaaagcgccaagaaaaataaccttgtcggtttggaccgacaaaaaatatacctttacttggcggcaatgaaaccgcaaagaatacttattcttggcagtcggaaccccgccaaggaaatttctttggctgttttttttggccgccaaagaaatcactttgccgccggaattttttgctgaattgaagttattttcaagagcatcgtgtactctcgtgaacaaattaaagctgaaaaaagattgtttaccatcagttgatttatgaggttttaaaccggcgatcaaagcggaattagtttggaggaatgagatccactagcagcaattaatgggataagagtattgggatcgggacagggaaatggatgaagggctatgatgaaatgagggagggataatagatggctaggattagaagaaactctttggtgggtgggaaaatatttccccaacccattagccaaacaggccctatatatgtgtgtatatatatatatatgtatatgtatatatatatatatgtatatatgtatatgtatatgtatatatatatatgtatatgtatatatatatatatatatgtgtgtgtgtgtacgcgtcaaacaactaatttggagcgtatttggtggctaactccctttttatgagaacagctgatccgaactaactcgatcgatccagttggcttgcgtcgtcgtacgcgtcgatagtcttcgtcgtcggagatcgatcatggcacctcgcaaaaggtcgcatcctagaaggtaattaacgtgccttaattaattctcctcctcatcctcatcttcatgttcaatgatgcatatatacgtacgtgctctgtatctttagtgctagattgattgcatttaatttgggtttatattagatctcggctactcatttgtttggaggattattgtgccttggttcgaatcttttttgttcttttgtatttaatttgtagtcaaacgctactttgtagctgatttgtgatttctgacatacatgttggaaatgcttgagattggaggctttccagtgaatatacctaggttgtttgtttccttctctttttttttcatgtatattctcagaacttgaacagagaaccctagatttgtgatattataataagttttagtcaagaatttgtagatattgcgcgccatggacatgattgattgaaataatatgggtaaagtagcagctaggtggcatattattttttgggtggcatcaatggtactgcattcttttcggtagcatttctgcacatgtcaattatctatcagttgtggcataacccttaaaggcgcttactccctccgtcccaaaaaaaacgaatataagattggatatgacaaattctagtataacgaatctggacataggtgtgttcaaatctatagtactaggtgtgtcacatccagtactaggttggttttttatgggacggagggagtagacttttttttttttgtcaagaattcaaagatttggacatgaaaaccagatgcaaatattccttcagtaattttaatttgttcttgtaacaattaacctaatccagcctctatcatctcttgattgctatactgcgttcattccaaatccaaatcctaacctgcaactactgtcacttgccatcatctccagaaaaccagaggaaagagcaaatgtcaatgtcagcagtctcaacaacatcttcataagtgcagagcccggagcaacatttcctagatggttcatcacagaagctgctacaaaccacatgaccagcgacaagagcatcttctccgacctcaagcctatggccggccttgtcatcgacgaccgtgccggcgccggcgcagggttgccgatgcacggcattggagctgtgtactcatgggaggtggcgctccaagatgtgtggtatgtgccggggatgagtgcctacattggcttagtttctgctggtcagctcactgcaattggtctcaaaactgagattgcaggagatgtctgcaccatcactagtgctgatggatctgaagttggcaaagggcgtatggttagtgataaaatctttcaggtggatttcctccgagttccgtttaattagttcctgaaatttcattccttggaaaaaaataacttggaatagtttttatgtagtaatttttagtttggagtagttgaaggatctggatgttttttcttctgaatggaattgaagcaacgatgatgattttgtcactgaacaaaaaagttatctagaatggtcttatttggcctctatgagtagaactgaagaactgtttaccatcttgttctggcttgtgttggcttgtgttttaccatcctagcttgtactgcaggttgttaatggctatcattttgcaattgctacggaaagtaatttatctgcttggggggggggggggggggacgtcttccccagctccgcaccacacgatatgcgcagcgattcgtgcgtacacccgaccacagcagggtatttccccgcttgcccgcgtttaacccattttctagctgaccatggaaatacgccttttatacgtgggacccaccttgcagttgtcgctcacgggggagcacttcttcctcctcctccgccggccaacgcctccaccccaatcccattaccatccaagctacatcttcccaacccagggcatgatcactttaatgccaaaaaaaaccttattaaaatttactaaaattttgccaaaattttgtcaggattttttatatagttacaaaaatttggcagcaaattaaatgtagccacttttttgataacttaaccaaaatttggtaaggttgaaaatggcatcaaagtgaacaaacccccagacagctgcggaacgccggctaggaacaacacagccctagccatggcattgtggaaggagatgatagaagagagatggaagtcctgacatgtgggcattgtggaaggagatgatagaagagagatggaagacctgacatgtgggcccaaggcattttagaacttttataccatttctctcctcttcaaccagaaattattattttaatggatgtagtgtccaccaacaaatatctaacttttgagagtgtttttccccaaaagtcacttcgcacgatgtattatagctaaaaccacaaagtcacaatgcggcttccctgttcctatgttgtgttcccctccctgtcactgccagatgtcctccctctattggctgcggcttttctagtggacccaggccattcgctcgttttctttttttaacgcaaacaacgttaacatctggaatggctcgttcctaatcggtgcctaggttgccgaccaatgttccacgcgccaaaggtaggctgtgacatggaagaagcgccggagtggccgacgccgccggaggccgcggtgaccatgacattcaatctgggcagggtgtccagggcggcgctcatcgccttgagcgagcgcggtgacagcctggagagcggcagggatgcacccaccgccgctatggatccatgaagtaaaaaaaaatcttagcgcccaggaaatttcgaagacgctgactccaccgccgaacgcccgaactacatgacttcttcggcgagatcacttgctcatgtgattcttttagcttcctagcacatatcatcttaaattcttaagtattacctgaaatttatgggaacttcctaggcatgcaggaatggccggaccatgcccgaccacccttgtcttcctcattgttctctccaacaaggagatcctcctcatcaacaaatcaacaatggcaagcagctgtcctgtgcttcaacttcttcaccggtaagcagctgtcctgcacgcgcatattgtccatcgatggcaatggcaagcactgaaattgccttgcctgcctaattgccccgcctagggcacgccacagcagtgtaagggaaagaaaacggagattgctgccgtttgcttcaaaaaagaaacggagaggttaagccgtttagatgaaaaaaaggagcgtaaggccctgggcccgctggagaagtgatcgccaatagagcgaggacatctggcaggggacatagatagaaacacagcgtcggaacagggaagccgcatccgtgtccaccaataaatatctaacttttgagagtgtttttcctcaaaagtcacttcgcacgatgtattatagctaaaaccacaaagtcacaatgtcctgtagcaaaatttgatatataagtagtatgtatctcactattcatacatcaatagctaaggtgctagttttgttggcttgttgcactagcacgccctcgagtgtttagttttttttccttcttccacacacgaatcttaaagcgtatccggtggcccaaaatgtgaatgacttcatctcttatttctgtcacgagatatacagaatatgagaataaatatcctctttcggatgtgcatgattttcgaaaagaaatttagatgtgcaagttaaatacacgtgctcttgcacacacggagtttcctgtttcccgtagtttataatccaccaacaaattatctatagaaattactttggttaacccgtagtttttcgtagtttcctaattaacaatgtatttaataatcgaaaatgtcagggataattttttttcgaattctctttgctctaaaataattaacaagacttaaggcggaatattcagagcatcgcaa

SEQ ID NO: 28813 - DNA, 11782 bp, Oryza sativa
aagacttaaggcggaatattcagagcatcgcaattaatgttgctaatttaaattgtcaggatttgaattaataatattttttctctcccgcctttggtcatgaatcatgcctgattcactcctctcttcgttcgcggtttcgttttgcatgacgagccgagtccgagtcagtttccggttccagttccgttcttttcctaaaacagcaccgcatttcttttccggtttggtgaagtcctaatcctaatccagctccctccccctccctttcggccgcgccctccccctctccccctccgagtcggccccctttcccctcctaatccaactccccaccggtcctgccttccctcctattttccctctcatatatatgtcctagtcccccacctttttctaatcttttttttgagccgcaagccgcctccgccctaaaccttagcgccgccgccgccgcttgctgtcccgctgccgtcgccgttgcatcgccggtactccgttctccctctctattggtgcgcttgccgctgcaaccatcaatttatctaatctattccatttgtttctcatctagcgtcgccgtcgtcttcgtgtgttgccgccggaccgccgtcatcatctcctcctcgccggtcgtctcggtttggtgaggaccattcccgtgatctcctggtttaggctttattttttcctagcgttatcgtcgtaaccctaattatttagtcatgctaaaccctagtgttgccgcttcgctgccctagctgcgctgcctctgccgtgcgcctagccaccgcctagccgaggcaccgcagccgccgccttagctgtcgccgccgccgctctcccgcatcgttttcatggttggttcgctgcccatagctcggtagccgagtcgcaaagccgtaggtgcatccctaaactcctaccggcctttcgtttgtcgtaccgagtctttgtcgtaaaccgtgtctagtttactggtttagccgtaatcgttctaagccaccggttccgttcgccggttcggttgaccatttggatggtcctgtgtcatgaagtattggcttgttgagtctttaattcatgagtcatgcttaccggtgatatatttcctttgttctatttatctatgggcaataatatgtaataaatgattaagttttttcagctattactaataaagcagctcatattgtaaaattcataactaaataatccgagctccgttttaatccattcaagttacagtgaatccattaaaatgtatagaatccattaaaattggtttattttgctgtttcagtagccttattgcttgtatttcttgtgtgttttgtttgtcgtttagattccgtcagttccggtgatccagtttattttgaagtggttgccaaggtttcatcagctcaagagcaaggcaagtcatacatacaacattgatcatgttgaacctattttacaaaatcccttgctttctattaaattgcattattttagaatgggatggatgcctatcgtactctacttgttgaatattttatgccattgataaattgggttataattgactagatgattgggttaggaatgcttagccatgcttagattaattagctcacaattggattcattataatttagtccttaattatattatgatgtaccaccatggttatggtttaattaaactaaaatatactttaatggtgggttgtgggtacatgcatgattttggaagtcgtgcccataacaattaaggaccggttctcaagaatccctggaagatatactcgtacttaccacatgccagcgtgggctccatgctaaatctagagtataacttaaactagctgacatatcatggcaagggtagaggcgatggtgcagttcggacctgtattttggtctttgttgcttccgaatttacctatgcatgagaggggactgcccgacttggcacaaggagagggtgaaacctgaggtggttatgttcggttagggaaggttatatgacggtttttgtcacggtttcccctttgcagtatcgtggcggtacttcggggcatggtaacatgtgtggaattatgtcttgtgggtaaaattgtacacctctgattagagttaaaactattcgaatagccgttcccgcggttgttgggcggtcaaccagctcaccatgattagtttcactataataatttgacctatagaactggtgtagttcaggtagtttggttgggcctgttgcaacgtggttttagcattggacaatgatgatttaatatttcttaattatatacttcccccgtcccataaaaaaccaacctagcactggatgtgacatatcctagtacaacgaatctggacgaggaggggggggtaatgttttacttattcaaaatatgatttataaatgctgcttttactgcaaatatccaatgagccattcctttgagaataccttgcatcatgccttcccgttggtatgacttgttgagtatggtggttggtactcagtcttgctttatcccccccccacagaagcagagattggttcagatggtgagttctattaggattgagcttgttcaggacgtcgaggatttcctgtggtttatggaggaagcttcttttggttgtgaagattaagtctagtttttttcttgtttttccgctgcgtttgtgagttttattttattatttttgtaagatgtggaactgtttatcaaattgtcatttgtatactctggctagtcttggatagagatttagggtgtgtttagttcgtgaaaagaaaatttttgggtgtcacatcggatgtttgactagatgttggaaggggtttttggacacgaatgaaaaaactaatttcataactcgtctggaaaccgcgaaacgaatcttttgagcctaattaaactgtcattagcacatatgggttactatagcactttgttgacggtcgttacagacaaatttcgaccaccaatataactaaaatgatagagaattagctatgcttacaatgcatgtttgttttcaaataatatagttccacttgtacttggagaataacatattgcaggaatttatcaaagaaaataaagagaaagtgaagaaacctcactcctacgcaagcaaatggataagatgggcccacaagtcaggtgtaaccgtcggaaaccgaccttaactgccacaaccgcctaaaggactcatctgtcagccactgtaccgaagctggaggcctgttgggccagcataggttcggccaaacccgagggttgcccaatcagcctggccctccacgtgtgtgctccggatgcactctcaatgatggttgtgagggtaaaatggacatttcgcatggctacaaccgtcatactgaccctataaaaggaggagctcacttcacttatcaacacactcaagcaagctcaattcctcttcatactttagtagtagtagtagtatagtgctaagtggagtagtatagaatagtgttcagaagtcctcggagtcttcggaagaatttcggtatggctgtggtagctcttgtaatctcttatgtaatactttccgaattaatgaaacactcttctttatatatcttcggtactttgcttagtttgagtactggtcttactttatatcatcattatattaattgtatgggtagcataccagagagctgtaatggtgtaggtttaatgtctgatttattagttgctctatgtcgggtgcacaggtatagagtagtgtttagtaatgtaagcatggtgcttagattattaaatatcattaattgagcatatatgttgtgggacagtagagatgggccgctgatggtgacagctcagtacgggtattcctccacgttagtatatattcctaagacaaatttctggggagggcattccttcgtatttagccccggttggacggccatgataggttgtcgtaagaaactcagcaacccagggtggtctctcgaagtatcaggacactgttagaggatattggccacatgattgtatattagcatatgtaaactaggatttgagtatatactagaagtataggaattgaatgctttctatttcttcttccacttagttagacttatttgattatgaggatttgatcagctttgcttcgtgtcactctacccttatattgcacttaacccatgtttaggctttgatgattataagtaatatatgtataaagtgcattagcaaacttcactcttattatcctcccttgggattaaaaatacgatacctcaaaatacttccgggtgaaatgctacaatgatatatccgtgcgcttgcggattacttctgtaactataaatataccatgactatttccggcgccattgctgggaatgaagatttctagtaatatcgttaagaaataccaacacacttatggctaatcatggactaattaggctcaaaaaattcgtctcgcgatttccatgtaaactgtgcaattattttttatttttatctatatttaatgctctatgcatgtgtctaaagatttgatatgatgtttttggaaaaaaaatatttgggaactaaaccatgccttaatacacatcctacttgaaattcgggttagtgaatttctaggcgtgacatggtcttcctgaataaacaatgcatcagattgtttgcgttaaatcacctccaaagattaagacatggtctttctgaattaacacataagcaggcagtttaatctggactcgaccggcaatgtaaggctcttcttgaaattttgaacagttcacattagtgttaatatatttatgtcagtttgaataagagaagcaaaccaaggatgcagatcagttgagctgacatgtgacgctgagctgtgcaaggccatgtgccagacgctccaataagattaggtccaacttatcaataattagctaggttgttgagttaattaatcctatcttacttagagttataacccaataatcctaaaactcaagtactcgacatgcaaacatgctacttcatcattcactggcaacctaaaacttaatatgcaaacatgccatctcatcatccactagcaataattacatagaaaacttatgcaagcatgcaacatcatctataattcattgaattctacaaatcaacatccaatcatcttcattcacattatttttcataatatttttaacatatatatatatatctatcataattaaagtgcgggatattatatttcatctacaatctcatatagagttactaaatgtattgtatttctctctgaacatagttttataaatcagttttatttgttgttaataactaatataattttttatttttagctcgatatattattaaaaaaattaaaagttatttagaaatttccatagcaaaacgcggggaatcacctagttatttaagttgctcttcccgatggactgccacaacggacttgcctaggaagacttacaatacgatatgactcgaagctttggtagtgtatatagggtctctttggatcccaccctaaaattttacaccctatcacatcgaacgcttgaacacctgcatgaagtattaaatataggctaaaacaataactaattgcaccgattgcgactactttgcgagatgaatcttttaagcctaattgttctatgatttgacaatgtggtgctgcagtaaacatgtgctaatgacagattaattagacttaataaattcgtctcgcggtttactggcggatactgtaattagtttttttattagtgtccgaacaacccatgtgacatcctatataatacccgatgtgatacgccaaactttacacactgatctaaataccccctatacggttgtgactatgttttaagttatagtggctataaatatttcttcctccgatttcataactgtatattttagacaaagacacgatttacaaaaatttctttgactatgatatatataaagtaagtaaatgtttattttattaaaatgattttttaagactaatctatacatcttggtttagtgaatttaaaaatatttaagtcattgatagttaaagttttaattgtttgacctcggaagctgcatggaagacacgtgaggctatgaagaggacagacagctgcaccgaatataagaagtgtttgcggaagctgcatttaaggcaataattagtggttaggtgacgagaggtcccaacacaacacttcaactcttattagttctgaaacttgattctggacttcatctttcagaaagagaaaggcatgaaaattttgagagttttgaggcctcataggattctcacatagatatgcctttgctcttgaagttctttcttcctgaagttctgtttcgtcacagacatgagtaaaagggcgtaagagttatttccagctggcctctagtgtgaacatgcctattcggttttgagaaatttcacaggaatttttaaggaattgaactatttcctacgaaaatcttgtaaaattcatgtattccgaaggaggcttcaacattctagggatggccaagaagtaagcaatacaagttttgctaaccatcatgacatggattgattatccaatatacaccgacaggtatgcaaactaaaccaatcgtgaatcgtctttcctaacatagagttgcaagtttgtattcgtacttctcacttctttttccttctgaagtgagtttcttttttttttcttcttaagtgagttatatctgttggtgatgctcttatggtcaatcttaggattgtaacctatatgttggtgatgctcttatggtcaatcttccagtctagatgttttttttccctggggatttcagtgctaacttgaggtttcctcccatccttagaaggtatataccttcttaccacctatatatggtagttatattttcagctcaagctagctttgcataaatatttccttgcaacacatggtaggagtatttgtgactgcgaattaatacactatacttgttcttatcctataatctcgtcctattgtagaaccagactcaaagtgctagcaattgcaattaatggctgaggctgtgattcttctaaccgtgaagaagattggtgttgccctggggaatgaagcaataaaccaagccacatcatatttcaaaaaatctgtcacacagctgacagagcttcaaggtagcatggggcgcatcaggagggaactccggcttatgcatgagtttttttccggaatggatgttcgtaatcgcaacaaccggaagtatgaaatctgggtggaggaggtgaggatgctagtctatcagatcgaggacattgtggataattacttgcatcttgttggccacaagcatcacattggatggggtacctatctgaagaaaggattcaggagaccaaatgttctgctctctttgaacaagatagcgtcattggttaaggacgtggaggccagtttagtgcacttgttccaggccaaagaacgatgggtgtttatggatgtcggtgcggctactggtggtgaaagctcaagctacattgttgttgagaagtcccggcatctagctagcatttcacgctccctcgatgaagaagatcttgtgggggtggatgaaaacaaaaaaaaactccacgagtggctgtcaagtaatgagttgcaacgtgatgtgatagtggtgcatgggatgggaggtctgggtaaaacagctttggcagcaaatgtacagaagtgaaaaagagaagtttgaatgccatgcctgggtctccatctctcaaacttactccatcaaggccgttctaaaatgtttgatcaatgaactagatgagaaaaagagtattcggggtaacattagcgacatggataccggaggtcttcaagatgaactaaagaaattcttaaaggatcagaaatatttgatcgtattggatgatgtttgggtaccagaagcagtcaatgacttgttcggagcacttgtctcaaatctcagcaggagcagagttcttgtgacaacacgcattgatggtgttgctcaccttgctttcccagacaagaggataacactaaagccgctatcagaacaagaatcatgggaactcttctgtaggacggcttttccaagagacaaagacaatgagtgccccgcagagctgatgacattagcaaaacaaatagttagcaaatgccaagggatacctcttgcaattgtttctgttggaagggttctgtttgtgtgtgaaaagactgaagaggaattcaagcgcatacataaccagcttgactgggagctagtcaacaacccaagccttgaacacgtcaggaatatcctttacttgagctacatctatcttccgacacatctgaaaagttgcttcttgtattgtagtttgtttccggaggactatctttttacaagaaagaggcttgtaagatggtggatagcagaggggttcgtggagaagaggggcataagcacaatggaggaagtggcagaagggtatatcaaggaattggtttacaggaacatgctacagcttgttcagaagaactcatttggtaggatgaaatcattcagaatgcatgatatcttacatgagttggcagttgatttgtgccgaagagagtgtttcggtcattcatacaattccaagaataaacatgaagagtttcttgagaaggatgaacgccggatggtaatacacaaattagacaaggatgttaaccaagccatttcaagtgaatggagcagacttcggtctttcgtcacattggaaagaaatatgtcatcacccaacttgctaactctggtagcgggcaagtgcagatatatgtcagtactagagttaattgggctgcccaaagacaacattccaaatgtcatcggtgatctgtttaacctcaaacatcttagcttgcgggattccatggtgaaattcctcccaaattctattgagaagctttccaacttgatgacactagacctttgtaaatcggaaatacaagagctacctggcgggatagttaagctaaagaaacttcgacacttgtttgctgagaaattgaacggtaagttttggcgagatttccagtggagcactggtgtacgcatccacaggggactggagatgctaagcgagctacagacgctgcaagcactggaggtgcaagatgaacgatctgtgaggagcttaagggagctgaggcagatgagaagcattaggatattgggtgttaagggaaggtactttgaagacctctgcgagtccctatgtcagatggaatatctttccttgttaaacatcgcagcaagtgatgaggaagaggtcctccaattgaatggtctgaagtggttgcatccaaacgttaaaaagctaagattgattgggcgattggcacaaacaggactgctgtcgtgtgcacctgaagcagggagtcactcattgtgttcattatgtctattttggtcacagttagcagaggacccactgccatccctgtctcggtggtcgaatttgacggactttaggctgacgagagcatatctcgttgaacatgtggttttcctcccaggatggttccctaggctcaagacactctatttggtagacatgcctaatctgaagaggctgaagatacaccaaggctccataacaagcctggaggaactacatctaataaacctccgtggcatgacagaggtcccatctgacatcatcttcctcctgcccaccctcaagtatctgtacttcctggagatcacttgggacttcttcatggcgttgcgccgctctagaattggcagtatccgatggcgatacagtctagcttctgatgcgcgcctctgatgcatgaatggatgaggggatgataaatggatagatgcaggccgcgtgcatcgaaccgttaggagtgcctcacctcatcgaccgaccgtggttgcatctgctgcctgcatgcatgtgagcttattcaactcgtattgcctactttattatggcttaatttgctatcgttttaattacaactacgtacctctactactagttcagtggctcagtgcttgcaaaaatatttccattgtgattactagacattcctgtgattgaatctatttcgttcctgcccaagtttaactgtaatattcagtaatagtacaactcacactgtataagcatgcatttaatttctcacacatttatgcagtgtagctagctgttgctagctagtagaaataaaaggaaccaatttttttagagcaattttatattctttgaagaggtaccataagctactaaaaatttagtgtaaaatttagtacctcatagtatcaaggggtaccaaatatagtaccagatcgtatcgtcttctttccctgctttgttcttgttctacggtttgaacgttttaccggaaggagatagagggaaaagtgtaggtatggttgagggttgaataggagactagatcacatggtcgacgatataaatctcttgctggaaataaaatataaatttcaacagaattaaggtaggagtttttacgtattcgttggaataaaatgtaaatgtagaaaaaaatcacataattaggccaataatgtgttataataacacaatgtaaatctagactccaatacaacataaatctataataaaccacgcaaaacagaaaattaaaccctagtgccgtggtaaacgtacaacataaatctacaagaaaccacgcaaaataggaaattaaaccatgcagagagaggttttacaatgttaatgcgtaccgttatacctatgcggtaccttttataatttgggagacaattctaccatttttctctctactagcataatttctactagcaaaattttgtttttacccttagtacctaagtacctatattaatacttaaataccttaacatggtaccggtgattgaggagcgttggatctttacctttttggaatgcaaacaccgtaaaacctctcattgctcaatatacaatagaaaaagggcaaaatttgtcacaggacacgcaaaaaacgtgtaattggctgagagacaccgcgaaaatgtgacacggctcatggacactaaaaaaacgtgtaattggccgtaggacaccggtcgtattattttattatttccgggtaaaaaaaggtgagatatttatctaaatgcctagattgccctttctcttaccttctttaaataccggtgggtcccacatgtcatggatagcgtatgtttaatctaatttttaataggtttttaaccacctgggcccacgagtcatggactaatttattcgtaattagtagggtgattactatttgctaatcataagtggggtccacatctctcttctatcctcttcttcctcacgcacgaggcggagcggaggaacgacgcgacggcccgagccgggacggctcggcgcgcagcggaaaaagcggcggcgctctgctagggtctcaccgccggcgatggcgaggcgcgacggccaccatacgcacggcgcgacggacaggtgcgttgttgtaacaccctgaaaattcgaccaacaaaaatcaaagttccaaaaatatgggccttcaaaaactttttaaataaattgcatcatgccgattttgttcgattattttattggattttgatttcggagtatgttgatcgcgaataaagaatagttaattaggaataaaccctggaagtaaattggtaaaataaatataatttaaaataaatattaggtgtgg

SEQ ID NO: 28814 - DNA, 5752 bp, Oryza sativa
agggagattaaaaaggtctagaaaatttaaaataattagaatttaattatagattaattatagtcgtagaattgcaaagtttcatataaattatggattattgttgggtaatctctataagtaatcgattcacggtagaaattcggatttaattactagggattttagccgtgtaatatatttaatcatttagtcatagactaaattaaatcgtataatatttctaggattttgtccgatttttagctcgcgatagaaatttctaacctattatatggatataatgctcgagtagattaaattaaaaacttatgacaacaaatatttatacccgcaaaatagtttaattcgaaattgggtttgccttagttcgcgaatagtaaagttaatataaaggaattgactttcgcattcgactttcatttggatttatttggatttttatttgaattctaaccgaattcaaatcaattttcgcacgtaactatagagcccgagggagccgcggatctaggtgaaggccaagactcgcaagacctcgagcaaggcaagtcaacactattctttgaacatgttgatcccaattgcgaaattgttttgtttacaaataaaattgcatgcaattatgaacatcctacttgtgattataccatgccttgattattgttcacctttaaatctttgtaaccatagatacgtacgagtccctagtcaactatgacacttgcttagaaatgctattttagattcatgcatactcatatttatcaaatgctatatgcttgggcaattacctttgggaaggtaattgagatgcggcatgtggagacatgagcgccacattgccatgatattgatgacatgatttgtgaaaggaaaataaagtaaaacaactgttttcgactggggcggttggaggacttgggtggtatccggaaaaggctagtgtcgtccctggtcaattaaggaccgagccatgaagttaagcatgaaacgacccccgtacaaccgcacttctcgtatgggtatagacctagcggagtagatagctgagcggaggcagtatccatgcatagtggtttcttgatgtgtgaggcaggggctctacgatggggcagccattggtaggaccgcaaggcgggtgtctacagtggtgtcgccatcggtaggactgccatgtgagaatctaaaacataattataacttaatgcatgtgtgagtcttctcttcccgggtgcgccagaactcctctcactgctagaaaccgtgtacgcctagagtgcatgaggatgaaaagttcatagagcgggtactgccaatgcgaggttatcgaaaagctttgccgtgacgcgtctcatgtgttgggacgaggctcatgtgttgggcagtcgcggagtgcgggtaaagtgtacatccactgcagtgtgagtaaaccaaatctattcgaatagccgtgctcgcggttattgagcaccgggacatgtattacacttggctagaatctaaattcttaacttgtgtgggaggggatattgcatgatgaattttatactgttggagccacttcctgagaggcgggaacgtggacgtcctcagaaaaccatgacgaatcaatggcgggaagctatccttgggatcacaatggatggtggacagaaccgtcgttgtttaaatacaaactctggtactaaaatttgatcagtcaatgctaggtcttaggcttgtgaaaagaattacaaaacttgctttgtgcaaaagaactatggccatcctttgaactccccctttcatatgcattgttgctgtggtggcttgttgagtacggttggtactcacccttgcaaatataaaattaatcagaagcgggcgatgaagctacggaggatccctatgcctactaccaggagggagacgaagacgatggtgcccagtaggtcttagtacggtcgttgcctgtggcaatggcatgccgctgcctaaattccactgccttatctaaactctgcttttggttgtattccagaccgctcggtctgatgatttaagacaatgcctgcgggcttatgttgtaataattcgtactagactctcgtatatgagcatttggtattccagctatgaattcgtgtgtaccagactacttgatccagggaaatggtacggtttacacgattgattcctgttataaaaacgggggtccacagtcgtggcggacaggtgcgcggcggcggcgggcagctgctggtgcggctacggcgtcggtggcgcagacttggccaagctctgcggcggcggcggcgttgcagagcggctgcagcagcgggtggtggtggcgagcggctccatcgccattgtgatttgtgcattgcatttgatcgatttgttgccgttgattggtttcttgttgatgtgtgtgcaggtttgaggtggatccatggcgacgggtcggtggagaacaggagctgcagaccgtggcctgcggcggcagcgacggcgccgtggggctcagcttcgagacgcaccacggcggcggcgtggcaccttcgccggagttcgcggcgtgcgcggcgagctcctgcagcgcggaaatcatggtgttgctgctcttgcagcgcggcgagctcctggtgcaccatgaccggccgagccatcaccaccgccgtcgcttcccaacgccgcaaccagccgaagccgccgccgcagttgaagttggatggggatttcaggtactgaggctgagggcattttcgtccttttgaaatttctctctcctctttttcaccgaaaataataaaatattgtctcgggtgtcctacagctaattacacaaattttgtagtatccattggcagtgtcgcgttttttgagtgtcttctagctaattacatgatttttggatatcctgtggcaaattttgtctagaaaaagtggtacctcatggtagctttttaaggacggtaaaattactcaaagctgaagtacagctgatccttgacaaattagcaaagaaagttgctggctgaaaaccaaagatgctatccatctacggcagactttgtttgatcaaaacagtgctcatgtatgcatgtatgtgctcagattcctcaaggtccttgtgtaatcgtcattacaaatgacgtatgggctcgatcgagaactacatgcgtacattttttttaggattagcagcgatagactgcatttatttcttcagactttgggatttaacttgacgggcaccatgagaatgatagtgcagtcgtaaggggtgatggttttaaccccgagatcacgtgtttaattcgttggatggtaaaattactctaaatcctaatgctgcatgtcccctgcctctctgaatggttttcttctacatgcattaatgaatcgactgttgattcttacagttacagtttgccattgaccattgtaattgtaatgcttaaatgcaggagattcagtgatcggtgcctttgtctgcagtttgttcacgagagaaaaaaagagcaaacaatcatgggcactgttcaatccctgaggtaaatcaagtgattcagattgactttgagcatcagcgtcagagagccacagatgaggcaaccttcgccttctattgatcctctgtctgttgcagcgattcagacttgacagtttcagactttcagagtctttttggatgcgtaaatataattaccagcacaagctttcttcgttgctacatgaacgagaacgggctgtgtttcatgctgaattgctggagattcagacattgaacatgtcacgtaacgtacgtcggaagcaacaaggcaaaagaacacgtacgtttcagattgcattggaaagctcttctctgctgcctctagtacgcaatcatggagtagttaactggaggggaacactttgtgcaacaatactagcacaaagccaattcagtaaccgcgtttattaacaaacccaaattatgtatgcatgtttatttattgagttggcaccaaactccaaacatatcgacgaactttacatggaacatgatcaattataactaattaagaagcgtatcgccgttttgattcttgacaccactgggaactgatgctgtgacgttcatacagcagcataccgtaggggtgacgcctggcttgcagtagtattctaatctgtctccgtatatcttcttgcacgtctcgtcagtgcacgctaaatctcctaggtcattgcacgtttgtctagctgcaaaaacgcaattcagttcaaccatccatgattcatgagccactaattgcaaactaaattaaaagaggggggaaaaaggcatatcatgaacccctcaaattatacagagaaaacatattcagtgtagtttggatattttttaaaaaatgcagagtaaaattaatagctttgctgcatacgtgttaatgcatagcaggatgagaaggtggaatctgccacgatcagaagaagcatgaagaaaaccacagagatggaggacaccatcctccttgcaactgccattattaagaagataattaagttctcctcctatatgtatttatgattttccactcttcaagttcactgtgctcgttgccatggccctctgctcatgtttatatatatgcacaaccaacttaatcttggagatgtactgatggtttcttgcatttatgccatctcctgcacaatttattgtttttgttccatttacatattattgttgtagttttagatagattaaacatcccaaatctttacacattttattgttttttccatttacatattattgttgtagttttagatatatgttccaacattaaatgacataacttccttaagaaacattaaatgactttatatcttgtataatttattgctgtcatatcgttctatacatatatttgtatacgacaataatatttttggtggatgtgctaaatctgcaaaacatttgtatatgtacaaatacatgcttgttgccctcaaggttccataaaactgacaaaaaccattcggttttcacgaaatattgaggtttcaaaccagcttgagtaacaaaccgcttggttttcacaaatttttgagatttcgagcctacttgggttgacaaaccgctcaataaacagccaaattgaaaaaaattaaatcaaactagattccactttttttaaaaaaaaatctataactctggttttcacttttttcgcgaacatgtaaaagaattgcacgtcaatatatttgaagaaaaacaatgtttttgttacacaacgcaatgcaaccgcccaggcggccagcccgagggcaaggaaacaagagaattgaaaaaaacaaagactgctagtgtaaagagagcgttgctcctgtatagaggagaagttttacggtatttgcattccagaaatagtaaaaatccaacgctccataataaaaggtatcatacaaaaagtatttaagtattaatataggtacttaggtagaaagggtaaaatgataatttgctagaagatgaaaaatggtagaattgtctatagtattagttgtaggtacataggtaccgcatcagtagttcatcaccaaatatgcggtaagtcatctccatcgcctctaattttccattatattatttgcattgtatttttttatatttgcatattgtcgtgcccttttcccgtggctgtctctaccagttttaattttttttcttagtagcgacaaaataatgaaaatgtagatgagcctatactatgtaaat

SEQ ID NO: 28815 - DNA, 16354 bp, Oryza sativa
ttaggaaaaagcttacgtggaacattaggaaggttgaagtatccaaaaggggcactgatcagcatccccctgcataacacatgaatgcatcaaaactacagttaattcaacaatagggaataacaaggggaaaagctgggggtattggtcataatatctctcctgatgacagagtaaccagctcagctgttctgttcagtgtttaaatggagaaggatggactcgataaaaaacgatgttggataatggagggaaagcttttattttcggttcatcgagatatacatgtattttgtggtccttaagcatcatctggtggaggaaaaagggtcttgcacacaatcattgctgatgtgaaattcagttaaggtaggctgtaaccatcagggagactaaatttgctgaatatacacacagtcagactggtactcctaccatctacccattgatccattcattgattcctgctcaataagaaggttgatgtgctgataatgagctgcatggaagttgcagaacctaatagaagattaccggaacaaactaaaagtacagttatgtagttcttatactgccatttctttgggattattgtcatatctgttatagtcgatattacaaagtactagatcctttcatcctcaagaccgagatctagtaaagcaaaagatatatatctatgtacacaatagcatgccaaaaaatgggcgcaatctgaatccagagtatataaaatcacataccttgcatcaaacaaccgaagcgtccaaataattttggcatccatacattatcactatgtccaattgtagacaaacgtagatggatcaaattcccgatgcaacctgggatgcttggtacaaatgaatcagtccaatctacaacacgaagataaggaaatctcttgaaaaatgaattatcaactctgagtgttttctcataagaagttttccatgtccttactttatattgcacctcgtccatgctaggtaacattaccatgttcttatctgtgacgactgaaacacgtcgaagtttagacacagtgttacctaccaatgattctgggtttccaacaaaacattcttcccttgacaaataacaagcaagctgccttaaaagatcatgcattttgcagctgctgtggtcataatataaaccatctggttgaagaaggttccggtggatcagctcatagtaatactcgtctgctgtttcttctagtagttgacctccatggtcctctataaagccttcagcgatccacatccttgtaagatcatcacggtaaatgtttgcatcttcaggatatacactacaataaagaaagcattgcttcaaatgatgtggtaactcatcgtaactcagatataaagcacctctcaaatcatttggaaggttgttcatgaaccaagcatttttgctcaatatttttttccattcgttctctgtttgttctttactcgctaacactctagcaataaccttgattgcaagaggaaggcaaccacatttgcgaacaatctcaatcccaacatcctgcagagtttgcaattctatgctttcactgatattcatgctcttccaaagtaactcccaccctacgtcggttgacatcaaatcaactcgataagtatggtccactccgatttctaaggcaacaatattatttctagttgttatgagaattgctcccatttctgcagcatgcaacggaattcttaataaatttgtccatgcgtcagattgccacatgtcatccaactcaaggaaaaaacttgtctccttaattgctatttcaagcttgctctggagctctccaattgattcatcttgatcatgatgaacttccataattcgaagaagttctctcaaaagagaagcttcagagtacactttggaaacacaaacccaggcttttttgttgaaacttccttttatttttctatcattgtatattttctgagctaatgttgtcttaccaactcccccagtcccaacaattgcaagcttataaagttttctccccttatgttcaagcactaaatctaccatttttctgcaggcatgtatgatctccttgccaacaatgttgggctcaagtaggtgggaactttttctcactctcaatactgaactgcttccagtaggaaccgtactcttgagtgtcaaaaatactctgtccttcgaaatgttttctatcttcctgttgagacttctaatcttcacagcaacctcatgacgtgcctgaacattagaaaagcaagtggaaattgacaggccagtgcaagcaattgacttccttgatgacgatgaaggatgatcagttagtagaatgcttcccttaaatctagccaagtcaataatatcatcaacatcatatagaacttctcttagctgaccaagccaattgtcaactgctgactcttccatcctcctttcctcagcatcactaatacaacaatgtatgagttcagtcttccgctgcaactctgcgagctcttcttgtatccctagaataagtatcacctcttcagtaataatctctttcaacttattggcacatgatccaaccaaagaatctaatatggttgccataggaaaaatcagcaagggagatccacttttaacgtttcagaaagtgacagcattgtaggttggcaaggaatgcacgatatctgttagcatgatctgaaaaatatataatgttcactaaaccttttgtattgataaaatagacatccatgggtataactactgaattgccatttatattaatacaataattagcttatcatacttaaactaaagttctagggacaaatcatgcacagtatgaggtacataaccaacactaaaagtattacattcttatcatgtgaggtattcatagaagtatgttttttttctgtgtagtgtagtgtatctactcttaatatgggactacaactaaagaatggtttatcttttacaattacataattgtatataggactggtgagaataagactaactaattaacagcaaacaatacacagtctaacatactaaaatgaacggaagaaggcaattatttcataaaatcatattcgatactaaccgctgtaaatttcatatagtgcagtgatccctctacccctatttggttggtgtgcaaagttccaattcatcttggatgatgatatcatggtgacttggcgagggcatcatgtggatggtaagaactagaactagaacatattaaatctgaaagaactagaacaatgggattacctttagacagcttcttgggtcaacgggcaacgacgaagaagaaatgggcaacaagttgagaggttttgcttaagcatggaaggcgaagtgttgctgggtgtgaggctgaaatgagccggatcaacgtcttctgctggagtacaagaagaagatgactgagtgagccaacgtctcgatcgactccaaccatgacaggaagcaggaattgaacaagggaaagcagaagatatattaagtccatatggcaaagaagaaagactcaccccagtccccagaggccttaggtgcgtacagccacagcatcaccggctgcaaggaagacgatgagcacgttcctggtgatatactggacctagattatgcagtggcagagaggagaagacggatatgaaattggtgcagctcgtttagtttggagtattcacagcctttagcagtgctggacatgacaaaagatgctgttaggtgatatgccctgtctgtcgcagtgtgcattaggagtttgtttttcgccaaattgcagaaaagacaattcatcggttttgacattccagaagccaccgttcctctattgtctatatagggtctgctacataattttctccatcatgctaataaaaagattcccatgtctcattaaagaaaatattaggagtgaaatctgttgtgtcatttcttgacatgacatgatgctggtacaaagttatcattgtttatatctttctgaaagtattttattttcatatgtctggcaaaagtacgctggccgattattaagtgaggagaagtttttagtacatgtatacagcaagcatggttattaagacatccctagccgcagcaacctccccacagagcaacttgcaggaggtcaccagaatctttccaaaatctatcatattattaaagaaatagaaaaagaagcctccacgttcactctcatggcctagaaattctcacattaatcagagaaaaagaaaaagcagagtccatgtagaaatacaatttagaaataactgaaattcggaattaaaaaataagtaatattagaagaggagactagagtctatatagaaatacaatttagaaatagttgaaattcagaattaaaaaataaggaatattagaaatggagtatagagtccatatagaaatacaattaggaaataactgaaattcggaattaaaaataaggaatattagaagtagagcatagagtcagtatagaaatacaattagcaaataactgaaattcggaattaaaaataaggaatattggaagtagagtatagagtcaatatagaaatacaattagcaaatcactgaaattcggaattaaaaataagcaatattagaagtggagtatagagtccatataaaaatacaattaggaaataatagaaattcgaaattaaaaataaggaatattagaagtggagtatagagtccatatagaaatacaattaggaaataatacaattttggaattaaaaataaggaatattagaagtagagtatagagtccatatagaaatacaattaagaaaaaaaatagaaattcagaattaaaaaaaggaatattagaagttgattatagagtccatactggaattttaaactaactaaaatttggaataaacagaataaaattaaaagtatagtttagagtccgtataaacatacaatttacaaataactaaaatttgaaattaagaaaaatatgggaagaagagtttaaagtcaatataggaatacaatttagaagtaactgaaattcgaaattaaaaattaaagaatattgaaagatgagtttagagtccatataggaatacaattagaaataataaaaattcagaaataaaaataaataatattggaagaagagcatagagtctatatagaaatacaatttacagaaaaattcggaattaccgcgaaatctgcgcgggccaccatgctagttatgattgaaacagagtagtgcatctcatcttcaaaggattttgggtggcaactggcaccgctcatcacccctaactaggggtgaaaacggtacggaaacggacggaaaccatctttattattttcgttttcatattttttttcggaatcggaatcggaaacctcggatacgaaaacggaatcgaatattatcgaaaccgaaaacggagcgaaaacgaacaggcgcgaatatggtaacgaaaatttatcggaataaaaaaacccctcaaactaataaatccaattgaataaattatctatgtttgaaagagtaatgttgtcgataaatcccaatgtaggacaaaaaatattcttctgtaattttagatttgcataacaaatattttttaaaaaaataacagccaaacaccatggtattcactatttagcgcttaaaaaaagaatccagggtatttcagtccaaaatttctggtaattccgagaaaatttccggaaattccgagaaaatttccggaaagtttccgaccgataccgagttccaacggaaactgcccttttcatttccgattccgtttctgagaaaatatttccgatttcgtttccgtttccgaaaaattccgaaaaaattccgaccgaccgattccgttttcgaaaataagtccggaatccggaaagtttccgtaccgttttcacccctacccctaacgctgtcaacttttccagttgaacacaatcccagtttcatgtactcgtatctgtactgtataacatcaataggttctgaagcttaaacggcagtacggcatctctgcatcattgaacgctacagaccaacagaggaacacgaactcaactgctatcgaccaaaatttcttcgttccagcgatccaaaaccacagcctctctctgcaccgttcgatcatatacaggcggctgagattagacgcgcctcggaatccgtgggccgattttcgtttaggccctcgtattatctcgtgttgtcgtgtcgttgtacaagggaggaagagatgtcgagacgccgccgccgctgccgccggcgatgaggagaagggaaccgggcgttgcccctggcgcggcctctccactgcaatgttcacaaagataccccgaattattactccatctgcaactacacattctgttaatcacagttggcatctgaaccgaaaccgagaattattttttttgagaatatgcagaacttgcgttagttgagtatcttttgtattaactctgaactctgaataaactagttggtttggttgtgatcgataatcctgacctggaagaagacagcttcgccgtggccgcaggcggcgcaccggacggacttggtgcggggcagggtggggtcgccggcgacgtcctggagcacctgggtgaaatccccgggcggtgtggtgcaccacgttatggtacgcgcagtagctctactgccagctacctcctgtgattcagggaattgcaagttcagtcaagcaatgcagtgacattgccatcctaaactgttagtactttttagctcaagaatgaacctgaatcaaccaaacaagggcactagctccgtagtaagatctaactgatgttgtgttctggcctatatgacagtggtaacgcagttgtttcttttacaggaaaaaaaaaaggctaacagttggaactgatttctggaacatggctgtgtcctatctgcttcttgctgaccttccccctcctcgctgaattgtacctgttttttttttctagaagctgcaggcaactgagatgatctctctcaagaaggcgattaaaagatgagaaagatcaaatctttgtagtatctccaagtgtctggagaacagaatctcacttggccttcctgacgccaaccagttctctgcttaggcatgcatttgcattgtgaaagagctggttgacagagacaacggcagaggtttctatgagaattcggggcttatttccagtcctgttgcatacttgggatcaaaacttttagcgttgaatccaatggacaggtttcacgagtaaacatacagaaatatttctcatcaaatattggagtttacaggagtaattgtttacaagtatacttgttttcatgcgtttttgtgtatctggccaaactttgtacgtactgctaacaaacagtgaatgatttcctttgcctaacttgtgtctcaattctcaactctcaaacagcaggatgcaaggactgagagggggatgaactggtgcatgtgtctatcccaattgattttactgggaaactacttcactgtgtttggtccatatgtggggagtactgttgtatcttttgataatagaatcagatttgtccaacagatacagtttggctgaagtgctgaactgaatcttgtctgcacatctatctacaagctacttgcatttaccatttagaaagcatatggattgcgacttcaacgggaagcattgatctaacattctcccaaacagagatagtataggttgattcaggtcttgagatgatgtgaatcactgaactctacagagtacagaccaacaaaggaacacgaactcaactgctatcaaccaaaatctcttcgttccagcgatccaaaacctcagcctctctgcaccgctcgatcttatacaggtggcttagatttaagcatgcctgtgactgtgaatcgagggtttattttcatataggccctcgagttatctcgtattgttgtcgtcatgatcgacggtgacccggcggcggcgggatcttctgcgatagcctgtggaggcgctggcgatgtcggcggatgcgggtcactggcggcagcaagtggaggtgcgaggtgaggatgaggacggtgaggtggctttgcgttcaacagcagtggctgtggtggtggtggccatgactacggtcaccggaggcatggcggcctcggacggcaagacgagggcgtgggagatggctacatttggccggcgcgacatcgtttggtagaggggtcggtgaccggcttggcacgagaagcgcggccgatggagggaggccggattggcgcgagaggcgcgtccgatggagggaggccggattggcgcgagaggcgtgtccggtggaggaggccggcttggcgcgagaggcgcggctgacggtggaggaggcgacctaggtgtgaggagaatctgctggtgggtgtggcgcgatcttcggcgctcgaaggctagccgactggggacaccagtgcaggggtcccacaggtcggcagagcttgtatggtggtggggcatcagtgcgtcagccgtggatttgcaggtggtgagcggcgggtgaaaactcagtccggccttggtcgaaccaacaacgaggttctccctcctgagggtgttgtcgtgttgtttcatcccccaagggtaattgccgggcgaaagcctagtcttggctccttcgagtcccgacggacggcggcagcggcttttccgtcacttctcttcttgaagacatcgttttggcacccctatggggcgatctcgtcagtgtccctttgtcggcctagtggcggtcggtcatacttagcggcggccggtccggtgctagccttctcctgggcttgtgtgttggcgatgtcggtgtgtgggtggggttttttttctttttcctggttacgaccctccagggttgtaatcttgtaatctcgtgcgagtcattcaaaaaaagtttgcctccgcagtgtgaaggagcagggcgggttaggaaagggcaagaatgtaagtgtctctatcatcaatggtatagttaggtaaaccttgtataagcaaaatcctagggtttgcttacggttcctgtaaaataaaattagacccaagtggggaggctacaggggagtttttgaaatactcctacaatatactacttcactccttttggtccacatgtcacatgtggggactactgttgtgtcttttgataatagaatcttgtctgaatacagtttggctgaagtgctgaactgaatcttgtctgcacatctatctacaagctgcatataaaaagcatttctagttggattgcgacttcaacgggaagcattgttctaacattctcccaaacagaaataggttgattcctttggatatagaggccggattttatccattatctaaaaaaaataggttgattcatgtcttgagatgatgtgaatcactgagcgctacagaccaacaaaggaacatgaactcaactactatcgaccaaaatctcttcgttgcctcaagccttgccttcgagcacacattactgcttgggtggtcaaattcgcttaaccatcttgtctccccttttgtatctatgtatctcttgtatttttttttctttcttcctgtttttctcccttgtacctctgttttttctcatgtcttttctttctgttttttccttcttctcccccctctgttctcttgttcggctttaccagattttatctgatttgaccaccattaatgcaatggttataaggtagtctctaccttttgcgtcaaaaaaaaaatctcttcgttcgagcgatccaaaacctcagcctctctgcaccgttcgatctgatataggcggctgagatttaaacacgcctgtgaagtgtgaactgggggtttattttcgtataggccctcgagttatctcgtattgttgtcgttgcgagcgacggcgacccggcgacggcaggagcttcagcgagaggcgatggggagaagggaaccgggcgttgctgcgagcgggcgatccgacgagccaatgaggtcatcctcgagctcctagcgcgcgcggccgtcgagcgagcccccacctcggcgttcgtgccggagaccagagaatgtaagcgacacctctcactcctccctttcttttcccgtcgctgaatgcaattcagttttgctttgctttctgctgcattttgtcatccaggggaagacaattttgtacctgttagatgaacttgttgcgatgacactaagcgcctctttgaattggaggaaaaacataggaattttggaggatttcaatcctataggaaaatttcctatgaagcccttcgaaacaaaggattgaatcatatacaatcctttgaaattcctatggacaatcctaaagagattttggaggaaatttagcaagagcttcaacctcttggtaactttcctacgagtctatctctctcatctaattcctgtgtttttcctgcgattcaatcaaacggtcattcctgtgtttttcctgcgttttgcaatcttctgttttacacttacattcctatcaaaatcttacgtttttcctattcctatgttttctcaatcctgcgattcaaaggggccctaaaaagtctgtgcactaaactgaatgactgaagagctcttacaggaagatgaaaggaggacgcgtcccccgcgtcgctctcacgcgggcggctcgggggcgaaaccctagccacccgtgccgccacaccctcatccccctcctccacctcgccgccgccgaagctcgccggcggcaaagccagtggtgagccgggaaggcggcggcaaggcccaaacgtacagctcggtggaaccgtcctctgcgtgaggaggacggagaaggccgacgacggcgcagccgaaggtgagacggccgatcggtttggggcggcggatccggcgcctccgtggccggatctggccccctcacccacggtttcggccagcgggctagcgtcgcgacggaggtggagaggggcatcgagcggcacgagggaggacgcgggccccggctggcgaggccctcggccggtgatggggggccacgcgagacggcggtggggtggccgcgagacgacggcgaggcagccgcgagacgacggcgaggcagccgcgaggcggcggtggccctcggcccggcgatgggggcggtcggatccggtggcccttggccagatccaccaccctcctggctggatgatggcgtgctgccaaggtggggaccagtgtgccctcgccagagcggcagtgggaggccggcgacggcgggggtctggtgctgcgagaagacggatgccaggcccttgtcggcgcagtggcaacctccagctacgcccactggcgtcttgacaaggtgcagcgggcctgcgggcgcttgtggcgacggtggcagcggcataccggggagtgggtgctcgtggaagcgatggcagcggggagcttctacgaccagtactttggccgccttggccggttctggtcggtgcagcagaggagtgtgggcgatggtaggatgcgtcgagggtggaatgcttgtgagtcatcttggactatcgtttggtcgtcgatgtgggggtgcttgtgtgggtaatgtgcagacgctggcgaaagccttgctgtacctttggccggctcgatgacgacgacgcacccattggcgccatttcccttcttgaaggcgttgtcaatgtgctctcccatttgccccacaaatctccaagtgaaaaccttgctccggcttcggacgagcggcggcggcgttacgcgtcgtgtcctccttgggggcgtcgcttcggggaagttcctttacatcgatgactattgagggtctcttcggttcaaaagctttctttccttggtgcttggcgaggcctaagcctcttgggttcgcttcgctcttgtggtgggcgacacactcttcggttgtttctacggaggaagtcggagctgctcgctgctggggtgcggcgacgcttgacaacgatgacgtgttgcggtctcttccaaagagttggtgctggccatgtgaaggaagtggctctttcatggcttggctgatgtccattgtggatgtcggagctgctttcgctttggcaacttccgtggcttcaatgtcgctgcagtggtgaagtcggcgctgctgggttgcttggccggctagctcggcaacgataacacctcttctatgatgtcggagctgttgtgccacttttgtgtttagcttggcaatgatgtcttgcgtttgggctccgccgttgttgttagtagtgtagttaggtcccatgttttcctctgtgatgtcggttccccataattaaccatgcagctgtatgggtttcgggcccgatgtctcttgtctgtacagtttctccctctcttaatataaaaccagcaatgctggcttaggtttaaaaaaaaaaagagctcttacagtaatgaacgcaacacagctggattctaatttcagagtccatgacagtgttgaaaatttggggagtgaactccaaagcattaggagataacattctctgaacattacgatcaaatgccatcaggtgaaatgctgctaagtatctgaaactggatctaggaatttaaacttctgacgaaccgcagcctccacaccgcagtgttcacaattctcaattctcaaacaggatgcagggaatgagaggaggacgaactggtgaatgtgttcgcctccattgctttcacatgaaaactggtttgcaatgaggtcaagctaaaatagtttagaaacagaattgcccaatagagcaccagagtggatgagtgtctagaagtgtttttcagtaaactattccatcaataaaaatgcaattaacttgacaagagtgcagaaattttcaagagaactttcactgctctagatagcagcagcgcattgtttcacttaatgtctatacactattaccccctgctccttttccgggcttgggaccagaagtgcttcagcgttgatgacttaggggtatttcagtccaaaaagagatgcaaagatgataaaataaatttaaaatggaagaaatgatgaaaatggtaaagtggcgaagtgtactcagttcaggatgttattctagcgaagcccatttaagtgatggtatttttacgaagccaattttacgcgatggtacatatgcaattttctctttttcgggcttggaactagcaatgccattaaagatgcacacccaagatggcataggaggagctacctacacacgtgcaagacaaaaaacaaaaacacgttttttttttcatttttggatctgtatcccttttttgactttttttttgtaattttcgtgttcttttcactcttttttttttcagtttttgtaatcttccaaagaccagcaactaggtaaagacaagaaacaaatgagaggagcaaaattgtttgatcctgcagcaaaattgtatcttgttgttcaggacttcaggcacatttgggctccaagacttgaaaaaaatttttgctcctcatcaggtcatggtcggcactgaatttccttcacctacttgtcaattcgcagctcttagacctggtggtctggtcaagctagcttaaatagttcagaatcagatttgtccaacagagcaataagggtggatgagtctccagaaatgtttccacaattattccatcactgaaaatgaaattaatctaataaaagtgcagaaaattcccaatgatctagcaacggagcatcatttcaacacacatctataccaaactatcccctcctcctttttccgggctggggaccggctatgtcatttagttatacctacgatgacataggcggagttacctacacacctacaaaaaaaaataaaaagaaaagaaacacacacgcaaaatctaacgaaacatgacaatatattttacaagagctaaagaaaatatattttttatttttttgacattttccctttcttgatatttttgttttatttattttttaaaaaaataaaatttttttaatatttcaaagaccaataactaggtaaaacaaaaatacatattacaagtgactgcacagcccaaattcttcaagattaacaacctacaaaataaataagcacacagaaattaatcatggatgtatatatacataagtattttggtaatttaataacttaattaaggaaaagaaaatatatgtgctatcagtttttcaacaatcatattttctggaattgaacttaccaaacaatacacgtgcattacaaaaggcataaggaaaagacacacatggcctatacataggcatgccgatcagcaatatcctcttcttcttttaacaggtagaacacgaacaaaactattaatcaatttgaaccaatacaaagacatttaggtggcttttttgtttcaccaaacaaaccttaattaattaggagccctacactaggaacagatgttgggcggactgtgtgctgtgccggcatggcccatttgtccgtgtcgtgcttgggccagcaccttagcccatgggcttacacggcacggcatgcctgttgacgggtcggcacgagcacggcccagctgcccatttattttccctacaattttctaatttttcccatatttttctcatatttttttattttttttcatattttatcctatttttaccatatattttctaatatatttcgtatatttcctaaattttcctcacgtttgtcctgtcttcattcattttttaacttcatattatttttccctcaattttcaattttttatgggccacgtgcacggcctgctacagttgccgtgccttagtgggtcgtgccactagtgggcccgtgcgtgttgggccgggccacccatttggccagctatagtcatggtactgtagttgagtatttttaattgaattaattaattagttttggattaatcatcattatatccgaaccgtggagacttccctcactgttttccaagtcaaatcatggtaaagtacaagagaccggatgcccgaatgccgccattccaacatttttttaagcaaaataatcattttaacccatgtattcaaccacatgtacaattgaatttcttaaatattttaataacccatacaacgcacgggttgacgactagatctaatggttgtaaatgatgggttcaccagatttaataaagataaatgacaagatgtttttgtttttctcggaatttttagaaatttctttaatttattagaatgtcatgtggaggcttaggagtgttcgtaggagtgctacgtgatggcttagaagcgtttgtaggaggtttaatgtactttaggatataatagattataaaatgctataacacttgtttctgtactggttatggacattgagaataattacaacacaaagttttaaggatttctgtactagttttaggtgacaaggtcagtaatataggtacaaatattaatcataacaactaccgaaagtttgacattttgtctaatatatatgatgatctccttactaagaatgatgcaaagtgtacaacatcaatgaatgtaaagtgtacaggtgagaataacattagacatgcatgattttggctgaaaatatgcaaagttggaatgaaattaaaatatgtttccactattttagataacgatagaataaaaatatgtatcaacaaatacagagccaatgcccttaccttgtgtctctactaatctactgtcttttagttgggtcttcacatctcactctctaggccacgtgtagacatccaggtggcggtactgctctcgaagcccatgcacccacggtgatgagtcctccatattcacatccaaccatagctgctccaaactgcctaactcctcaacacagctcaaatttggacaaacacttacaaacagctttctcactttgggaagttctgtaaccctctccaggccttcacatctacaaacagaaaggaaaccagatagggatggaaggtccttcaccgacttcaagcagcttgctgctacaagggagagctctttcaaactggtggcctcgtgtccaagctgttgtgggagagccctcagcttggggcagttatcaatgtccaacctcttcaaagagggcagcacacacaaccttggaaatgaggcttcccccttttccgtcacagtggttccatcctctcctccttcattcattgctgcaagtgatatctcctcctcttcggccacagcagttccatcccctcctccttcgttcattgctgcaagtgatatctcatcttcttcaataaaggcccattcctcccagttgggcatatcattgatgatcaacc

SEQ ID NO: 28816 - DNA, 9132 bp, Oryza sativa
tcttttcgatgaagcagttcagagtgcgtcttcacactagcttaggcagttgtttgttactgttgtgcttttttgctctgttggtgatgttcgtgctttctttgaaaaatattggttgtccatgacagatgacatacaacataggttaaaaaaggcccttgataatccacgttgtattattccgcatgaacacttgcttactctattgatacatgaacttacttataacttaccccaaccaactttctctccacaagtgccctttggtaataggcttattgaagaagaactttcagctgatgcattaatgatgtcgatgcatgcagattccttggttgcacagattaatactgatcaaaaaacaatctttgacaccattgtaggccgagttgtagcagaacagccaggctttttctttgtatgtggtcatggtggtactgggaaaacatttatgtggaatgctttgattgcgaaaataagatctagaaataaaatagttcttgctgtagcttcgtctggtgtggcttctctactgttgccaaaaggaaggactgctcattcacgcttcaaaatacctattgaaattaatgaaaccagtctttgcaatgtaaagagaggaacgatgcttgctgaactacttgaaaacactttgctcatcatctgggatgaagctccaatgacacataggcgttgctttgaagcactagatcgcacactgcgtgatatcctttctgaaacatgcccttcaaatggtgttgttccctttggcggtaaaattgttgtgctaggtggcgactttcgacaaattctaccggttgtgcctaaaggttcacggtcaacaattattgacgcatctattacaaattcaaaactatggaaacatgttgttatgcttaggttgaatgtaaacatgagattgcttaacccttcacttccaaacacacaaaaagaagagcttaagcaatttagcgaatgggttttagccgttggtgatggcactttgcctaaaaaaaaagatggtgagagctatcccacatggatcacaatacctgatgatttgctgattatgacagatggtgacagatggtgagagctatcccacatggatcacaatacctgatgatttgctgattatgacagatggtgataaaatagatgctattgttagagaagtctatcatgatttcctgtcatgttacagagaccctgagtacctagcttcccgtgcgattgtctgtcctagcaattcaattgttgatgaaattaacaactatgttgtaggtttaattccaggagatggaaaagaatacctcagttgtgatacaatctcaaagtgttctgaccaaataccagattttcacatgttatatcccactgaactcctcaactcaattgatgcgaacaattttccaacacatagacttgtacttaaagaaggtgttgcagtcatgcttctttggaatctaaaccaatcaatgggcctttgcaacggaacaaggttattggtagtcgagcttggagagtgtatcttgagatgtatcatactaactggttctaacattggtgaaaccgtgtttatccctaaaatttcactaactactacgaaaatgaaatggccatttacattgcagagaagacaatttcctattcgaatttgctattccatgactatcaacaaaagccaaggccaaacactgcagagagttggtgtctatctaaaaaaacctgtttttacccatggccagttatatgttgccttctcaaggacgacttctcgaccaggcctacgaatattaattgagaatgactatggctcatgtgggatagaaacaaaaaacgtagtttatcatgagattcttgttgctacgttaccagcggtactgcagcctgcagctcttactgtgtacatgctactttagtgcttatgattggtctctcacaactaaacactaataaaatttcaggctgtgccgccacttccctgatacctaaataaatatgcatgcgcacgcagtgcacctttttggggtcttttttgagcattccgctggttatttggacgcagtgcaccgtgtgaagaatgcaaacaggagctacaagccagttgccaatgaactaatgatcactttcactaggtggacaactgttgaggagtgcattgaagttcctattgatttccctactgtggttttctccctgacacctttcgatgatgttgctaagtttgtggacaataatgatttttttattggtgagccatgttagtcttatatttctattggtcttatataatactttactgatcaagtgctaaaatcttcgtatttattcagatgttatgggtgtcattactgacatatctacacccacaatgcttcgtcctagatcaagggatgctgacagcttgaaaagaactattcagatacgcgatgcaaagtattctttatgcctcttattttgttccttgcttatttatttatcctgaccactaacaactaataaaactagcacaaacacagccaatagccactctaataaaatttattgatattcttaacatgtacaccacatttttcctgtttttttacacaaatagcaattctaccttgaatgtgtctctctgggctgaacaagcatctgcgtttgaggctgacgctatacacaaggctggtaagagtgaacctcagattattctgtttgttggaactcttgcgaagaactacccaggcataggtaaccaataaaactacaacataactcatatttgtatcatgcattctaaccaatcaatttaaaattgaaggattggcactatctggaggttctgcttgcaaatgggacattaacattgatgtacctgcgatagttgaattaaaggacaagctagcatagattatattatttcaatgtataactccatatgtcttctacatgtttcctgatatcaatggaatttacaggactgggacaaacttccagccaatcaattggattgaggctccagccagagcagctgttgatgaagtcgctgagaacaagactgtgcgtgaacttctagagatcaatcctcacaagtgcaaggtaaatgctaattgcgatagatcaaaacaacatgtttgtcttatgctatttagacctgctcttactctgctaattgctccatttgttacagaaggttcgatttcaagctcatgtaaccgttcgaaggatctgcaatgataagtgttggtggtatggttcatgtcaaagatgcttcaaggttgcaaaaccttatgggtccacctataaatgcactagctgttccaacatcgcagtggcagtaccaaggtaaaaaaaactgttaccatttatcttgacattgcaagtgctttccagatcttctcatgcttttctctacgcgaacataacttgcacgtacaggatagtagtcatagctggagatgactctgatgatgctatgtttgttctctttggatgaacagcccagcgcattgtgcgaaggccagttgaagctcttattgaggaagcaccagctgacagtgattttatccctgatgaaataacggctttagttgggaagtcgtttgtgtggaatgtcagcttcacagaaaatacgcttaagtttggggatatctcattccaggtcaacagcattgtctccattgatgctcctggtgaacctcttatgttgatgtccccaggtgcttcccagagttcttcagccatgatttcacctggaccaagtggctcattgatgtcaccatcaaggggaagtgaacttggcatagcttcacccggttcaactgcagccagctctccactgccaaggcgtgttattaccacggacaaaagccaagttgtgcacacaccaaccagcaagtgctctgtcagcatagatcaggatgacatttctgctgctttttctccaccaatgtcccaggtagtgactgataagttattattttgctacttctatagtctcctacacatttatggtcttgcttattgatcatgatagcaaactaataaaattctttgcagaaagtgcaagctccagctattcctgatgatgatacactactggctcatgcatctggctcaaagagcaagtctaggaagaggtagattgttttttttttttcatttgacatgtggttcttcattttttttttaaaaaaaattgctttcctaaaacatggtctgatgttaacagaggtcctccttctcaagcaccaccagcagttaagaaactattcaaggaaggtgacagcgatgagaaagaaaccactgttaggtatattcactggtttagcttggctgctatttgtgcatacagtatataattcattcttcttgcagcctgtcagctgacgcttgatccagtatacatgcatgcccactcaagcattttggccaccaagttgtagcatcttcgtctgcctgaaccgaagcgcatggaagaatgctgtctttgccatatgtctgaaccttttgctataaactgttgatctccagctattacttcttagtgactttcgaaattattgttcccatctcttttggaaccatctttagcaatgtttgtaagcttattatggttacattagctatagtccaaccacgtgctcaaagtccattacagttgccaatatgtcagtacggcaatggactttgaacagttggcattggcttagctccatgataccttctcaggtttcgcttagtaatgttagaccaatcttaagactcatccatgtttcttgagtccatctcctcatttcttattatgtcgcatgcatggcattggcattttaatttgttgcgataactaggttgtagcccgtgcgtttcctgtcatcataacttctctgcttttttatgttgtttgcctgatggtagggcgcgcaaagcgcgccttattacctagtataaattcacggcgcggtagttgagctcgagctatacctccacatggtaatggggaatttcttttgccattttcttctttatttctgtcaagtgcaaccagggtgcggaggccatttcaagcacatggcgttgaagctggtgccggcggagctcccgtgcaagcacggcactggcgagtggctcactttgtagtggtggttcttcctgcccatgagtggagagagaaagagaggagagagggggagctatagaggtagaagaaacagtccaaactaaaacaaccagtgaagataggtagtctaaagtgaacaagtttgttcacccctagtccaaattgcaacattggtaaaaaagagtggcccaagatgtaatttactcaaaaaaataattacagaatctactaatctcaagctggccattctgccagcattctattgcttcaaatggcactgtaatttaattatacgtggagcaacgagataaaagacatgctgtgcacagcgatctgatgtactgtctcgcaactcgcaagtatatctttctggatctctcaaaaaaatgcttctaatcgcccgtccggtgggaagccaaatatcggacgcatcgctgctgctgccggggctcacacgctgcctgttgtgccgcccacgtctctctcacgcgcgcagagtcctcatgctgccacgtatccccaccacatattccgttgcaataaatcacctacatattttggaaaaccctcttttaagggaatctgtttttttttccactaaaaatgttacacctagtgtactcacaatgtttcactatgtatagatctaatgttgcaatgaattgaaacattcttttgcaacaaatcacccatatattatggaaaccctttattaagggaactcgtttcattttttgttccacaaaaaatgtttcacctagtgtattgataatatttcactatgtatggatcaaatgttatagtgaattaaaacatcctttcgctattcgctgaaacattattttcatataaggtgaaacagtgtctgatgaaatattttcgatctagttagttaaacaattccgatatacttggtgcaacagcgtgtaacatttaaaaataattcaataataagctcaatttttttcattggattatatccatgtgtggtcttgttttaaagatttaattgcaatggatttaatagtgcaatcagatcatgatttggataaataatttaagagaaaaaatagtttaaagttcgcttagatgcatacatgcaggatgacatcatgatgacatgggtgcccgatttttctaaaaaaaatgggacttccgatttgtagctctctccggatctcttgcatatgcgcacccagccgcagtgcatgcatgtgcattaataattagaatttaacattaatatcatttaaaatctaagacaagatacatctcaaaagaaaaccaattatttaaatattaaataattaaattaaatatataaaaagagtagcaagtattgaaaacaattaaaaatgaaaaaaatgtgctaatccacaaattttactttttttaaggtaagtcagttgaaaaatgttccaataaatatgataagtgacattgtttaaattcaaaataggtaacttaaccaagttgatatcccatatctttaactattataaaaattcaacatgtttttatcaacaatttcgtacgtcgcccatacgattcgcacgcgtattttcctgtgttgtccgactcttgatcaaggcgcacgaatttttgctgtgaaaatctcttttctgtttgattcccttactagataacatccgtatttttcacacgtcaggatataggcctacgtagcttccattcaggcctaggcccactaatccaatttgtttgcaccaaaaacagatacaagcatgatctactgacgagaacccctttgagcggctaaaaaacatcttcgggaaaaattaactcctattatatatatatctatatacctaatttatatctatacctaataaaaaaaatgtaataacatctcccaggccgcgccgtgcctcggcccctcctcctccttcgtcggaagccgtcgggccgccgtccatgtcgcctccccgaggagcccgctgctgccaccacttgctgccgtgcccttttggccgccgcccctcgccagcgccccatggtgaggaccccctccctctcccatcccttccgctgctccgcgcgctgccactcaccgccggtgtcgccgctggtggccgtccggctacacgccgccgccgcctagtcgagttggccggcgagccaacccgcccctctgccacgcaccactaccgtggactcggtctacagtggaccaaatcctttgacccgctgatgtgtggggcccgccctttgtggacttggtccgcgcctctctccttgttgcggcagcaaatgccttttcctttgtaaaattaattaataattacgcaataaatcaataataattctagaaattcatttaaatggctcaaaacttctaaaattcatatctaattcatacgaactccgaattgagccattcaacttgcaaaattcatctaaaattgagatatacatgtttgtttactttttatgttatttgtttttctagtccgttagtaaaccgcgagacaaatttattaagcctaattaatccgtcattagcaaatgtttactgcagcaccatattgtcaaatcatatagcaattatgcttaaaagattcatctcgcaaattagtcacaatttgtgtaattagttactttatacatgtgttcaaacgttcgatgtgaaaagatgtaaaattttggggtgggatagccttactaatactaccacatgtgtttctcactctacttttcggagttgcactgctcaaccgcgcggcggcgcgggtgttgggtggacttcgacgcgcgcacctcgcttgtcaacgtcaccatggctcccctcgagctgcccaaaccgaggacgccgctgctctccgccgccgtgaacctctcggccgtgatagaagacgaagcctacgtcggcttctcctcgtccaccggcgtcgtcgcgagccgcgcgccactacgtgcttgcctggagcttcaagatggacgggccagcaccatcgctaaacgtatcaaacctgccggcgttgcctgtcacgatcggcagggctccgtccaacgttctgaagatactattgccgatagcctcgatcggctgttctcgtcattcaccggagacgacgtaggtatgcggagcttaaagaggattgggaggttgcgtttgggccactggttctcatacaaggatatgttccgtgccaccaatggtttctcttatgagcgattgcttggctttggaggatttggaagggtgtacaaggtgagtgcttctggtatcccgagtggagattgccgtgaaggtgtcccttgaatcctctccctacacccattactgccccctcaatggtgaatccttccacctcacctgcacctgcggcatacccgctgccgacgacttcaacctctcctccttctgcatcattgacaaacccaacatcaaacccaatgacgcctgctatcagcatgccacctcctgctctcaccacaactccacccactgccccaggtctttccgggcagcaactatggtgtgtggccaaggctgactcagcagatactgcacttaagaatgcactggactaagcgtgcggcattggaggagcagattgcttagcaatacaaccatcaggcacttgttattatccaaataccttaggtgcacatgcatcctatcactaccggagaagtgatctttgcctggtggaaaaaaaccacaatagtcccagttccaaaaactatctttagccccggttaaaaatctcacaaccattatatgatctttagtcccgattggtaacaacaaccgggactaaagatggttcatcccctgtcagcctgtcagggtgctaatgatctttagtcccgattggtgcaccaaccgggactaaagatcactattttaatcccggttggtatttctaaccggcactaaagattaagatgatcattagtcccggttggtattaccaaccgggattaaaatctaatgcgtagtatataatcactctcccttattctctcaaccacacttatccttttaacccacagatccggcccct

SEQ ID NO: 28817 - DNA, 11303 bp, Oryza sativa
atatttccttggcaggcacaggaacctgtgttttggcatcgtcaatgtcgtacccatcaaggtaaaaatcatttcaactctgaaaaggaattgtgatggtagggtttttggaaggaacagtgatgattattggtgctgggtttgtagatgggactgtgattggcatcgttggattagttgcctgttcatcgtgggcagtttgtttgcctgcagttttaactaacaaatagttaattagtcattgagtgtcatcattagcaaaccaaaggcttttattatgtcctgattaagctcaggtcagccttctaaaagatgtactagtacttaatcaaagagtagtcgtttttttttaaaaaaaacaggacacaatttgtaatatccatgagtaggaaacggtcgtgattcaggcaattaaaaaggactaatgatccattaggtgggatgtgggattgaacatagataaactagttggcagcccgcgtatttgccgcgggttttatagttttatcgtcaaacaaaatcataaaaatggttaggtgtaactctatgtatatacaaaatatatgataatatggatttatatatgtcttatgttattacaatacaatttagctttattttttcaaacatcattgtgtattgttataatatatgaatattattttcatatgcaatatgggtttcgttatagttagacaatttacatttctctacttcactcaagttttttctgaaaatagattcaggtaacgatacctaataattatatgctattttgtcatgcgtaataaaaaaaacatacatattaaacaataatcacataataaacaataatttgagtagtatttggaaaacatggtgttatgcacaaaatatataacagtgctatgtgtgacagtgaggtagagcaaagggaggtgaatggataactaataaatgattgaattggatgaataagtggcttcttgatccaatggttattatctttatactaatattttatactaatatgatcaaatggcttaaaatttttgatgacgtagcttcttacatgtcttactttataggaataaatgcccctagtgtgtaccaactatatagaaagataggattagatttcctttccatgctcttgtaatattctactagtagtaagaaaagagacgaaatagcgttatgtcgtggttcccccattccattggatggtgtattatcaaatttctcggtccaaagaacaagaccaaattgttaatttggtcaagtccaatccctcgtcacgctaagctcttgcaaccaaacaggaatgtacaagtcgaaatacctctaaaactggtgtaggattaaaggaatgatgaaaaaccgtagtcatatgctagccaaatggaggagcaaacgcggtgcattagggagctagagggaaggaaaagggaaaaacatgggaacagaaaggaagatctggccttgtggacgccagcagcaactatacaacactttgatagttcatacacagtgaactgaactgaaggtgcagatggaagcagaggaataagcacacagacctgagcagcagggaagcgcgcgggagaggatgcaggagcaggagaggaggaggaggaagaggaagaggaagaggaagaagaagatatcctatctcctggccatagttgtgctgtgttgctgggaagctcaagaaatgcgatttgggagtggagaaagggacataggggagtggggaactggcgatatgactagagagataatgcgtgcttgctaccgttgcttgcccttttggctagggaaagtgcaaatggttggtctgaatttaactatttaccacttttagattggacaattattcaaatatccattttaggtttgcacatattctttttgctctcttaagagatgtcttcttaacaatttgccacttttacccacatggcatgccaacatggcaagggagggtagaaactggtgtgggacctactagttagcctctcctctctccttcttctctccctccggcccgatgtggcgctgccatgatggtgtagcggcgacatatgaggaggagcagcggcggacagagctccttgcggtggtggaggacgcagagcggcggtgccggcagagaggaggcgtagcggcggcggacaggcttcttgcggaggcggtgaggcggagcggcggctatcggcggaggaggaggtgtagcaacggcactggcggaggaggcatagcagcggcggcactggtggaggaggcatagcggtggcggacgaacgccagtgaaggaggcgtagtggcggcgaacagcctcctcacggcggcagcgccggcgaaggaggcgtagcggcggtggtgggcgtggtggggctaacggagactgaggtggcgacgccacgccggagtccggaccggagggagagaaggagagaggagaggctgactagtgggccccacatcgggttttactctccgttgccatgttggcatgtgttgatgcaaaaaatacacactggcctgagagatctgcttagctctagtgcaggtccaaagaaattgctttcgggttctgagcgtgccaattggtttgatcctgcaactaacaagaaacaaagaaaagcaaagttaaatctatcaacgatagctgatcggctggattgccgatgacgtatcgttcagtattaagccgatataacatgtatcagatcagcaataaggaatataacaaagaaagagttagatctacttgatcggctgtagatatctatcacgaccggaaataacccaacgggcgttccttacgtgcgtgtattattccttgtcccaggaggcaaggtacaccgaaagttgatacatttcagagtttatcaagcggaagcataaatagttactttattacatgggcggcgaaggcccagcacacaagaagacaaacgggaaacagcagaagactagggcgacgaccacaggcgcttgacggcaggcacgagctaaacaccaaagacttcatcatccaggggctcctcttctgggtttgggaaaaattgagcaagactgagtacaaccaccgtactcaacaagacacacccataagtgcagaataaatgcaagggagtacaagggggttataatataaagggttagggtttgcaataaacagcattaaaagacacttagttgctcaaagctattttgtaaatacgatcctagagttatacaagattattaatcaaggccgtgaacccacacgaacctgccttaacccaaggcctacgatgattcagaccgaactggcaacctgaccctgggtcccagctcgtcccaagccaacccaggccaaccattccacattttagtggttaagcaggttttaagaattaaaacactaacttgggtacattgctcggcttgcccataactgagggcgcggctattcgaataggttatactctgatcagaggtgtacatctttacccacaagacacatcttcgtcacgtgtaaccacgtgccacataccaccaccgtatacggacggaagacgtgacatagtttccaacccattctagccatagacaagagtaccgacccaaccccacctacggccggaacctccgggacaggtaggcaggactgagcccctagcagcaggacaccggccctgtgccatgacatctcgactactgggccgtagctcgtgtagccttcatttgccctagagatgtccatcgacccccgacttcgtccacctccatccgtgtacttttgtttataaccagactgagccacaaactaagccttacccactagacatgtggaagtacggtagtgctttgcaacagaggcccgaagaccggtccttatatggccgaggtgctactatcaaaaccatgcaccccgagcctagcctaaaaccattttgaggattttgaatagagggggaggtgtgaatccaattccacaataatccaaccattccatagtgttcaggtgatatgaatattcccaaagtctagagttgtaaaaccacctaatgttacctaattaagcagcgaagcatctacctaaattcatactagtggtaccatgagtagagtgtccactagttggggttttgtttattctagggtgaacaaggtaataataataataacaataataataaggtcataacaaaggtaaataggcatggctaaataaaacagtgataacgcgggaatttaaataaagcgataatgtaataatttaaatcaaaataattttataaactgggattcaatatgttcaaggatgatgtgacttgccttgctcactttcccaaacgtcggcttcaacctccacgaagagcggatcttccgaagctgcacgaccaacggaaaagaaaagggcttttactctaataaactccacataaccagcaagaacaaagcacaaaaatgggttcttgacttcttaaggaaaaattagagacttgaacggtccaattccgagttcaaatggccaagttatggccatttgaagtttatattctctttaaatgaatatttgcgaatttattcatttaaattttaatttaaaaaggggtttattgcgtcagccgaggggaaggggcgcgcggaccgggtccacgggagtggggcccacgcggcagcctcacggtccacggtggaccgggtgcacccgggctcacaccggccggcgccgtgggttccacgcgtcagccgcacccgagggcgcgggcggctgacgaccgggccccacgcggcagccactcggcgcgcccgaaggcggccactcggtgcggctggcaggaggcggcgcccgcgcccctatggtcgccggtggcggccataggcacggcggagcggcggccgagagaggggaagggaagggggaaaagaggcggcagtccacggctcaccctaggtcaacggcgacgatgaaaaaggcggccggagcggaggaaggtggcggcgcggctcgggtcgacggggtcgacggcgttccggcggtcggcgaactcggcgagggggtggacggggtcgacggtggtgcggcgaagccggggcgggagacggtcccggcgagcggagaaggccggccggaggtcgtcggcgacggaggagagagagagagagcgacgacgcgagctcgattccggcaaggaggaagggcggcgagaggcggaaacggacggaggaggtgcggggagggtttaaatagggttggaagggggagagggcggccggaggggaaggaaaccagcgcggcgttctcgggctccatcaatggcgccggcgggattaagggagggtttccaaacgaatccaagggagagagggaaggaaaattggggggaaagggagagggaatcacggggaataattcccccctattgattgcacgcggggacgacgggatgcgacggattcggcgacggcggcggcgcttggcgcgggtggagcggcgggaggtcagggatgacgggtgggccccacccgttagtgagggtggcgggcgggcccgcccgtcagcggcgcgcgcgcggggaggggccgagtgggccgcggggagaggagagagagggggagggagaagggccgagccggcccaagagggggaggggggaattttaaggtttttctttttataaaatcattttaactttgtttatttcttcttaattattatttgtgctctgaaaattccactaaaatttatttacacattttaggcttttaggaaatatacaaaaatcctccaagccttatttgacttttaactttgcacattttaatttttggaggctttcacacggattttaattattctaggcataatttagaggatgtattttagagttgttttgggacgtgacaatatcaatgatatacgatctatgtttcgaaataagtttaaactaagtgattgggatagatcgaacgggatgctgagacagtataaatcacttatgtctaaaagtacttcaaaataaagattgtatatactcatagcatagccgataaagcaaacctatcatgtatcggctagtactccgataccactttatactaaaatatcaatatagacgtaatataccaaacataaatcaatctaacatcaggaaaaacctaatggatcaatagcaagcttgatatattctatctaagtgagatctcaatataaagggcagatttagcatatcaaataaacatataagaatcaagataactaaatcagataagatcggctgaaactccgatgctatctctattagcaatcatcaaacaggctagattttatagttctaaatattactcaacagatcaaacttaactgatgcagcaataagcataagaagaaacataaaatctaaacgagtctatgaaagctttttcaagatggtggatatactatataatttaattcaatatcagtatccaatcctatcggttgttttcgttgatagaagccggccgatgtggttagatagcaagatcgatctagattatatagcatatatgataactcgacgatttacataaacaagattagagtgtcatgaagatgtaatcactagtcccgagaacgcaagccaccataacaagttttaccttttcgtcggagatcgaacccgatgcagcccaactcgaaagcaagaactcgtgaaaacaatgaaagtagaaaaaggtggcgatgcaccgaaagtattattgaactatcgtcctttgtttacatggtctcgggtcatatttatacccaaaatacatgatatgtccttgccggacatgactctatctttattacaactcaaaatacgaataagtcccttaggcggactcttaccaaaaatatctctaagaaaactaccagaatatcttacaactcaaaatacgaataattcccttaggcggactcttaccgaaaatatctctaagaaaactatcagaatatcctaattaataaatagaattgccttcttaggactcaatccatgtgtggcaacacttgtgcagcacctcaatcgaccctaacaatgattctagaatcaccttgccgaaatcggctatatcgacttctcccaaacagcagccgatgcaaacagcagcagatgcaactcgtagccgatgcaaactctgtttcctagactaccaatttcctctaaatccgcttcagatttatccccaaatccaatctgtgatttaccaaatttggtcgttaaaagcatgccacgtgggcaaaagtggcaaatagttaagaagacatctcttcagattggaaaaaaaatatgtgcaaagctaaaaggggcatttggataattgtccaatctaaaagtggcaaatagtaaatttcccctgctctgcagtctccactctggactggagttgcagccttgcatgccttcaaggcaggattgtttttaaaaaatatgttattatttcaccggttttgtatgaatacacatgattgaaaagaattaggaaaggcagagcgcaccatcgctccacggggacgcgaactcgctggcctcagatttttcttttatattttagatcatttaaacaaataattttaataatagactttacaggaaattattttcaaaaatgaacattttcgccacgctagccgcgatggcgtgaccaaactgagctgccgtgccagtcgttgccgttgacaaggttaatcggggccgacgtggcagggggcggctgggcttgctatgccaagctcggtggcgaacaccgccacgccatctcgcctggcgtggtggggggggaaatataccccagtcactgccgccgcccctttcttcctccttcctcgcttcttctcctccccgttgttctctctcctagcgatgaagaaaccggcgccccctccccaaatccatccaaatccactcaaaatcctgtgtttttgctccgatttgaagctcttttgagtgggaacccatcccgtaaggtattcgttttctctcgtttttgcatctattgtaatgtttagggttgaatgtaatgtgactgaaatatgtaataatgaggttcacggggatggatcgaagtagattgaggtgtattatggagtagtactcgattctgttagggttatttacgtggaaaatatggtttttttatgatatggttaaaagtggggttagacatgggatagcacgaacatgatatttttaagtatttgtgattatgtagcatgttgtgcttatgttggtctagaaatagttgtattccgccattgtattgttccctaactagtgctaattgtgaatatttaatattcgccgtcgttaattcatcgccacagacaaacccgttgttggtatttcttacgatcacagatagaatccgcaagtgcacagatataccgatgtagcacttcccctacggagtattccaagggtatcgaatccaaggaaacgtgtgtgattatctctttctctagttcatccaaggacacaagataaatataggtaaagggaaaagaggattttctagtgagaaacaatgtctaaggaaagcttaagtttaatcctaacgcgatacttcaggcattggcaacccgctcttcccagatgtcgctctactacgtacccggacagggaggacttaagtactcttgagggctgtcaccacctctacacctacctctaacatactgtgggatacgcagcaaccactgaaaattaagtacccagacaccgcgtctacgcaattaataactactctagtgctagctaaacactaaagcaatcactatataatttatggactatagtaaacaatgatcccgtatgctaattaggaactaaccaagaataattctcacgaagcaaatcttaattactcagaatgatatttttattgaaccagagtaaataacaaagtacaagaataaggagaggattaccgacaactccgggattcctccaacttcttctactttactctctctctctctattctaagtatactatagaacatataaagaagctaaagtatacttagagcctcttataattcagctctacatcttggtgtgtattgtgaatgagggagagaggagtatttataggtggagagatgccttgggaatgtggagatgctaagcatctaaatggcatcttcactctcctcttgccatgtgtctagctgatgacggttattcaggtaaagtcggtagaaaccgtcataacaagtcggcaactgacggcatgtgaagtttagggccgaatggcgcagctacgggttcggccaaacccttgctggcccgttttgctccgaattttctcgtgggctttggtggagaacccctcagcccaaatgtagttgcatttggcccatttgaatgagtttcattcggtttgtgggtccaaaactccataagcttgaatatggaagtttaattcacctcctcctctatgtatcttttgtctcaactttggtggttcgtcacctgcatctaaatatacaccaacactcatggaaatggttagaaataagccttatcactatgttggatgttttatatttagggtcttatgctggtattgacggcgttaatttggtacttaacaaccgtcaacacctgtatcattcctcaatgtgacgatttagctttattttcgtatgctcctaatggtttctgctattgtatggttcacgaatcgaacattaatggatctattttatttttattaataaagttgcatccacgtcctactgcattttcttccttctacttgcgttcttattcctccatcctatcacgatattgctccaactagcattcaggtgattgctttttgtggtgccggatttagtcatttccatctttccaaattgaagcgaaaacaaggaataaggaattgacaatgcttgaaccattcatatcttcaacagataaatcaagtccatcaaaaccgcacgaagttttctaggaatacctcacaaatactacagatactttatccgatctttagtaccaattttctaaatacaaacttggcatgttcaccataaacaagcaattgtcatgatattaataaaaatattcctaacacatgaaattttcttatcataatttttttcttcagaaacataaaatagctgggctttttgcactgccacaccaacaagccgggcatggaagtagccacgtcagcgcccgattgaccttttcaacggcaacgactaccatgaggcaatttttgccacgccataaccaatggcatggctgttggtatttcttacgacattactagaaacataatttccagcaattgtgcagaaatactcttggtatattatggttacaaagttcatccacaagcgcacggatataccattgtagcatttcacccgaaagtattccaagggtatcgtatttgtttaatcctgtaggaagattatagtagagagaatctgactaataatttatatgttacttgtaataatcatagtctaagcaagggttaagataatccaagggtagagtgacacacaagcaggaagctactcattctcatactaaaatatctatgctaagtggaaagaaaagagaaagagaatctattcctataattctagtatacatagtatacatgcatcatagttatctgacatactagctaataccctctatctgatgccctcctggtacttcgagaagccacccctgactaccgagttccttacgacaacccgttatgaccatacaaccggggctaaatacggaggagtaccctccccaggaaattaacttaggactatatacacgcgcggaggaatacccgtactgagctgtcaccatcagaggcccacctctcattcgtagcacataaccccaaataatgatatctcgtaatctagacaccacacctaaactaccagatactactctaatatcatcgtcatgacatagagtaattgcataagcaaacactatacccgtaccgatgcatctcccagataagctagcagtataatcagtataacatgaacataatgtaaagttgacattcatatactcagaaagtattccaataccataaatgtatatagaagagtattctaaataaagtacagagcttacaaaagagaagagaagagctactagaggcatacccgaactcttccgaattcttccacactccgatttctactctatttctactccactagcttgagaacactaaactaaacttgagagaatatgagagagctttgcttgaggggtgtgtgtgaagtgaggatgagagcaccttttatagcttgagaatgac

SEQ ID NO: 28818 - DNA, 19069 bp, Oryza sativa
gtatatagaagagtattctaaataaagtacagagcttacaaaagagaagagaagagctactagaggcatacccgaactcttccgaattcttccacactccgatttctactctatttctactccactagcttgagaacactaaactaaacttgagagaatatgagagagctttgcttgaggggtgtgtgtgaagtgaggatgagagcaccttttatagcttgagaatgacggttgtgacggttggaaaggtcggtaatactcaccaatcgtcattggggagtcatctcagccgtccaggagaaccctggattaagtggcgctgcgagggggggagggggttcggccgaaccaagggctgggccgacctggcccaaaatcggcaggtggcctcctcctttgctctcatatgtagacttgtgaattttggcccagttcatcgtgtcaattctgagttattggcccattcatacataagtttgattctcgacatcatccgattgatttattatctggtttgatgtcgattttcatccactttatagttattctctgcaaaaggttagtaaccaaatgctagtggaatattatgattctaacatgaatatgcattgcaagcataactagttctcctctattttggtaatattgacggtcaaaactaatcgctaacgacttgtcacaagtggcgaaaaggttcatttttaaaaataagttcctaggaggtctattattaaatttatttattttaaaggtctaaaacataaaaaaaaatctggccccgcgtgagtttgcttggctgaacagcgaaatgcctactaaattgttgacgatgaattagcggttaattaaatgctaataacaatagaaataaccaccaattaattaatttctagtgatgctaattaattatttaatcatgcgatctgcagtgccgtgagttcgcatccacccatttttctccatgcgaagtcgcgccctagtcgcacgaactcgtgatgatatcatgaacacattatgagttcacgcactcaccgtacaaactcgctgcgtgtaacatcctggcctaattaggatttggcatgtgtggcgcatgagagttgggtgctcatgtttagtaccaccttgtttagcaatgttggaaccaatttataaggtcttttctctccaactatattactctcaggttaactattttacatgaagcgaggatgaaagtgtatataagtgggtggtatatgtaagtgggtccacctgtcggatgggctagctacgtggttatagagggaggggctgagattcacacccctctgcgacaatggtatacacttttttaactttgttcttcaaggcagcaggtgtctgcctaaaagcatagagtagagcagtagtttttaataatcacttcagcggacggccactcatttatcatatatcaactaataatgtagggtttagggtttataaaaaaatcaaaaaaatgatacggtagactaatatgtaatatattgctcaacaaacaagtacaaattgtaataaaaataataattttgactgcgaatatgcatataccaattaaagtttattttgttatttttgttgtaacatgtagaaatcgaatttgactttaaatgtttatggactgatataaaaaaattttcataactatttagttgacatgcgataaaagagtggacgtccacccaaatgattagaatccctctccgctctcagggtccatgtttcgaaggggaaaagtaaaaaccggtaaaattttgagatttcaagacgggacataatcatgtttcgaagcaaattttaaatatattttgagaaattaaaatttaaaatagtaaattttaacaaaattccattggaatttgttaaaaattgatggaaattgatgtaccaccagggtcagtatccggccatccatgggaaaggtaaactctcatactgctagagaatgctaggggtagagatacgatgctgcggttttggtcatttttgtttattcacttttactatgctaatattatatggacttagaaattttatgggtgtgttttgaaacattagaaaatttatggacttttatagcaattggtttaatttttatagaattagaagaattcccatgatccaatgagcccttaatactttacgattttcatgacaccccacttgtccacaatattttgcctttgctttactagtatgagatattacggcatatcaatcctacttttaatcgtacacacttcttaatacgagtacactagtccaaaagttcaagtaaatacacatggaaaaagatacttcctccgtttcacaatgtaagtcaattctagcacttcccacattcatattgatactaatgaatatagatagatatatatgtctgtctagattcattagcatcaatataaatttgggaaatgctagaatgacttacattgtgaaacagagggagtatgtatctattacatgtcgtccatgcaaatgtgtgatagttaaaaaagaaaaaaaaataagggaaagctctatatctatctcttaattagagtaaaaaaaatatctttacaacatgaaaaatgggtgttttgtaaaattttaggaatttaacatgtttgagtatagaattatgattatcccttggatttcttggtacacctttttctcaacccttcctaactttctaaactagtaaattttagaaaaccctatattttattgtcagtgttgtagaaaaccactggtatggtcacttgtcgcatataaccacaggttttatggtctaaattttgtaaaaccccatctttatttaaatcttgattaatttaaccatatctgaaacgatatctttcaaagtagcaaacagttaaactatcaaccttagtcaagaactcaataattaaaaacaattcaaatacactatgttttaaagtgcatagagtaaggtttgtgaaactttacaaccataatacctagggttatgtgccactggtcataatatctagggttttatgcaactttgaaataaaacatggggtttgctaagttttactccttttaaatttatctgtttctttttctcatcaaatgattggaccaaaggttcatgaacaactttctaaatactagctaatgcccgtgctttgctacggataaaatgaaaaatatcacaatattttctaaaataaataaatcatatttttcatgaaatgtgttacccacatttttcctataggaaatagggctatccatttagatttagttgttatgtaatattaagaactaggagaggtggtaggttcaatgccacaccattggagtgagtatagaatcttggtgtgcccaattgtatatttatgtatatgtgccaaaggaatgaagcatgtcatatgccacttgtatgctatttatcgcctttggaagttgagcttggagatgctgagaccaaaaaggatggcaaacaggatgggaaacatggccaaaattatggctgctagtggcagtaggtcatggcggaaaccgaagtaatccttaatgaaggcggccacagatttagtctctccaaatacagaaatctccttctgatgctcatccccaaattgtgtggtaaagaaaacgttgagtgtccacgacaatggggaagtgtagtacaaccatatccaccatcttggaatttgctgccatatcagtaaaccatatatttatgcattttgtaatgctatgtatacatacttacattattaagcaataattattcaggtgagatgatggttttgcttactggtgcaggcacgatgaagccagacatgaggttctgcagggtgtagaacatggatgccaatatagatgccacttggatatttggggtgagtgacactatcatcattccaaagtagaggaagtacagcagcgtgcacgctatggtgtacatgaaccaaaagaacttagctgcagtccatgcataccctatcatgggataagctatgaacatgatcaacaatatttgcaccaacacataagggatctccattgcaacctactccagccagccccaagatgcaaaatgaataacaaatagaaagtcatattaagcccaagcataatacaactaagtcttttacatataaggttaaggtcttgaggacataagatacctgtgccaaggagtaggcccaaggagagtacattcctgcaaacctctccctataaacgacagagcgctcaatggatatgaacggtatcaccgattggcagttattgatgccagtaaaaagagtggtgccgtacatgcaccctagtatggtgaataggccttgttggtcatttctacccaccaaggaaacaaaaaaagaaatgaaaaaaggatcaatgcaaatcatatcaatcatatgcatatgaacatgcttcctctatatctatttacaaggatggacatagtgatggttcacaatacatacatgtggttgatgtcaccttgctgccagaacaatacaccgaagacaatgcaggagattgttatgaataaaattcgcactaggttgtaggaaggacttctccaatatgacaaacactgcttccagatgcaagcctttagttgctccctaaacttctgtggaaaccgtgttgggaaatggagatcactcgtgcctagagctggtttgctcaaactcttcactagagcatccttgtcccttcaataaccaattacttaccatcataccaagtttgtttttcccacaggtaagagtattgttaattacaagtggcgtgatgacacacgtaagtatcatttggtcaattattttatcaagaccactcttggcacccaagccccattgcattttatgtgtaacttgttttggatatataaatggcactagatccaaatgtgatgggtttttaaaaacttacttgcacatggttgattccctgtaaatttgggcaaaatctacccccaattgagcttccatagatgcacaagtaacttcgagcatccatgttgatgggttgtaattatccttgatcttgggtaccccgggaattgtctgaaaaatcaaagagaaaaggttaggtactcctcccttttcaaaagggtggctctttgctttcatatcttatcttttggcaatgtactggggtttatcccctaaactctgttcttgcttaataatatgtttgtgtgttaaaaaaaagatatattcttattctacggttcaaaagaagtgtgtttatgattatattgcacgtcccatcatctactacagacattagaaatcatgacatccagagaataaatttttaatgacacgtaatatatatgtaatgtacaatgtacattggaaatagtgatgcttggagaagggaattgtaagaataatgtgacataaataaattaattattgaaaatacaaaaaaacatatatttatcaaggaaatcaaaatatccacattgcttgcttcatcatatgcaatgtacattggaaatgcaacatctggagaatggatttatacgaataacgcgctctacatatacaatacccaattatatatatacgtagagagagttgagggtgatgatatgttcttcacccacgcccatttaaaaacctttatggctgtaaatatgtaggaatatgtgtattgttgtaaaacttttgtaggaaagtattgcatctttgcatatgtacatacatttctggtcaacttgcctcataattatgcacacatgttaaggatttaatggaatataattttgtagtttagacttaatatatattagtttggatccgttaattatagcacatgcacatgatgctagatagaaaataatggactggaaatgcagacaaaaatcataactagtgattagtttgtaacttcttaaaaacatataggtcatgaaaataatgaaatcagatgtagctagctaggtcaactttaattggttttcatcacataatatgaatggtgatacgaaacaaattttatttatagctagatacttttgtacaagcaatatacaatgaacaagttcaagttattaattgatacctcgaaatagtggatgacgttacatgaatggagtccaagaggcccagcatatatcaactctccaccccttttcattagcataagctaaatacatatttaagataattagttataaggtacttcacttttattttactcatgcaaactaaagaattttaatatcactaatgcacattaaatatacacaaaatatctcccgttattattgaaaaaaatatggaaatttcatgcttaacttctccaacaccatgaatgcttaaaaaggttacagttgtatgctcttagcccagtaaattaagccgtaaagatctatgtactatagcaaattaagaaacttttggtaatgaagacatgtagagttatcaacatgatgtttttgtctagaaaagtaaatgaatactccatagaagttgtaacttgaaatacccctatattgtaatcatgttacatgtattgttgacgtagtaagtttacgtacaaatatgtatcattatttttttcttcatatctaatatagtaatagagggtgtgtgtagttgaacaagtctgctaaaattcctatgaataattaatgtaatgtatgaccactttaaagcgtattttttattccatgagagctatcctttacacttcatagttagtcctagataagactattgagctatatatgtaacacaataacttgaaagtacctcatcaaaggcctcaaatatttcaatacttggttggtgaatggtgcacacaactgttcgacctgtgtctgcgacattcttcaccgcacgcatgacaatagcagctgctcgtgcatccaagcctgatgttggctcatccatgaatatgactgaaggattggacacaagctccactgcaatagtgagacgtttcctttgctctgtagatagcccacttacccctggtagtcctactaaagcatctctaatatcatccaactcaattgtttgaataacttcatcaacaaattcctatgatggcaaaaaaatatgtatgtgttaggtcatagttccatctcaattatgcaatttacactgtaataatatttttgtattgatttacacatgtatatttcatttttttataatttgtttcaacaatgaaataactcactcttcttgtttttgaatcgacttctgttggtagccgcaaccaagctgaatatgcaacagactcctccactgtgatttgtggggaatggacatcggtttgttcacagtagcctgatatccttgcaaaagtttgttgaattttaggataacctcctactcgtatatctccttcaataacaccaccagttttccttccagcaagaacatcaagtagagttgtttttcctgctccagtaactcccatgagtgctgagagaacccctggttggaaagctcctgtgatgttgtgcaatagttgtagctttcgctccttgtaaccttgctccctcatttcctaaaaattgagaatacactcaacattgatttcagcctattatacttctaaatatatgggaataaccatgaagcacatgctaatagaacaagtgaatatattgctctctttgactactgaaattcataacagtcaacaactaagcatgattttcttccactagtaattgtcttgactattaggagtttagaattaccacgggggtgtctacatagtagttcacatcttgaaatgatattgtaagtggtgagaaaggtaacaccatcgtccctgcacaagatcacattattgatgtatttaatatgagatgcatttagtcatagaatgtatatattgaactaaccagtcttgttaggtgccaaagcatttcctacttgtaacttaggcatcctattgtccatgtccttggacatgtctttgcctcttctatcaaatgtggaaaacttatcacgagatataattgctcgggaagttcctgtagctgaggtccatatggtatcagaataacgcttgagagaatggaactatttaaaaacatcaacatgaacatatgctttgataaatatggatagtgaagtgctcgggatgtattatttaatggtatttcacatatcatacttacgtttcttaatggtcaagccaatggcataacctacattaagcaacaaaataaacccaatcaatgcactggcggaaatccaataaaagtagctagagaagtctagtcctcgatccattagtaccctccttccaagtgttacaccagacgttgtggtctaataacatagaaaaaatagtcttttaatgttggaatctaagtagaaggtactcaccttatctaaaagataggctaaggatgcaacaacacgtacctttagccatcgtggtgccaaaaactcatttccagtcaaccctatctcagcatatgacaatggagagatccaaaatccccattttagccaattaggcatagatactgtaaaatatgacacacatggttttaattagcaatgattgtttaatacataaccatgtacacaagaattagtagaaattctgaacgatgtcttgttagcatagtagggcttatggaaaagagacagcggcttacgccgaggaatgataaagcccccaaatagaaggatgactagaaatgacatggtaccaccaactgaactagccaccattgtttgacagtatgaggcgacacatcgaaacaacgataatgctccagtgtggacgaggaatagaatgaggagctggcaaaaaaacctaacacagaaattgagtatgttaacacacaacatagtcattgcatcttaaagatgaggtaatacgaataaacactaaaatagagtctagatagttttatataaagaaatcctgtagtcttattttggtagccaacatcattgaaacccaaatagtaaaaataaatacacctatgcatatcttgaatagactggaaaaatgtttgccctatatatggtggccctcgtaggtatgaaaggttcacacataagaacaaccggaaagagttgataatatatacagtcaaatgcgtacttcatgtgtacaatacttttacaatagagtgtaatttaacctggatgcttctggagtatagccaatgaggtagtaagatattgatgtccaagttattgactcaactaaagaaagtggaatctttagtataaaagaaggtattgcataagcccacgccggatagaaatagtagtctctttgtttgtaaaagacgggaagtctgctaactgcaatagccaactcagggaaaccattaactaaaagaagaatgagcgcatagaagagggaacccatataatagtcagcatgggccctatcgacccccatatgtgtccgtagaaacactgtcccagtaataacagcaagtaatccaagctgaaaaaaatgtaatatgttaatttgttgagaaaatgcaaaaactaaagttttggctcatccgaattctaaacaactatattatatactactatgtcccataaaaggaccaatcctagctacgaacctagacacaaggttcatagctaggatttgatttttttatggaacggaggagggtattatgcaagatacactcttctaacaaaaacctcaattccttgaaaaaaataataatgccaaagttaatataattcatgtgtcaattgaaatataggaagcattttaaagatatcaaatttcaactggaaaccttgatatattacaacctccattgtttttggtgttgatatagtactatatgtagcctaaattgtacatagtaaacatgagaaaacttagctacgtgacaatgagtgtaacatcataaatcaggtgtcaaaaaccggatgttttgtatcatagaatgcattcatctattctcaaaactatgaacatttgaactgaaattttctccaaaagagatatttctacttccttacctgaacaacttttgttatgtagatgaaggcatttcttctcatgagaagaatttcccttgcaaaacatgccttgaggagatcccacttggttagagagtagatatttaaggacaaagcattattgtatacttctgatttatcaaagggattcgcaagctcttcaacaagattttgaccaacttgagatgctttaaatttctcacagaagtgatcaatagtaacaaagttgtatgtttcctcagtacgactccagtattgttgttggtctttcttagataaaacctatacgcaagtttagaagagaaataataataagaaagtcaaagacacatcatactaaccaatacttaactgcttaatattaaaaagttgtatcttgaacttgtaccaacattgtaagtacattatacaaaatgcagagactaagtaaaagagcatgtctctataaaacaatggctatttggaatactatagaacctaaaatgtccaatttagtttatccatattgcatcgaacgaaatccctaagtaggacaattgacatggtagattctattagaattatgaaagctcaaatatgcacttcttatcatgcctgactaatttagataaaatgcatggctcaagtgtcttgtatttctccttttctttctccaatatcttatcaaataaaccattaactcatgttgtttcaagttgggagctatacacaccaactcaaatacacacacttaaacttcaagtcattaatttccaacaagtacttgatgctgatagtgttcattttaaacaatctcacttcgctgtttagtcaagactttttgaactaataatacttttctcatgtacctcctgtagaaaatcagctgctccttttctttccgggcacttgaacccgcatgattcaaaaaaattcataatgcaactcttagacccatggtatacaatttttccttcagccatcaagataatatcatcaaaaagatcataagtctctggtgctggttgaaggagagagaccagtatggtagactctgagatatgagccacttgttggaggcaagaaacaatttggaaggtggtagagctgtccaacccagttgatatttcatccatgaatagtgctcttgaaggtccaactatcatctcccctggttccaagatgatgtttcgatataaataaaaggaaaaccaagcatcttgcattgaattaacaacttgacttgtcccaaaaaaattgagtttgtatggcataaatgaagataaccctattccttttgttttttgtttggaaaaaacttgctagcctgatacctttagttaggtggctagcatacatgtttttgtgaatagaaagtatacattacctatatttgtttttttattggaacactacctgtatttgttggttagctagagtgtagttctatagtattatgtttagcattggaatttacaagggtgtagatcctcccatacataattgcggaattttagttgttgaattgagtgttttaatttaattacaactatatttcaattgagatgatacaaacgccatcctggtattggtatatatacacggttaaatcacctgtggttagtctcttcttttcaccacctgaaatacctcttctcattatatctccgactattatgtcagcgcaaatgtcaagtcccataatctattaagcaagagatagattatacataaggttaaaaagttatgtactaagatccctgagcattgatcattggactgagcattcttcattggaccagttaccttcataatgtaatctgtctgcatgctcctttctaagccttccacagatattgcctacaaaaatacaaaaatacctaattgaattgtaatggtagagcttatgccatttagattacaaatggctaaacaccaaactattttttccaacaccaaactgaatgaggaaaatgagacaagttttcactgttgtttagatacactatccaaataccaatgtgttgcaatgaaatttaaaaagtatgttataagttttaaatttgaaatgtcttatataattcctaatcaaatatcagttcataacatattaagctacacacacaaatatgtatttgtcctcaaaaggtcccttcaactcgagaggtggtgggagtggcagagtcaccaccatcactattggcttcttttacacaactagctaggtggcccgcgcaattgcgcggctagcacccaaacaaaatcatatctttaacggtcatagtgctttcaggcgatatagcaaaacagccataaagactgttcattgtcattttatgaatgaattctaaggcttttatgtttcagttcgccaggttgtctcttgcctgctcatggattcagcaggcagttcaaaaggttgacctatttgggaatctccggatctatgcttattttcaactccccgaagcatttcgtcgcttgctacgcccttcctcgtaacccttttgcttttccagcaatatgtacatatctaagtaattgtcgttctgtcataccatcatgaaaacgaaatttccgtttttcttctagacgactgtatcagcacctagttcattactcttgatggagggggaggatctaccttcttagatttctttttctatttatttttccatctaggattagaaccgtatacttggtagattatttttccatctaggattagaaccgtatacttggtagatagtaggaacggcacattatggcaaaaaaaaaagtttgattcagagagagaggaagcggcagaaattagaacagaaatatcatttgattcgtcgatcttcaaaaaaaaagataagaagcaaagtttaccctttgagtttgagtgaaaaaacgaaaatgcggcctgactattctagaggattgtgcgatattattgcggaatactgagcagaggctggaacaacccatagaagtgtaggggctgcttttacttccgcacttagctactctaggttggggagtagggcccgggggagaagttctagatacttttccatactttgtatctggagtacttcatctaatttcctccgcagtcactaatctaaagaaaaacaaaaaaagaattccattgaattgtatttttattgatcaattagaactgccttctagaacgtataattgtctcaaaagggaaatgggaaaggaattattcctttagaaccatggaactcccgagcggttgtggttgtacctgtacttgcagaaatccgtgtcccgcccagcaagaaaacggctgcgcattattttactaacgcgcgacggagcaagaaaacgtatgcgcgtgtacggaagcgcaacggctttcgcgctcatcccttgcttcaaaactacaggttttagcccagagtttgctggtcgccaaagacgagagcttcgcctttggaagcgccagtagcgtgcttgataaaaaggatctagtgtctatgccaggttggtaaaccatatagatctttcccaaacaaggagtaggggctagcttgtaagccacgacttagtactacaaggattcgggcgttggagggaccgttttgtcttttgtgccgaagctatttataaatcacaggccgaaaccggtgaactttgactcgtcattcaacactgcatgtagactgaattcttcaccatatacaaatggagaagagacaatagggttacttatctcttatttatgtagatttacaccacattccgtgtagatttacctttggtatctatgtgcgtagcggcacaaaatcgacgaagattaccatattgatattcgggcgcatgataaacatcggtactccagtgcatttccccatctgattcggaataaatatgtttttgtaccttttctttaaaatgcaaagtgggcgttccagcacgaatctccgagttctctctcctccgactttcctagagcctccggtagcacagccgagacagcgacgggttctccacccatacggggatggagcgacagaagcatgcttcgtttgctttttcctctccatggactaagataagactagttgttggtcgtaaatctgggaatagtccagactgagaatatgcatcatctcgttagagaaggaaactcactctagtaagatcaggcaaggcagcatatgatccaaacattcactcgctctaagcacgggaatagaataaaggtatgggtcccccaccttaccatccgttctgtcagaccaattgctaaagagttttattcgatttgagagtttttactactcaaagaacttccctatgcaatggtgctttctagttcttatctgcacctacatttaggattaaccctattcttgataatgggaatcatgaacatttcagtatgattttacttaagatttattaaatagctatccccgtatttctaattatatagtttttaaaagtcacaccagctgctaccccttacttctgtcatatccttctttattttcttgctcggtctaccactatttctattcattctccttgaaacctttaaaatttggatcttatatagttttttgagtttattatctcgttgggtttcgtttttataatttctagaagtcccgtcaaacgaattatactcctctacggcccgtccgctgtcttttctctttattatcattgggattttataaatcgaacataattatcattccggttcattttttactttctataagtctcgccaaaccttcagcaattttgccattgtactcctttatggctcgtccgctgcctcccttctttattgtcattgagattttaaaatcgaacatgattagcattgttttttttactttttagtagttccgaatatttaaaaattggaccttgtagtttttattgggtttcattttttataatttttagaagccccgtcaaacgatgccactatacttctctacggcccatccgccgcctattatttattgtcattgggattctaaaaatcgaacataactatcattagaattcattttttattttctagaagtcccaccaaccatcggcggctctgcaactgtactcctatacacgctgcacgctacttctcctttttgctgtcattaagattttaaaaatcgaatatgattatcaatgggttttttttactttctacaagtcccggcaactgccttacccgtttgcttcacggcctgcctgtcgtcccttcttttaatcatcattaggattcaatttggtgctttactaacagtttttatatgtcgtatcaaccgccaccactctattcttttataggcctgttacttaatttatctcgtcatgtgttttagatggtcatttttttttcaatagtctttattttttatcatcaatttttgttatttataaattgtattcctaattgaaatcttttttattttttaatttcagaatttatttttttcaaattttaattaataccgtatagtgttctttttaatatttttattttttgaagtccagttgtttcaaaattgtattcctacttgaaacctcttttcatttttctaattttggatattattttattatgaattttaattaatgtcgtattggcttcttatatggactttcaatattgcttatttttaattatgaatttcagttgattttaaattgtattcctacttgaactcttcttttctttttgctaatttcagattttatttttatttttattccgaatattaactaatctcgtattggattcttatatggatacttcttttaatattgcttatttttaattccgaatttcagctatttttgaattgtatttctacttggactctccttttctttttctccgattaatgtgagaatttctagcccccacagcgaacgtggtgcctcttttcaaagctgtcttaataatataattagcatggtggcccgcgaagattacgcggctagcatcgttatattttctcttatataatagcatatatgttttatcattttattattcaaatatattaaaatgacaacataattttaaattttgcaataactttacaaaactactaatgtgtaatatttatattttattttatatacgtgttagttattaattatttttaatatcaaattttagttatttgtaaattatatatattcctgtatggactctagactcgtcttttaatatttcttttctttaattccgaattttctgtaaattttatttctatatagactctatgctcttctttcaatattatttattattatttctaaattttcattatttctaattgtatttctatatggactctaaactcatatttcaatattctttaatttttaatttcgaatttcagttacttctaaattgtatttctatattgactttaaactcttcttcccatgtttttcttaatttcgaattttagttatttgtaaattatttttttatacggactctaaactctacttttaattttattatgtttattccaaattttagttagttttaaattcctatatggactctatactctacttctaatattccttatttttaattccgaatttcaattatttcctaattttatttctatatggactctatactccacttctaatatttcttattttttaattctgaattttagttatttcctaattgtatttctatatggactctagtctcctcttctaatattccttattttttaattccgaatttgaactatttctaaattgtatttctatatggactctagtctcctcttctaatattccttattttttaattccgaaattcagctatttctaaattgtatttctatatggactctgctttttctttttctccgattaatgtgagaatttctaggccatgagagcgaacgtggaggtttctttttctattcctttaataatataatagatagatagagatgacaaaagaaagcattcctataacagagacaaggggaaagaaaaaaaaaagaatacataaatgggtggttaatgtttaccttcatatatgtatctatgtcagggtcaggggtaatcccggcctccttctccctcctaatgacttccttcatgatctctagtttgcacaagaaaaataacgacacttggttaagttgagtaagtaaacaaaaatgagacagataattaaatgtgctatatatacctgctctagtgccaacgccctgaaaccttgcagagaagtcaagtgtctctctgacagtcatctcagggacatgaagatcatactgagaaatataagctgatgtcttctctggaacaaaggtattcagattggcaccattatactcaacttcaccggtcaccctgcatgcaaaatgcattatgcaatgcgatgatatgataatacagcgagtagccgattattgatgatcaaaatatgtcgctgcagctagtaggctggttacttgtgattagatacttaattggtggaaggatcacatgcaattggctgggaatgaagaagtaaataaccttgagatttttgtcgagctttcctgcaagggcgagcaagagggtggttttgccgcagccgggaggtccaaggaggagggtcagcctgcacacaacacatacatctcgatggatgatcgatcacctcgcgatgaccatgcatgagaggctaatatcaatagtacctggaaggcttgaggattccggtgacgtcgttgagaatggggatcctcgcgtgcggccggcggctcaacccccgcgcggtggcgagcacggtgttaaggagcgtgggcagcggcttgccggaaaccacctggcagtccgccttcacgcgcacgttgagccaccgcacctccaccgtcggctgccggacgcccaccctctccatcctccgccgctgcttgcggagcagcctcaggttgtcgcgctggatgtcggccaccagcctctccaccagcacccgccgttgcgccgcccccagccgccgcacgtccaccgcctccgacgacagcaccgacgtgcgcatcctgtccaaggtgggcagcctctcgatggccgcccatctcagctcagcttcctcttcgtcgtcgtccccacgatgatcccaccgcaacgacgacgacaaggacgacaggctcctgcaggttgccgcagctcgcaacgatgaaggcactactggtgcttcttcttctgcttctgcttcttctcgttgctgctgctgctgctgcttcttgtcctccatctcaaccacctctaattggctcatcttaatttctggatgctgctgccgctaaacgttgaggagaaatttcagttgtactgaattatttatactgatgattgttgttgacagccagcatcgatcgacgtcatccaaccatacataaaaaaacgagcaattctactatgtttgaggatgtaccatgagataccaaaaatttagtgtaaaaatttagtgtaaaaatttggtaccttatgataactcatactctctctgtttcaaaatgtttgacactgttgacttcttagtacgtgtttgaccattcgtcttattcaaaaaatttaagtaattatttattcttttcatatcatttgattcattgttaaatatactttcacgtacacatataattttacatatttcataattttttttaataagacgaacggtcaaacatgtgttaaaaagtcaacggtgtcaaacattttgaaacggagggagtagtacctagataccaagagataccaaattaatttacaatagaaaaagtgctatctcatgataccgcctcgaggaccgtaaaaaagctctaaaaaaaacatgtgttgcttgctccagagcaacttccattttttttccttctttgttgacaaaacgacaattaattgataacatatactatatatcattattatgggcatatacatattgcgtggacaaaatacaaacaactcgatcgatcgatttgtacatgatggggctacaggtcaaattaacaagttgtgtcgtcgtcatgacacttgcatcgatcttcatctggatgtgttgttcctggatttttctaatcgatgctattgctaag

SEQ ID NO: 28819 - DNA, 11924 bp, Oryza sativa
acccagcttgccacctgcgagaaccatagtccatagatgcccgcctacgcccatcaccgtcgttggtttgcttggccgctggtcgcccggcacaacgacgtggggagaccggaggctggaccatgggagcggccatgtggtggtcggtgcccatggatgcgtagagtcgtggagaggagaggagaggagagcacatatgatggcggtggctgtgaggagaagtgcatggagggttggaggctatgatgatagggttgttaagatgctgagttaggttttagcttttatatcccactattactccatgttgggcttcttgggcttgcaatgagctgtattttgaggggtatataccttcttcggggcacacaggtggattttgctagacacttgagacgtgtgtggtggaaagaactagaagaacgtgcacgctcttgctgcctcgccttgcctggtcaggcagcacgcgtacgcgacacgctcatggatggtttcgccaaaatgaggagagggagctttcttttgcagatgttggttgctacgaaattcggtgtttgtttttttggaaatatagtttttcacacatattgaatattctgatgcgtggagcggcgtaaagtccgaataggttacacgcgacttatctgattcggttacgcattatggagatcatgcaggcgccctgatcactcttcttgttatctctatataaaccgagtcgtcgtctcctcacaacacacgtgaaaaactgtctagggtttgcctcctcctttgtactgtgtcgtcgctcgtagtctactctgtctcgctcaccagcgtgcactggcgatcgagagagtgggtttccgaaaccttcacctttgacgctctgcatcgggataaggtgctaataaggtttttaggaagcacttcgcgcgactgcttgctagtcttccacgatggctcgtcttcatctacacggatgttgcgtgtcgtcatcaacatcctataccacgccgttgttcatgtggtgtgtgttactccccacccttggcaaaccgatcctcttctgcagcagaactagaattgttggtatgtttcgaccatgttctatatattcgatctattcgtgtgtagatgtctcgtatacatgtctagatcacgtgattcggttatgctagtttacttgtttaatgtcatgatctatttacgaaataaattaaatatacatgtgtttatatttccaacagttccaactatgaggatgatgttgtggacggtttggaacttaaagtgacatgctagccatggtaactagggaagcacggaccaacccgcgaacccgcttgtagataaaattagtgggtaaccctactaatttgacatataaatgggtttatgggtcgactcacttgtatctctagatgcggcaagctggtccacgacgtggaacccactggttaccacttattttacatactaggtgaaaccctgcgttgctacgagagtttactatgataaaaataatgtgtaatatagcttaaacaacataagttgatgtgatttaaatttaagttgtatatagaatgatgattcaaatataaaaataaagatgatgtggctttatgagagaataaaagaaggaagataatttagaccatatatctaagggcttaaaaaattgagatgatatggcttaatgagataagaaaatgatagataatttgaaccatagattaatcatctaaagactaaaaacaattaatgcgatatgacttaatgagaaataacattaattaagtgaggatgaactatataggtatataagatattataaaaaaatgatagagagatatattgaaatattatatgaattgtgtgggatgattttacatgcttacattttaaatctctaaaatttaataaattatacaattatagataatatagcattcttgcatattgcttaactgtaatactactaattattagtggatgattatgtaacatatttgaattttaagttttaagaatcataattttaagttttaagaattacagggttataaattgggaaaaatacgaattaccccctgaactatcgcggtcgaccaaattaccccctaaatcacaaaaccggacattttacacccttaactagttttaccggacaaataaccccctaatcaatccggagtggttttacgcctacgtggcagtctaatcagcaatactttttattaaaaaaaagtcagtggggcccacctgccagattctatctcctctctatctctttcctctcccacctctctctatctctctcacgccgaaggccgacgaggaatccacgcgccgacggaggccgagaacgagcggcgcgccggcggctgcgagcctcctcgcggcagaggccgagtatgaggcgcgcgccggtggacgccggccagtcaagctcacgagctgggcctcagcgccggacttgtgcaagaagatggcgatggtcgatgagcggcagccagcgccggacttgcgcgagaaaatggcgagcgcggcggccggactcatcgtcttggaacgacacccacaagaagatggcgagtctgcatgtagttttcctatttatgttgataacaaaccagaaaagtagcagcagcagtacgcggcaccaaaatctcgtcttcctccgtgtactgatttgatccaatcttctgagtgtttgttggcagctagaagtaggttgttaggattttccgggcgtggctgacaaagtgtgagaaagcacgacagcggcagcgggctcgtcactgcctgcgcgcgagctccggctccgccgccgttgcatccgctttcgcccgagttccaccgttggccgccaggcgagcgcatgcaggagtgcttcggccgacaacgtgctgctgtgccgacaaggaggaggacgcccggccggcgagcttgacgggcttgccgccgccgcccgagctccgccgtgcgggagtacttccgctaccgcgtagcgacttgctgcgatgttatgccgacaaggaggtggaggcccggctggcgagctcgacgggctggccgccgccgcgtgcttcagcagcatcccctgagctccaccgatggccgacgggcgagcgcatgcaggagttcttcggcacagcgcggcgagatagagagaggggaaagagatagagaggagagagaatctgtcaggtgggcccccaccgacttttttaataaataattgctgtctagactgtcacgtaggcgtaaaaccactccagattgattagaggggttatttgcccggtaaaaatagttgatggtgtaaaatgtccggttttgtggttcagggggtaattcggtcgaccgcaatagttaggggataattcgtactttttccttataaatttatagtaagagataataagtaggttcgtgggtaagcccgtttgcatctctacgtgtaaccaccaataataggtatacctattgttgatggttttaactatgagctataccagaagcgtatggtatatttgaatctgtagaccttttaggtgacgtgcatatataagagaaataaattaaaataatgttgtacttctaatacgcttaaagcattatatacgggcataattaacatgcgccgattttctagtttattatgtgggccagtttcgtacttcctggttaagtaaactagccgcaatgtcgactttccaatcctcatccgttcaaattgaggtgcaccgtaatgtctactgcgcaacccgctcgatcagtaacgaactgatgagctgagcttggaaaaggaaaaaggccgaaaggagatactccgcagtactccctccgttttaacaccattgactttttaagtacatatttaaccgttcgtcttattaaaaaaatttgtgaaatatgtaaaactatatgtgtacatgaaattatatttaacaataaatcaaataatatgaaaagaataaataattacttaaaatttttgaataagacgaatgatcaaacacgtactaaaaagccaacggtgccaaacattttaaaacggagcgagtataaagcaagtcaaagcatccgccgacatgtgattaaacacttacaacgattatttgacattgagcagaggtcgcttttacatactccgcacaaagtcaaaccacatccataacaccataaccaacacgccgcttcagtttagctttatcgacgtattcttcttcttcaaacgcatccagatgacttgcgcattgtttgacaagtgttccacagcaagaaagacagagattcagcaatgcagattgcaagtggcttttcagtagtcaccatgttcataaataaatttcagaatatcgcagcagcctttgaactggtgatcggcaaaccagttgggcacttgagcgtgtctgcaaaccgaccaagcattggtcaactgaagttgaatcggcgagcgtgcagttggtagctcgcccactggggcagctacagctgctgcaaactgcatctgcaaaatactcctagaacaggtaagctgcacacaggtgagcattgcaggggggagcaggctagtctggataatgcaaatgtcaacggagactggtatgaaacaattgaattaacacaactgcatctataaaatgagatctatcttggacctaacaacagcaagatcggcagaagatctccaagctactagtagcatggactctttgcgtgtgttgataactgataaagtgtagagttccagaagttgactaacttcaaacaaatttctttcaataacatgacaaatattacttggtccatggactcgtggagagccggtgcgtggtaagcggcaatgccaacgtccaacggttgggttcttcagattagtcagacaaagtcgaggataaagtgcatgattgaagaaaaatatgaggatcagtgtgtttccttcaactgtgaactaaaatatgagctatgcagatagaacaaactgaaccgagaagattgttccaaaacagcaatgcatttatacacaaaaaataatagggctcccaaaataatattgtagtttcagtgtcactaccctaagatgataagattctacttactaccaggcaagctttctttgacttgctgaatcagcaccatggcaggcgttgaaccactttgacaaaagaggggaaaaaagcccgtgactttgcatcaattcagtgccacatgcaaaattgtaacagctcatatgcagcctgaatcgcaaacgccaaagaagaaacaataaccttgtttgttcgatctccccatcagaaggattttgttttgtattttgacatgtggaaattcgagacgatagtgcaattccgaaagaaaaaggacaacctatcaaactcaacgggccgtttccaaatttgctagtgaatgcaatatgtcgggaaacaagtcaacccaaatattgtattctgtatgtatggttggtatcaaactaaccagtatcgcatttgtctgtttgggccaacatgattacaatagcacactgctacactgaagaaatggtagattagtaggtaagacaagtacaaattgtttgttggaatatccagatgtgtgcttggaccaaaccaaaattacattttgccctacataatcaaatactaccagtgaatgcaatttcagaatgaaatttcatcccccgccagcaagcacatatttcgcccgaaattttcgggttttttttccattttttttgaaactggtcaaaaaaaaattcaaattcattcgaaattcgtcaaattttcaaaaaaaaagggggccaaaaaagtaccgaaatttcagagattttggttcttttggccacccccggcaaaaatcacaatgttgagattgctaaccctgactactacagcacccagcttgatgcatggctgaaaagccactttatcttgttattatgcaaactatgtggtttagactgtagagattgccaaaattaacaagtgaccaacaccatatcctttaacctttatcgatttgtgcagaaagagaactataattaatagtaacaaagagggaggggagggttcgcgaaccagtagaaaacggctctctttgccctgagcacgttgctcccgttcttcataaggattgggttgctctgcccggtgagtgcgcgcccctcgtgcgtgtgtagcctatctcctttcttctagtcggcgtgcacgcgatcacgccgcacttttccaactgcaactagtatagcaaatgcagtgagaattataaataaaatcgcatgcttttccaagtgcaagtaggcaaatgcagcgaggattataaaattgcatggaatggaaggtgagcgaaaggaatactgaatacataaacaagcaaaaacacgatccatcagagcgtccggcctgtgtgctcgcttctcgaccagtgctgattgaccaaccaaaacctccgatcaccttgtcccgtactgaaaatgctccgtttttgacttgtgcagagttcactatcgttgccacgaccatggtgacgatggcatcacactccgccattgcaatggacagataaatattcccccctcaagctctttgtcttctcctgctcctcccgatcccaatccgccattggtgggcgccaagctcagctcgttgctcttcttcttcttcttcttcttcttcttcttcctcactcgctgcccactcattgggaaaaatccgagctcggattgaggtttgttggtaagacggacagccatggaagcggtgaggtgttttgtggtgttgtgcgtggctgtggcggcggcgctggcttctttgggtggcggtgcggttgatgcggcggcggcggcggcggcggcgcaagagatgcggcgaggcttctcggcggcgcacgaccggtcctactcgcagttcgagcaggtgctgtccgaccccaccggcgtcttcgccctcggcttcctccgcgtcaactccaccatgctcgacctcgccgtggtccacctcccgtcctcgttcccgctctggagctccatccccgaccgccccgcgcagtggtccgcgcccgcttcgctctccttcgacggcgacctcgtactcaccgaccccgccgacaacaaggtcctctggtccgccggggccgccgccggagccggcggcgaccgcgtggtgctcctcaacaccttcaacctccaaatccagagcggcggcggcggcggcgacggcggctcgtcgcccggtatcgtgtggcagagcttcgatgccccatcggagaccatcgtgcaaggccagaacctcaccttcgcggcggcgctctacacctccgaccgccgtttctccatgcggatggggaccagctacttcgggctctacatcgagccgcccgcgtcgtcgtccggcggcggcggcgtcgcggcagcgatgtactggaagcacacggcgctgcaggccaaggccgcgatcgtggacggcggcggtccgacgtacgcgcgcgtggagcccgacggctacctcgccatgtaccagaaggaagggccacccgccgaagtcctctccttcgacaccttcaaccatggcgtgcgggcgctccgccgcatgacgctcgaggccgacggcaacctccgcgcctactactgggacagcaccggctcccggtgggtgctcgactacaccgccatcaccgatccgtgcggcctgccaagcacctgcggcgcctacgccgtctgcgtgccgcccagcggccggtgcgcgtgcctggccaacgcgacggacggctcgggatgcgccgccgcaaacgtcggcggcggcggcggcctctgcggccgcacgggcggcgaggtgggcgggctgtactgggaggtgcggaggcagcgcgtggagccggcgaacaaggaattcctgccgttcgagcactcgccgtcggcggcggactgcgaggtgcggtgcgcgcgcaactgcagctgctggggcgccgtctacagcaacggcacggggtactgctacctcatggactacccggcgcagatgatggtggccgccgacgagaggaaggtggggtacttcaaggtgaggagcctggaggaggcggcggcggcgagcgggggcgggagggcggccggtgtcaaggcggcgctgcttgccgtcggcgtgacggtgctggtcgccgcggccgcgttcggggcgtacagggtgtggaagcggaggtgccggacggccgtggacgccaggcggcaggtcgtcgccgacgacgaggggctctcgccgggcccgtacaagaacctcggatccttcagctccgtcgagctctccagctccttccggaggtagccagccagccacctgagatgtggtgtgattgattagatcgatgagatcgctgggaaacagacgccgtggacggagaaggcaaggcaaagggcggcggcggcggccgctgatcggaagaggcaggcccaaattacggtggcgatgacttgggctagtgggctacttctgtttttggagggaatgagggatgtctcttgtatgatttcggccagttttgatcttttcgttaggcccatcatattatcctcgggccattttctttcctgtacaaatttgcccctccatctaaaaaaaggaaatttcttccatgctatggtgatttgtgaacacattggtccccatcgtttggcttatttctaataagccaaaacgacttattaaaaaataaaaataaatttatagatgaaacttttataaatgtgttgtttgtgacttaaaagccaatgttataaaagaaactacgttgaaaatatcttaaaatcaatctcaaaattaagtttgaaaattcaaaatttggctttttttaggtgattaggccatccgatgggagccattataccatctcatcaagtcattattatgcaaaatttaccgtcagattatacatcatgcaaaattgtaatgtcagaatttacacggatactccctccatttcaaaatataagacacaaccacccttgacccaaagactaaaaaacaattattatcgcctctttgtttgaatcaatccaactaatacaatacatgaacccaatagaattaaacatattgtgagtgtacatttaaaaaacaataatttaggagaggagagatgctaattaattactatgcatacatgcatgcattatattataaaacacctttaaaaagtagttgtgccctatattttggaacggaaggagtaactgttaatcttgtcttaccaacgttaaaacacagggagcttaactgattagtcttgagcaattttgaacttaaaacacagggggcttgactgattaaattcggcaaattttgaactcaaggggcttaactgattaaactaacacaggggacttgactgattaattaaacttgggcaaattttgaactcaagaattggcagtgcttgctgcaaagtgcggaagggcctaactgctaaaataagggtaacttataagaaataaagtggtcttttatgcaaaagccgaggagctgaactgcaaaatccaaggagcaaaatttaaatttgaagaattggcaggggccgcgcgaacgcgtaccccctctaccacaaattatgacgtccactctcccacttggggagatggtaagccagcgcacccaccaagtgcaatgtgggccactagcctaggccatgacccttcatgatcggccatagaccccgtccaggtaagtatggagcaacggtgcacctggccttggttttatagcgtgctctcccgccccagcctcctcgaacaagcgatgtggtactaaaaaaacgctcctgcgtgctgcggtttggaagccggggaattcgagtccggacacagcatatgggccgtattgtgtgcaggccttctcgtttgggccagatttatacatacaccccgaagagcagcagaagagagtaaaaaggaataagttcacttcatgaccctcaaatgtgatcgaaatctaatccatgaccctaaactacaaaaccggatatctcgacccccaatctcctaaaaacggtgcaatttgactccctgggcagttttgggaggcagttttgctgacgtggcgcctacgtggcaatattgaccgagtctttattacaagtggcgttgacgtggcacctacgtggcggtagaaataaaaaatatgcgtgggacccgtttgtcattttcacacataaaaaatatgggggccactgacatatgggccccacatgtcatcctccttccttcttcctccctctctccttctctctctttcctccccttcttcggtgtggggagcggcggtgatggtcgatggcggtggggacgaggtggtggggagcggcagctgtggcggtggggatgaggcggaagggagtggcggctgtttcggtggggacgaagcagtggggggcggcggcagtcggtggccatggggacgaggcggtggggagtgacatctgtggtggtggggacgaggcggaggggagtgacggcagggagcggcggtcaggaggagtggcgatggtggtggggacgaggcggaggggagcggcgacggctgtggcggtggggagcggcggctgtggccgtggggacgagacggagaggagcggtggtagctgtgggtgtggggagcggttctccggcgagtgtcacgctcatggcgctgatcgacgagatggggtcggcgtcatggaggaagtcgaccggcgggggttgcccttggcgtcgtcaatggctgaagatggaggcggaggttgaaggcggcggtccacgcgctcgaagccagcggcgcagccgtgctggcgtggaagagggaggcggccacttggggccgctgcgagacgagcaggacggcgacggcggcgggccacaagttcaggccttcgagcgcccgccaccgtcgccgctccggccttccaccgctcgccgccgccgctcgagcccactgccgccgccgctcccgctgccgccacatgtgagaaagagagagaagggagtgagggaggaggaaggaggactgacatgtgggccccacatgtcagtgagcccacatttctttttgtgtgaatgactaatgggtcccacgtatattttttatttctaccgccacgtatgtgccacgtcaacgccacgtgtaacaaagacccagtcaatattgccacgtaggcaccacgtggcgccacgtcagcaaaaccgcctcccaaaaccgcccagagagtcaaattgcactggttttagaagtttgagggtcgagatatcaggttctatagtttagggtcatggattagatttcgatcacatttgtagggtcgtgaagtgaacttattccgagtaaaaataccaacttttccaatcttataaggacaacatgtgaaatgatcaaatcaagtccattggattcaagaatgtacatgcaagtatactacgaagcgggaaaaaaaaactaccatggctcgaactagaactgaaatcagaagcctgtaaaaacaatgttaataacaattaaacaagactggcccctacgtgatcctaaacacatcataatcccttctcgaccaaccatccatctggcgtataacagctggtacacgtgtcagactacagcactgcttcgctgcctctctatgcaacagtagtcatcgatggcccgcggcagcggcaggaggaggaggatgaggatgttcttctgcctgtccgccggcggcggcggacggcgcgggctgctcatcggagacgacgatctccagccggtcgtctgcggctgccgccggttggagcgcgtcggcgtccgacgacgaggacgcggtggcggagagctgctgctgctgctgccggaaggttgcacgcgcgggggccggggtggagggcctggcggcggcgggggggcagtagaggggcggcggcagcatggcggcgggggaggggg

SEQ ID NO: 28820 - DNA, 21414 bp, Oryza sativa
cccccaacagcaaattaagccgacatcagaaaccgtattgtcttgctttttctataaaaaaaaggatataaattgttttagaacaatttagagttttgttatttgctcacggcattcttaattcaattcggcactttgtgcgacaaggaacatatacccacccataaaaaatatttaatatatattgaagtgaaaaatatgtgcaatgagtagtacttaaaaaataatcatatttatcgagagaaagaggagttaagataaacggaaccaagcgtgggaagctaattaattcattgtattgatttctcattggcaatcaatataaattcaccagtatatacaaatattcatttaattaagatataagtaacaatacgacactataaaatgcttctctagagcaccacataattaatgaactattatgacgatatatcaggttccttttaaggccctttttctgctgaatggaatataaacgatatatgcaaaaaaaaattgaatggttgaataattggtgatacttatttaagagtatacacgaatttattaactattataaaatttaaaatggatttaaaacaatattttaagaatttcatatgtagctcgagaagcatgacactaaatagaatgcgacgtccatggctccaccattagataatgaatgtagtgaagttggtatgaaactcaagtgtgaacgtaactatgccgttgattttttttactcgcccgcccaacatgcggtgcttgcagcttcgcgaggcttctactggaagctgctagcgtcttttgagtactgaagtacgaatcgaacggttcatacagtttgctgcctgcatctaacggtggacaatttgcagcttacgtcgctaaattaggattcaagaaagatcaattctttcactactttagatttgccaagagacaacttcaaccattattttaacaacttcaaccattattttaagaactacattatgaaaaagtagtgtgcactatctactggtataaaacaatctgaatcattgatctcgtttgattagagggtttcagatatattactaccacctcaataaacaacaatagtagaaacatggagggtattattataaaaagaaagatgcaaaggggtataattgtcatttagccgtgattaaacttttttttctccctttttagcttttccgatagaatatgagcaaagccatcgcaatgaatgattatagaacgatttagccaagaaaaaataatacataaatactccctccgtttcacaatgtaagtcattctatcatttcccacattcatattgatgttaatgaatctagacatatatatctatctagattcattaacatcaatatgaatgtagaaaatggtggaataacttaaattatgaaacggaggaagtaatagttactcttaatcatggtattagtaaattattaatttatctataataatactggtagtataatactacagtattttaatatatcctctaagagagtgaaaactttacggaatacaattttacaggttgtgtcatattgcaacaaaggtaacgtaagttcaaagtaaaatatgtctattgcaactaaggtaacatacgctcaaagtaagacaacaaaagtaaattatccagtttaaaatagaaacattaattaaaatatggttcaaaatatcgatataaaagatggcccaaaatttacttttatagagaagtgatatgttcctaactttgaaagtcaaaacaacttttggtaggagtacaataaagggcaacatagtacactaaacaaccccctccctattaatataagccataattatagtattagtgaccactttcgatctgactttgtctctctggtacgtcaagcacaaatgcacaattgactatttctgaaattgataggccatcatggcctttattggtaagataagggcagttcgaacccagagaaccactaaactatcttgcttctgttaactaatatccataacccatcatatagtttccagtttcgaggtgatcttccccattttgcacttctacttcagtctaatggcaaaaaaacaggtttctgtgacttcgatcttacagaacattatattttttttcaagtaaagccaagtccagatcatcttgattcttaagtaaagctagctaaatccgcaaaattcttataaataaaaagcaaatccgcgcaacaagaccgttgcactctaaactatatttaaattaagagaacatgtgatttataccagggcgaaagctatcagccaatgtacctattatctctttatcaatctattttactctctccgttcttaaataatatttaccattttagtctaaagatttatctcataaaactttcttttaagtggacccattagacatttttaatacaacttcaatattcttcttcttgtttagccattgaaccagcaatgctccctcctcgtcgtcctcattttctcttcgcattaatgaataacaaagtaacattttaatctcttacttaatctacctttgactcgctagaacaatcgtcccttaggatggagggagtatattgctaagaaaagatagtgaaccatcacatttgtttcgagatcttagaaattactaaattaatatatgaggaaaacataaatatttgtaaaattttatcgcattgaatctagattataacctgaaaaatcgatcaatctatataggttatatacatgtatttttattcattatctaaaaatagttatatacaatataattatattaattatatttatagaactacaaataagacccccacataaatacaatttttttaaggaattaataaaattatttttctaaacaatttttaatctagctttctgtaattgtcaacgaaattcagcaagttgtgatcgatcgtaaagaaaaagaaatgattcagaaaaaagaagagctctctactgctaaaaaataaaaagaaagcggccagctgccgtaaaaggaaaagggccacacgaattttgtttcgccacgccatcgctagatacgctcgcgcacaaagcgaattcgtctcgcctgacgtgatgcatttctagctagctactgtactagctagttgttgttggtattatccgcgacgagaaattaaatttggtcgaataatcgtggcatgagcgcgtgagattaaagccaatttaaaacccaacaaaaagagggaaggattaattggtggtgccttaactgcgattcctccagcgccgccgccgcgcgaggccgcgagccgccgtcgccgaacttggccgttgggaagctcgtcaccaccgccggctccagcccgcggatcccgcgctccacctgcgcgcgcgcgcgccatgcgaaccgatcacaaacacgctcgtacgtacgtagcacgaacgatcaacgagaggatggggttgctgcgtacgtacgctgaaggccgggaaggcgtcgccgtgcgccgccgcggctgcggcggcggattggcccgccctgaggtggatgcgggcgcagagcagcctgacgaagatgaagagcacgaagaaggcgctgacggagaaggccatcaccgtcgtcaccgtgttcatgctcatgccgccgccgccgctcgtcgacttctccgccggcgaggacattcgccctccagcatctcactccgggctccaccaccaccaccacccaatccgcgagctcagctagctctggattggatggtatcctcctcctcctcctcctctcctcgccgtcggagaatcaaccaattaaccaatcaagcaatcaatcaaatcaatcgaccaatccacagctccccgccgtaataaagtggaagaggatgagaagggcggagcgcatagcgcatagcggcaacagcgagtgtgtactcgcctcgcctgcacccgcctcggcctagggaaattgttttgtttccgctactggtaataatctatggtcgtctgccgattagttgcacgctaatctatcatcgttgagacttgagaggctaataatcctcaattgttaagggggggggggtttagactgatgattacgcccactgataatcaatcaatggatgggttagtttaattaatgaacttagcagctgctgctgctgctaggtgggacctcgctttcagacgtcccccgcggccgcggcccgccccgctcgcggggtcgtggtgcccatgcacgcgcccgtccacgttgcgtgtgtgattgatgcgtttagcccagcgactagctgcttcgccgtgccgtgtccacgcgctcccctccatcgccgtcgcctcctcctctcctcgttttttatctagataattacatatttcctccgttttattatataagttattttaacatttcctatatttatattgatgttaatgatatatatgtctagatttattaacatcaatataaatatgaaaaaataatagaataaattatattatgaaacggagggagtagaagatacacacgcgtgaacacatgtacacattgattcaaagatacaccactacacatacccaggtagaaatgtaagtggcccacgaacccacttatatatcctacacacggccggtgacacgggtggcccttgctgacgtgggctatccgtgtgcggagtgcggacgtggcaagtacaaccggatcgagcggatggcacggcacggcggatcgcgggtgaaaaacggtgtccttttttttttaactgtggtttcattaatcgaagcgccaaagttcttttgagtaccaggtacgtgttcaagaataacatgatggttacaacacgtagtatgacaaactgccccgggacttgtcgatcgatgaggcgaggttggaaaacttataaaaactgatcggtcaggaatacgtcaacgtatttgatactgtttcctctgaagaatccagttcaggaataaagccccgaggaaaaaaaaagagcttgatgacacgatctgtcaattagtacgcatttgctgccaaattaatcctgtttcgagccctctaattgggaaaaaaaaggatttctcttgacaatgacgttgcaattaaactgaaccatacagaatagataaactcgtgatcccatcagctatatcaaacgcgacgacacatgtgaggtcacacaaatttggctcatcctcgtgtcataaaaaaaaagaagaaattgcacactgcaaacaagctctttgtggtggcagccatgggcccccaaaagcccaagtctagtagagggactctaccgttttgttcagctcttcgagcttcttcatccgcagctgctcgctctcgcccacaagctgctcaagatcatatggaaatacttaatgagagtataacataataaattcagaagaataaatatataatgtaccaaaaaacattactataagaactgcagcgtgtagtaatgatcttctgaatatattatgaaatgggtattataatacccacttcacaatattattcgtctagtttaaactttacaagttgttccgtgtttatccatcgagtaaattaagatatacaattgtgtatttccactgtctatctttgctataaatggtgaaaaaaaaaacttaattaattaacatatatcatctgctagtgggaatcttgctccattaacggtggttaggcatttagaggaagttttggacaaatatacattaggcccaaccttgttgatgaagatttgagacaaaggctggatgttgtcttgttgcttgggaattttgggctaggcccgaaaattataactggaccttgaaatggaagtaggcatcaactttaaacaattttggcgcaaaaaaaaaaacagaaacctccatttggtactccatgggtaggtgaaaatgattggaggattcttgtgattggttgagaaaagaaagtaggtaaaaaaattaaatagagaatagttataattgattaagagaagttggtaggtgtaaaaatatagcttccctaaaaaaaaggtgtagaaatagattcattttgagacaagtactagaaataactatattttagtacgaatgtagtatcaagctagctgttctttgttctcacccttaccttggactattctcatataactacttcggttttttaaatatgttttatcaataaaggtattttaatcatgtcttatctttttacatatttatactatttttttaataaaatatattatcaaacctcatgtcgaaaaatcaaagtcatatatttaaaaacggatggagtaaatggtactacggttgttagtttcctacatattttttatgcaaacatttccattttatatttagataattggaatcacaatttttttttgctccaaatagttcaaagaattttgaacttttcaatgaaatttgatcaaaattcaagtcagtcctacaactattttgactgaatatatatgctatctttcctgggtagctaaaaaccactgaaaaccgctcttctgtcactcacctccatcaacctgttcacaagcgttgctttctcgttgctcttctcgttgtaagcctctaggcacgccttgtattccttctcctgtttgtttttagaggggaaaaaagggttaacgcccggcgcatgcggttgaattcgtcgtaacaaacatgtatgtacagctatattgctgaagaagaagaagaagcagcaaaaaagaaaaaaaaacacaatggcatcctcaccttcttgaggcagttcttgccgagcggcttgagctggcggttcaccttgtcgatgcgcttccgtatcgtctccacctcccgccgcgtcggatccgacatcacctccagctcctgcaaatcaaccaacagtttagcttgcgatcagagatgatcgatcgccatggcggacacaggcatgcacggacgaacagtcgaacactgacctggcggatgaaggcgaggcgcttggtctcctcctcgacccggccgagcatggagaacaccttctcccgcacctccagcttcttccgctcgatctcctcctccttctccttgaacagcgacagcgccgaccgcgacgacgactggtcccactccgacgacccatcctcctcgccgccgccgccgccgccgccgccgccgccgccccgcacgcacacgatctgcatctgctgctccctgccgccgccgccgcactccatgcctctcgcctctgcaggtgcttctctgctgctagctgcaacctctctctctctctctctctctcaccaaccaatgctaaccttaccgcagcgagcaatgtgtaggaactagcagtagctaccctaagctaacaactcctctaccttccaagcctatttatctcttctcaatcttccttcctgctgccgcttggccatgttgatatgcaccttttttttttcttttgctgcagaggattaatggttgagtacaagtgtcctacctgcagtctcaaccttgaagcaagcagcggcagtgcgtattaacaagtttatcaatggcttaatctgactatatcttcatgcatgtgtcagtcatagcagctcatgtcaatgatatcataagactatctactagggatttgatggaagagaggacagcatgatttcacgtacatgtgatgtgagctggggagcaaactgtgttaggtgaggccactgtgtcaggggtcgagtagaagtaactcctgcgcaagccgcccaagtgtttcattctcatgtgagccaatgcctacatgtgcactgcaggttgcaacctgcctgctgcttccattttcattttgcttgctgcaggtgtatccatctctgacttggccttgcagcatcagagactcgagagttgttttcctcttccattttgatatgtccttgcgttgttattgggttaacatctcggagaggaaagctgagatgtctcttcagccttcagggatgggagtgctggtgctttgtgatgaagcatcccacacatttgtgtagctgtgctagtactcaagatgaagtagcagtcaaggataagcagaacagagtaggaccacacgacctgtttagaagctgacatggccaacaaactttgactactagaaaatctcaccttgaaatcactggaactcaaagcattttgcttaatgatggctaagccccgaacatgattctaacttttctttttgaaaggataaacatgattctaattaactaagcatcaagattcaagcatcacaagatgtacagaagtgcagaactatgtataactggcagttcgaacggtaccaacaaatatacggggttcatggtttcgtcgccgttcgacagccatagataattacaaataaacgtttctttccctcacaaactaaaactacaaattgggagcgcaaagcacaaaagcaagctgtctagtctatccggcattcatcgaagcagaacctaggaaagccgttcacagattgctggcaactagtttttcttgctccttcgcactagcagccgcacacacttgcatgctgcctcttggtgttctcattccgctggagcatagacaacgcaggttctgctaggagaataaactgagaacgagtagggcctgttgtcatgtgaacaatcctgcaaggaatgagcacaacagaggttaataaagagcacacaatatacggtacgcaatttcatctgagcaagacttacggcagtgaagtgctctgcagtgtgatggatcctgccaaatccaccaaagagtccagcatctgagtccaagaccacctgatagaaagcaacataaattattttgcagttcagcaaccaacacatccagttcgtctgtaagaagcatgaacgcgctgcaaaactgactagaggacttttgagtaatttttactggttattttcaaatatatggaaggagtaaactatggcagggtcaacataatgggcacgactagtgtaggtaaatatgaagtgttgatgattaccaagaacttctttgctcgtaattcctgatttaacaccaatcaataaataatggcacttgacatatcccagagacccagggagaaatattagttacagtacaattggagacgtacataacatgaaatttttttagtccacattcaatattttttaatctgaataggaaaaaaaaatgaatggttgcaatttgaggatccagacctaggactatcgctaacaaaggcaactccttgaccaccggggtgcatatgcaagcatagttgtcaatctattttattcttgggcagaaatcatacaaatccgatttttttggcattttgccattttctacttggttaacagtaaggtcggtaaagccttacctagtgaacaaaaactataattgatcacgggcaatgcacaaatagctgcataccttatatttccctggctttaaacaaccaacacggtagtcaaaatagctgttactccaatggaagttgaacacaaataccagatctcccttctcaaatataatcatcttatcctcttcatgctttcgagatatgtactggtggtctgatgtcatgaactgaaataacatagccataagaaaacccccatcagtgtcagagcaatgttaaaacaaaaccatcattttacttgcaaagtttttcctataaatacaaaaaagaaattctatgaagggaaatatatgcattatattattgataatgcatttattcatcaataaaaatataaaattactgtccacatagcccatgcaaacaagacaaaataatttaattggcatcgaacaaagctgtccattatttaacagtattgattactattgcaatgattggaagacatgagaaaacataatgatgcacctagataatgacaatgggagctattcctaagagtattggacataattgcataatgcacaagtgcagctcgtcatttcaccatatatttcaagtggttttggataaatagttgacatagcaagtatcagtaacaggacataagcataatggctcatatttgtgcaacccccagaaaaagataagtgataaatacaacataccccatatttttcctcgagagactgcatcgcgcggtcaaactctagcatgccacgatacctaagatagtccgcatcaccctgacaaagcaatgaaaaaacttactgatccataacaaaatcatggttcaatgttgctggcctcgcacaaatgttaatgtgaataaaaaggaattgatgaattagatgaattgtcataatgggaccttcatgattaaaacactgcagaagggggtaaaaagatatctaaattgaatccagggaatgcagaacttattttcatcaataatcaggtgacagagcaaagaaagttaccaggtcaaatcttcgacggcatttatcataactgttgttattccctgggatgaatttaccatttggaagtacttgtggagctcttggaaaatcaatccattctgcaaaataaaaggtagatcaatggcctttaagccaattgtttcccagaaaatactaggtgacaagaaccattgtcatcaaatgagaagttgatataaaataagaaacaaacatggtgtgtgattgttattaaatctcaccaggatgtccgaactcatttcccataaagttaagatagccttctcctcctaaccccattgtgataagtctaatcattttatgcaatgctattccacgatcaatgctaggtgttgccggtctgtccagagccataaaatcatacatatcctgcataagtacagtatgtgaggttctcatgccagtattcattaaaattcatacatatcctgcatgtatatgcattttctcaacaattaaaactcaaagaacaactctattatctcaagaatagtacggtgatacactgatacacaaatatgttttaagtattaaaacaaggaaataacattttccaaagaactagtaaagaatagaaaattcataaatacatgttgcaactaatacaagaaaaactgggtgtagactgcagaaagcctaaagctatccaacttaaaacactgatctagctgtggttttcataccgttcttactatccacaatgaatgcattgagtatatttgagtaaaatcagtacaaataattatcaaggatatattaaagagccattagttacagtcctaatcagtaaaacactaaaacctagagattgatgtgtggtaaccttgtccatcaaccagaatgcaatagttttgtcaccaactagtgcttgatcatgactttcagcataagtaacacacttctctgaccaccttctgttagtcagtgtgtgcacaatatcacccatcttccaagattcatcactttgcctgtgtaaaataaaaattgaaactctggcaccacatctttcaattaaaggatacaaaataacaatctttcccagtttctaaataaaagctaaacagctgacaaaaaagtgagatacgatgagcatgggcatttttataccacataataaaggagcattaaaaatgtaacgttgccaagtcaaactctataagttggtagttgcatcttattttatactaataatggaactcacacgaccactgttcatatgaccaaatccagcacatcacattggtaaatgcctataaccctatatatgagtgatcttttttttttttaaaaaaaaatcaagggcaggagttatgccaattaacttcagaagagaaatagagatatcatggtcaaggaaaccaatgtatacaaaaaagaatttaacacaagaaaacagtttatgttcattagatatgtaattagtatttctattaaccaaaatttgaaacacttacttgaggagttcaatccatttgtcaggaacagccatatgaaggcgataatcaaaaccaaccccaccatcttgaacaggaagggcaaatgtaggcattccactgacctgaagtagttatatgccatttaaccacagaacagttgaaattaagttatcttttgcaatagagttaggtttacgtatgggatttagagtattgttactactattgcaactctagaccatacaggcgacaggctgagcaagtggtctgcagaagtgtgtcttctgtgatcaaagtgtggagtcaattgaccaccttctaatccaatgtccagaaacactacagctatggtggacagttctatgcggcattggccaatcccattgcttcccatcaaatgagcagcccttcctcgtatggtggtgcgacagccgagacaaaatcatagcggcccaaagatgagggtttgacaccatcatcatatcctggtggcctggacgatacaaaaggagtggaaaaaccgggttttcaatggtcaatgcaagaccatgcaggagatagcggagctagtggcatcggaggccgcgccctggagggaggcaggagcgcgcatctaggtggagcatttggtcatcaaattgttccgcgagatattactatatgtttcccacacccatttttcttcctttctccctgtacatagttgctgtgcctgttctaacaacttttcccgatcttaatacaaaagatacgcattttgcgtattcccaaaaaaaaatgtagaccatacagagctactgtataacttgctttttgtacttcacaaacttccagggaggctggatttcccaagagaagaaaaggttatgacagtatggcaccatggaacatgcacagctgtttttgaggacacaattatactctctttttttacagaaaaaatgtactctttttgttcagaaatatgtaaatttttagaatgcacgcgttcatatttcaaacttctctaactcagaataatatataaaaacaatcaggttattcacatgcaaatggtgccattatattcgtcacgaatttttttcataacaatacatttgtataattctttactaacatactcgtataacattgatggtcaacttctgtactagagaccaggtggtcactaatctttggtaactatcattactccttgctgttttctaagcccaaggaaaacaatttcttgaaccagcgacataatttgatcaactatcaagatggggttaatagtaaatatgtaacactaagattggaaagctaagctttgggtatacaacattatgaactagagaaggcaaaactgacattagcgtaatatgcagtgcaagctttcaacttcttacttaagcatgtctagatgccaaaatattgctataaatgcatgctaaagaaatgagtacataaagacaaatatagtcagcacttacatcttcaccgatggttatggcctcaggataaagtccatgaattaaatcatttaccagcatcaagtaaactactgcatcagcatcagtggcaaatccaaagtattcactgtagttccccgtaaatgctacctaaaatagagggtggaatcataagataaaggttatgacgcaaataaatatgaaattgtaacagatagcaactgctaggtttgaccccatcataattaagaaggtagtgaagataaagtaatgaaaacgaagcaatatacttgtaatccatgatgagtgtacatcattgaggttacaccgtcaaatctgaaaccatcaaacttatactcctcgagccaccatcttgcattggatagtagaaatcttagaacctgtataaggataaaaatgttggcaaacacaatagagattaatgcatatgaataatgatactttgtaaagggaagtagcgattaacgtgttccttacttcccaattcccatagttgaaaaggcgagaatcccacatccaatgatggccgcgtgaaccactatgaaagtaatgcgtatctgtaccatcaaaaccgttcaacccatctagggtattatttgacgcatggctgcaaaaggaaaaaaaaggggcaaaggtaaagctattaggtatgcagctaaaaggggacttagtaaatcaacacaaaggttaatatttgaaaccaaaagggcttagaacccagaggccaatgagctaaactttgggccatggtgattgacaaattttggcatgtaaattagttctagttgttgtccaccagaaagccaacaaaagatgtcacgaataaaatattaatttgaattctcaaattcaataattgaatagaaaatatgaatgaaactgtttaattcattttcttcccatcctaagataaactcgaatgctagccaatttaaattgtgaaaactcttatactgcaataattcaagttaaacatgttgcataaaagagagaagatctacggttgtagattagtcataattagggttcaccaacatgagggctagatgtactttttttttatagaacagagaatcataccgttagctaaatacccatgagtagaagtggattttttttaaaaaatatcataaaaatgaaatgaactatgcatgaacttctcaggaaaaaaattgtaatttgtaagcaatttggaaccaaacattaatccacaaacagcctagccacatgcataaatgatctatttatccacagaagatcccacaaactcaagaggtggtggtataatggcagacttaccaccacagccttcttctatattataaggactttcttttatctctgtggccacgccttactaacttagatatgaaagaccagttaacaaatactcattctgttcacttttataacgcatattttgatttcagaaagtcaaactcgaaagattttgaccaataattagttgatatacaagtatatttagagtataaaacatataccactagattcatacctcaaagtattttcacattatattggttttatagctatgataaatatattttatgagaaattaattgtcaaatttcagtcataaatactttctaaaattaaaatatgccttataaaaatgagcagagggagtaattaattacctgtgaacaacatccatgagcacaactaaaccaagctcatgagctttatcaatcaatgactttaaatcttctggggtcccgaaacgactacttggtgcaaagaaattggtgacatggtacctgaaacaaaagtaaaaaatctgcattgctcacccataataaaagtcttaattgacaattgaaaattatctcaatagccattcattcaaaaggtggcgaatgtcatttgttacagttcaattgtaccaaaacaaaaggggaaacaaaaggggtcagtaacagcattgtttcatgagtataaaaggaagataaagatgataagaaagatgaagcagtttatcacattatacaaagggaacaaggaagatgaaagataaagtctaaaagcatatatatgtaaactgcaaagacaagaaataaatccagcaatatgtaatttgatcacccaaagcttccataatatgcatgctcttgaattgccattatttgcactgcattgtatccaagctttttgattcttggaagcacctcatccctaaagtttgcatacgtgttgatctttggctcctgattgcaatattaaaattaataccagccagcatagtacaggaaaatcataaattaccaacagacgcccaaaaaaaaatgtatacaaatggtaggcatggtgttattcgctattttttattatgtaataataaccgtacccgtttgtaagaaatacaaacatagattaattaaatataccctatgttagcagaaaacataaatcaaaaattatatcagtgtaaatatcagtaatttgtttcaaaacatcatatttgaatcaaccatccagcaaaggttatataaacggctaattgttgacgaatgtgcaaaaaatgtgctgattgtattaatatattattacagaggaaacttgtaacaacttatcactgcttagaagtagacagttataaaaattaaggctaacagcactttaatataattctagaatgtaagttaacttgaactgtatatggctagtaattaaaagaaaagatgcattaccgtgctactcattccaacatgagtttcgtatatccgcaatgactttggtcttttaggttgaggatgcttgaatatgtacttctcctgcatagtcatataaaacattttaataactagataaaaagaacaatctaaagatgccaacaaaaagagaaatttccaagagtccaaggacattacagaagtattcacaagtacaaatgaagcacttttttcaaggaacaagaacatattcaaatggcgtgtgcacgtgttgggggggggggggggaggtacctcttcaggaggatcataatatattccattgtatgggatttctcctgcggcctgcacagagtacttgatccaggcaggaatagaatcctttataccagatggagtttccattcgcacctagatgacaaaaggcatgcttgatacagggagatgctcacaggcccagagctaaaacactggccaagcaggataaggaattacctttacacgtgagccatgtggaataggagatgagccatcagcattgttaggcagaaaaatctcccaaacaccaaactcattctggaaacagttgcattagatatgagcatcggtaactaccaacttaccaatcatatggaattacaacactaggtccatgcattattagttacaacctcaagctactcatcttctcctatcaagtccacaaaaactgcaaaatacatctaggtactaaagaatgtacatgtaacatacacaacattaatgtactaccactacagtagcatcaaaaccgataactaacagttaactcatggcaacagtcaataacatataagagtgtgcatgatatatatatataaaaactcaatcggcgggttaagatggcccgcagcatgaagctaagttgagaaccccacccctgaacgcatcgcacaaccgggattgctcaacctcacatggggagcacgcttctgccagcatttgcaaggagggatttaattttttttgtgcgaaaatccaggttcgagtcaggtttaccactgcgctatacatgcgttcgcatgatatatcactagctcaactctagagtatagatgaaaccaatgctataaccaaataaattagttaaagaaatgtaaacaaaatatttttgaagaaaggaagggcatatttgtgagcctgtgggcttactttgctcatgcggtctgcatttggattccaattgttgaagtcacctactaatgctgcagactgcaattggaagcaaaaattagttcttaacaacgtctagtcaagtacattgacaagttgttcatctgagaattataaattccatacaatctggaatatctcagaatatatggcatggtaattatatctacatgtactagaaatatggaactaataatgtagcattttaggtaaatggtgagactatcaaaagaacatacatgtgccccgggagcccattctcgataagtgacaccttcagcactacatgggaagaaggatgaatatcactgagttattttgttacacccagagaagtgatgtgcggttacaatgtaaaagaaactatacctgtgattaaatccaaacttctcataaccgcgagaaaatgtttccagtcctccttcatactgatcaatgtctgaacgcagtctcctatataggctatatctgtattcaatcaattaaagcataatcaggtttctagtagagttagcatgggcatattgacttcatctatgctccctccatcataaaataaatcaactttccaagttcacgtacgaaagttgttttttctaggacagagggagtataacaatgatataaaagaaaggaaataaagttgttgtccagttgacagacgtcagcaaggtctaaaacccattatgtattttacatcatagataactttcagattaaatatttgcaaaattaatattgcatttcttagttctgacgccatcctatcactcttttgtttggtttgcagtaccgccccaacccagaaccactgtgaagagtactatctatgtattattagtactatttactatgtatgtccaatatactcatttgaccattaactttttttttctaactatatgttgacttaaaaattcttataatggtaaatctatttttttttcgcacattagtagtttaggactcttgttaaattttaaagcatgactgaatgatttctaaaacaacttccatttgagaacagatcagagtatatatgcaggactaaagataaaacttcaagagtctcatcagctgtgacacgtaagtagttatttgcatacatcttgtgaaagactgaacagatggagaataataaaaacataacctaatgaaactatgtgatctataaagaagggcggaaagccataccgatattcaagatggtacttatagccattaagcatagagtccatctggaatattttttgcccatctcctgttggtgggacaactcgtggtttctgctcagcagctaattcttcaaccactctcttcacgccttcaacgtcacttgctccagatgactcaatctcaacttcagctccaacctccgtgcttaattcatcatctaaggctggcaactacaacaatgtacaagagataaaatgttcagaagtaaaacataatgacaactgaacggaatgagcgacaacaagcaagactctagatcaatcctacgcatatggtgtgccctttgaggcctcatatagggtgctctagacctagatcatattatcattatgcacgcagacaactagtatggactaagtacataaaaaaggactgaatcactgaatatatcataatcccgtcacaaacagaaatcaacacgtctcaagacgtggactgcgtgaaatgtatatgatctcgtaaggtagcactgcacaagaacatgtctccattttcaaacatgacatgcaaaatgctgttagatatgtagcaatagtattgtcaaggcaggatgaatcatgatcacgcacctgcagatcgtctgaacctgctgaaaccggcatcccgtcgctctcgccctcggggatcatcacctcccctgacgcgcccgccgcgcgcacggccacgcgccccccggaaccccccacgcgaacggcacctggacacgagacgcaggcaaaaccaaaatgaagatcacgacgatttaccgcacccgcggcgcgacgcgacacggcacgccacctggtcgagccgaggcgcacgcgtggcgcgtcgcggcggacgagaacaacaaggtggcgcgggatcattaccggggaatctccggccggagagcagcgaccgcgacgtcgggagctccgccgccgcacgccagctccgggccccggctggcacggggaaccgcacggcccccgcccgtagccccgccgcgctcccgggaaccgcagacgccggcgccgccatctcgcccgcaccgcagccggatcggatcccccggcaacccccgcgctctgcttccacctaaaccctcctcacgcgagagccaaagcgaggaggcgctgcctggtggtcggtgtgtgggtgtgcgcgcgtgcgggtgcactggtgctgaagctaggaggagcggagggcgccgcgctatatagaggacgaggaggaggagctctggtcctgatggagcgaacccctcacgcgagagtggcagcgaggccgcccgagggtgggtgtgcgatgcgtgcactggggggacgggggcggaagaggcggttgcgcgtcggtccaacccgcggcgcacgcgagtcaggcggcgagggcggagggcgaggcttttcccctcccccctcgcggtgaaagcgtcggtttcccgtgcgcgcccgggcgtcgcgttgcgttgcgggggaagggagaggagaggagcgcgtccatgccatgccagccgctgctgccaggtggaaggtggagggcagcggcgcgcgcgcgcgcggggaggcaggcggagtcaccaccgatcgagttggcgtggcgcgggccgtgcggcacggcgcgggttggggaggaagaggagaggaaaaggaaaccaacggcggggaggctttccctctcgacccgtaacgccgcttgcgtcgcgtctccctccctgctacttgctactcctgtgcttctttttgtttttccttgtcctctttggtcgcgctttttgttacccagggaaaacaacaaaagggaagatgggagttgggctggacccaggaggcttacacgaaacaaattctcagtgaatggaagaacgcaacaccggtgctctgttgtttcatttttctgttctgctctgtcacctctgtgtaaacgttgaggagcacgtgagggagaagcactcgtgcgaagcgtgacctgactagcctagtagcctgtggtccatcatcctttctcgcggtgaacaatgggctgccaaaatggagcacatcctctagcagactggcgactccgcgtgcgtccagcggattgggcagagcgatttttctgttgggccagcccatgaaaccaagcacaccaaacgtgtgagttgagtacttaagaattcaaaaaagattaagttcattggaggtcccttaacttgacaccgaatccgtttatcctccctgaaccacaatataagatataggggtgggcattcggtctaaccgaaaatttcggtttcggtctttgaaaagtgaagaccgaatttcagcgcaaaatattaggaccgataaattcggtcttggtctcggtctcggtcttgactgaaattcaacaacattttcatatatgcaaagaaataatggaaattttcaacacaaaaatcacaaaaaaaatttcgtaagcacttatgagtaaagactcttattaggttgcatacctagaagaagtagggatgtgaaaattagagtttaatcctattaaacatagtgggttgtaggttgcatttagacgtttttttgataattcggttttttcggtctattcggttaaccgaggagactaaccgaattgaccgaacaaaattcggtctttcactacctagggccgaatttctcggtcttggtcttttcggtttggtcttttctgcccacccctaaccagatacaacgggtctctcaactgacaaaaccggtgcaagtaaggtcctaagacggtttggatggtgatttcggcttatgtggcatctacgtggtaagtttgacttggtcctcatcctacgtagcggtgacgtggcactggaagcaaaatttgaaaattaaaaattaaaacaaaaaaatgttggaccctcatgccatcgagcgtttggttaaaaactaaaagaatgatattggaacccacggccaaccctttcttttccctcttctctcccctatttctctatcccctttcctcatcatcgtggagctggtgacatgtgagggccgcgat

SEQ ID NO: 28821 - DNA, 9927 bp, Oryza sativa
cctccctttccgctcgctcggaccagccgctccacccccgaacaccgtcacttgctgctcctctcctgccagccaccgtgctgaccaacgacgacaacttcaccgcactcgtcgacctgaccccgacagctgaaaacctcgacaccaccagctccttcaccagcccgaccactcccgtaacgctgccttcctctactgctttcgccgcttccacggcctgcacctccttagcttcctcatccaccacccccgccacgtcgactagccagcctcggttggtccctgctgacgaaaaaaccgcgctcggccgatggtgccgagtctgtgttggcgcgaactaagtcaacgaacacaacggccagggagatctaattagctccagtgcaggtccaaaagttgatgagatgcaggtgtgcctatcagtttgttcctgcaactgacaagatatacaaatagcagatcaatgagccaatcggctgacaagccgatggaataattccagccgatgccgatactagcctatagcgataaggttttgagctatcagctatatgtttgatgtagaatctgacacttgatgtaaataaagacaatcagctgatgaaaacaacaatttaatccaatagaaactaatcggctaataatgatatgatataataagcactgatccaaaggttaaagcatacatcggcttagaagtccgatgtcataaaatccacaagattagataaacagtgaaacgtctgttgccgtccgctaaatccaacttatgtgcaatccttgtaagccaatgcaacgtccagataactcatcggctgaaaccctgatgaaacccttattggcaatcaaaaagcaagctagggattatggtttgaagcacgacttagtagatcgaacttaactgatgcagcactaagtatgaaaagaaacataatatctagacaatcaagcccttgattgattttcagggtggtagataccttagctaatctaatctggtaaagcgatttagccgatatcggcataaactctaaaatgaatctcaaccgataaaagtaaatcgaactatcaaactagattaactaagatatatgatagataggtgcttacatggacaagatcagagtgttgaagccctagccccgccgatgcaagcaaccatgacaagtataaactcatcgaaaaagtagaaaagtaaaagagtggcgatgcgccgaaattgtattgattgtgaagatagtttacaatgaccccgggtgtacatatttatacccatgggtagatactagtccttgttggataagaaataaactttcctaaagataaaaggaaaacataaactccttataggacactaaacacactttcctaaagataaaggaaactacaaatgctttctaattaatagataaattatcatgccacatcctccttgaactcgatattttatatataaacttcgtttaattgattaatttccttaaccgaatatagtgacgacttgataattcccatcggccgattccagaactctgaagctgatattgactttatgccaatgatgacttcagggcttaccaaatttcactatttacagtcccttccttccccgccgccatcgctgctgctagagatggtaatgggttgacgagctgacatggatgcgggtggagctcgtcatctccttcctcatggcgtcgcagcgtagacagcaaatgacgacgagctactccacgacaactctcctcacgccgcctatgtcgcggccactgcccttgccaactccggcggcttgtaggatcgagatgtcgactagatggggagggggtgaataggcgatttaaaaactaaatgacacctaatcaaaactaacataagttgctaggctcagtgagggacaagtctaactaagcaactatgttatgttttgcaatcctggggtgatagtggctcaagtatatctctaggaaagtaaatcacacacctaagttaagtttttgcaatcctagggtgatatggactcaaatatgtctctatgaatgtaaattgcacaaatgtaaatgcaacaaataaatgagacaagagacaaggagtttttcaccgaggttcggaaactcgccggtttcctaatccctgttgaggcgagcccaactccacctctcaaccacgaagccaccgcacacccccttcgtcaaggggtgggcaaggtgggagccgatccacggagaggactacccaaacctcaatcactaggggtagttcttccttcacttcgaaggtggtgaactccaaaccactcacaaccggcgccgggcctcctgcacaatctcctcggagaggtcaccgggcaacacctccacaagccgtctaggagacggcaacctccaatagtaataagagatgacccggctcggagatgatcaagtgccacactagctctacaatgaagcaaatgcactcgactcttggctaattaaccctcaatcacacctaatggatgaacacaagaactagagagtgtgagagagtgtgcaaggggtgtatgtaagtgaagcaagtaccaagagagttcccttgctgctggtgggggagtatttacactcccaccaactaaaactagtcgttgggggcgaaatcccctaactcagtgtactgccggtcagactgccattgtgtggccagtcagaccggactactatgtaacggctagttttttagccattacagggcaatcaatgagcaattctgaataggccggtcagaccgcagtactgcggccggtcagatcggccacgcctcggtcagaccgacatcggctcggtctgaccagttgcggctctggattggctaccctagagcatagctgccagcctccagggggccggtattggtatttcttaatgacattactaaaagtataattcccagcaatggcgcagaaatactcctagtatattatggttacagaatttatccgcaagcgcacggatataccattgtagcatttcacccgagagtattccaagggtatcgtatttatttaatcccgtgggaagattatagtagagagaaccatactaataacttatatattacttgtaataatcatagtctaagcaggggttaatataatccataaggtagaatgacacacaagcatagaactacttattctcatactaaattgtctaagctaagtggaaagaaagtagaaaagaatctattcctatacttctaatatacatagtatacacacattctagttatatgattaactagctaataccctttttccgatgccctcctagtacttcgagaagccatcccttactgtcgagttcctcacgacagcccgtcatgaccatacaaacagggctaaatacggaggagtaccctctccaggaaagtaacttaggagtatatacacgcgtagaggaataccgtgttgagctgtcaccaacagcggcctacctctcatccgcaacatataaccccaaataatgatatctaataatctagacaccacgcctaaactaccagatactactctaaatcgtcatgacatagaataattgcataagcaaacattatacccgtacctatgcatctcccagataagctagcaatataatcagtataacatgaacataaagtaaaattggcatttatatactcggaaagtatttcaatacaaaaaatgtataaagaagaatattgtaaataaagtacaaagcttacaaaataggaaaggagagatactagatccatacccgaactcttccaaagacttctggactccgatttctattctattcctactccactagcttgcgaatactaaactaaacttgagagaatatgagaaagcttttgcttgaagtgtgtgtagaaatggagagagtgggctccttaaacaggcaggtaatgatggttatggcggttgctaaggtcggtaataccgtccaaccgccataggaaggcaatccacaccgtccagaagaagtcctgcatccaacggcgctgaggggggttcggccgaaccatgggctggcccaatctatcccattttcggctggcggcctcctcctccgttgctcacttcagacttgtgaattttgtcccaattcgtcgtttcaattctgagttcttggcccattcatacataagtctgattctcgacatcgtccgattgatcgatcgtctaatttgatgtcgattcccctccactttatggttattctctgcaaaaggttagtaaatctaatactagtggaatattattattctaactcaaatatgcattgcaaacataactagttctcctctattttgataatattgatggccgaaactgatcgctaacgaccgtcaacagccggtcagaccggggctcacccgacggtcagaccggccactacccgtcagtcagaccggcatttgtgcctcggtcagaccggccctggtcagaaagtctcaaatgaatataaatttagcaagtctaaatgcaaatgacctaatgtggcattttgatcatctctttgtctaggtcattacccctcttaatagtacggcaaagctataaataaactagcacaattttgatcgcccaacttctcgatcaatttaaaatttaaaacactagtttaccgtcttctttcctttgctttgcaccatcaaattttaatcctttggtaatcatccatgcacacatatcacgtggtcctaactcaaaatatataactcaatagaacggttagtccacaattagcgcttgttattaattaccaaaattaaccacgggggcctagattcttcatgactaggggccctcctccggcctctgctctagaccgccgccgtcctcctcaccaccttacgccggctgccgtcctcctcatcagccgccactgagatgggaacagaggcaaagcaggaagaaagagagaggggtgaagagatagagctgaagaggtctaacatgtgggcccacattgaatcattgcttttgacttgggtcaaattgccacatgggacaaaaccaccccactatgttgccatgggacctatattacaccggttttgacgcttgaaggactcgttgtatctggtatttcggttgaaggatgaaaattgaactcgctttcaagttaagggacctaaaatacacttattccattcaaaaatagtattgtactccctccgtctcaaaatacaagggatcctagtccatattcatagtattagtatgtgtcacatccaactcaaatctcttatattttgagatgaagaaagtaataggttactgctccattcgtctacaattaactatttgtgttctaaaataaagctcatgtcccttatctcgatcaatcacaatcattcttcttttaattttttatctactttctattatcaactaatcactactttctaattttcacatatttttttaatgtttgtgcctaacttaaaaaatactaacattttgtgacgggagatatgcgtatgtactattgttgttaatttttaacaaattttcaaaactatttagatagcatgtgagtaaataaatggacattccttgagagattaaaataggttctcaaacaacgattttaccctgtacatcaaaaaatatctcgattagtcgcaagaaagccactgaaatgcatcgatagaagttttgaattgctcaatgttggatccaaatgagtccaagttatttactttcttctctgttaacctgtatcgttacgtttgattggtgtaaatgtttggcgtgtcacatcgggtattatatagggtgttgcatggggtgtttgggcattaataaaaaaaagagtaaattacaccttagaccactttttcttgccattgttgcaatttggaccggggaaaaacaaacattttcactttaaaccacacatctttaccagttgattcagtttaggctagttattgttaccttgtacctcatgctgaccagctccctcttctcgaatgttctctccctccaaggccctctctttgtatctcttctcgtatcaccgaatcaagcgagcggtgagtcggtgaccccatcatgaattgtggcgctgtgaccaactcctattcgaggggttgatgccgtcggggtgaacaaagtactgtatcgcccccaatttgtccatggtttgaccctcatatatagggggatgatgcaggataagcctagccatggtgagagccatctcgtggctgttgcacaaatcggacgctatcgcgcatcacaatgatggtttccttgtagaggacatgctccaacaatatcacatcggctagattaaaacctccctggagttgccgcgctgagagcgttttgaggctgcgtgttcgattccgctgctatccacgtcgctacgcgccaccagccagacggcctgcccaagctccaatttcacgctgctctcggccgtcggatcgcgcgcgaaacgctgtgatgtgctggtatgttatgttaggcattaggcagtgtcccaacgattggtcgacacgtgagcctaggcccctacaactgctggttggttgctgcaccctgtgtggtttgcattagtccatgccatgtgggccctgtgtgtttgggtgctgtgcaacgagtgtatgcagggctgtggagtagggtagtggcctaaaatttcagcgtgttgcgtgacggtctagaagagtgtgcgtgcgtgggcacggtgcatgcgctgccgtagggtgcacggcgtatgacgagtgggtccacgcatcatctatcttcgtgagccaggtgtgcaattactcgacgcctagaaatccacgggtgtatcaaaagcagtgaacgggggtgtacgccactgcctcgttacgtgcggagcatccatggaccagtccgtggttctctgccgctgacatgtgggtccagttatggctctatgggctgcgctagatgcaccgtgaccatgcatccggttcttgcattgagacgtgggttctggaccgggtgaagagggagatcgtgcacacagccaaccatgagacaacacattggtacccatggctgtttgtactgtggaaggcttgtggtgcgctcggcgttgtgagctcggttcacagcattggtttccatgacaggtgggccatgtgcatgtgtcttgaggcggctatgctgtagacaaggtttatacagctaaaagtgatggatttgttgctttcgtgtgcttttagcagccgtggtgtgggtgagaagggagccagagctcttcttaatttgccagctgcttgtgtgttctccttgccgatcccttgcgctagccatcttccgcgaaaaatggccatcgtttggtgtgtgctgacgccttttgctaaatgtttcttgctacgatgtgttctttggaatgtgctcatctctgtcttctctactctgtaggggttttcggttttgttgtgttggtgtggttcttgctgcttgatttgtccgcctgagttagctgacaggatcttgcatgctctagaccaggtatgtcgctggatgtgattcttttagttcacttcggttgttgttacgattcttgatcttattcggtttttggttgtattggatagattttctctattggttccacatcccgcaacctcttctttgctccttgctgtgctgcttctgtctttgaaggtgaggtttgttgcttctgaggttctacattcgtagcctgcttatagcttcttggtttatttctttggtttgttttgcagctcacatttcttcgaagggatttcacgctgtcggctaggctgcgctacaaggtaaagacattgtttctttctgtgccttaccagtgcattgcttccttgcatttgtgtttgtctccgatggtttcttgtgtgcatgtctcctgatgtggtgctgctctatggacccagtttgtttctttgtccttgtgcatatttgttggttgtgctactatagtattatatatatatatatatatatatatatatatatatattaaatgcacagtatatgctccttgctgtgttggtgcgtgtgtgccggtagagcgagaagagtgttggctacaatcttccttctggtcttggcctaccactttctctcttcttaaagccttctagccgttgtgcctgcctcatccttttgtgtcgctctcctctctttgtgctcctcttctctttctctgaaactttcccctgcttactttccttcttttcccgttggtagtattgtaggcaacatgttcgctatcggagtgtcacacgtatctctgctaaatgccgctgctcagcactgcatgctacctagtcttgcctacttgtgggagttcagctttgatggtacgttgttggctggagttgaggtcagcgttccatcagtgtgccactccgatggtttggaaactatgtttttctgggacatggcctcagctccgcttgggactgcacatgaactggtcgctgagcgagcattgaggtacctccagcatcgatatggctttttagtgcacgattacaatttaaactcaatgttggcttacagaagaattgcacagaccgctatacaggttgctttgtcagcctcaggttgtattgcgcattttaggtcctcttatggcccactggcgccgtgttgtgaggatgttcttagaacatgtagctcattgtattttagtttccatgtagaagacatggagcaaatgggttcttttccaatgtaggggaacatgggtttctggggttctgtgtggtttcttgccccattgtaatcctatttgttgtttcttattgttgctttctgttgtgctcatcctacttggtaataatggaatgttcttttttgtacaaatttttggtggttgtataggcattttgtgtgcatgtccaaaagatctgctgatagagtgtccagggtccgtgcaagtcgtgaaaggcgcaatgcacgtaccttggccccccccccccccccaacttgcttgcaaaatgaacttcccctaccaggtgggacaaagagaacacgttcccttatggattttaagcccgctttggcagctttcaataggcaatgacggcgtttgcttttaggaaggagttcttccttagtttcagatgaggacagtgcacatggtatattagctttctcatgggtttatataattatgtgtaatgttgattgtttttctgatagtttagatttggtgcagctagcagtgggtttcatagaggtagttcttcgcggtcacacaaggatcatgctgaggctttaaagggtttgtacatgttcagtccatatatagttggcagttttttaagataagcttatggtagaaatatttggttttctttgtagcatcataccctaggaggtcttattatggtgcaccaacatacgagtgcccatactgtggtgccgtgttttggtaccaggagagagttaagggcgcttctgctatttcaaaacgaaagatagtttacaataagtgttgcaaaagtggtaaaatacagttgcccaaactatgtaaaccccctgagcctcttgctacactgctaaaatttaatggcgatgcacgctcaaaaagattccttaggcagatacggtccgacaactctatgtttgcttttacttcaatgggtgcagctgttgataaatcaattaacactggaaattcaccttatgtcttcaaaattaacggtgttgttcatcacagaattggtacacttttaccgtcacatggaaagcaacctaaattcgcacaactctatatcttgacccagaaaatgagacacaaaatcgaatgaacatatatgaaaatgatggtagtaacgctgatcaagctgagcctgttgtagttgatgctctctgcactatgctagattgtcataatacacttgtgcaaaaatttcgctacgcta

SEQ ID NO: 28822 - DNA, 803 bp, Oryza sativa
gaactatcaagatgcaatggcgttatgtcgtgtttatgggtctcctgatttatttgtcacattcacgtgcaactcaaagtggcaagaaatagttgaatcaatacgatttgaagatggccagctgccatctgatagagctgacatgattgttagggtattcaatatgaaagttcatgattttattactgacatcagggagggtaagacatttgggcctgtgcttgcaggtaatgatgcctattgcaatgtttctacagttagttgtgtagtatagtgtgattacaccctcctaattaaacttggtatttttttttgtcttagttctctacactgttgagttccagaaatgtggtttgccgcacatacactgcttagtatggcttgctgctagcagtgctcaagtatcagtagctgttatagatggatttatcttagctgagataccagactttgaaaccgatgaattaggttatgagtcggtaagcgagttcatgatgcatggtccctgcggtgagcataacaaacaatgtccttgcatgaaaaatggcaaatgttcaaagcactttcctaaagattttcatgatgaaacatttgttgatgaatatggttttacaatctataggcgcagaaatgatgggcgatatatcacaaaaaatggtgtgcgtctagataacagatcagttgtcccatataacattggtttgcttaaaacataccaggcacatataaatgttgagtggtgtaataaatccaacatgattaaatatcgttttaagtatgtgatgaaagtccatgatcgatca

SEQ ID NO: 28823 - DNA, 8952 bp, Oryza sativa
tacaatcatgattatttcttcttttctgatgttaacagttggagctgaagttgaccatggcaagatggagttactcttgtctcaactggctggtaaggatatcactgagattattgcttccggtcgggagaagtttgcttctgttccatgtggcggaggtggcgtatctgttgcagcagctgctccggctgctggtggtggagctgctcctcaatctgaggctaagaaagaagagaaggtggaggagaaagaagaatctgatgatgtaagatacattgctctatgcttgagttcatggtatcctgttgatcagcatgagtttcttcgaattgcttgttcatctattttatttgcactatacactgcagtagtattccttttgggttttctatatacgcgatcaaatcatgtcatgaaattggaatggtacatacttgtatcagttttcatctatagataattttactcccatcaatgtctaggctgcatcgtgccattccattatgatggtagtacttgtttccatatagtatactttccagcatacgtatcatattgtttttggcatggtactagcatctgacggattgatgactgattatttctttttaatcttgtgtgtgcaggacatgggcttcagtttgtttgactaggaccattccttggattatacccatttttggttaacttgggaaacggcaacctaaacacgctttttgaattactccattttgttctataacaattcagatgcaggatattgcactgatgactatctgtcgaaccatagatttgttagaaggtttcattaccaatgatttgtttcagcaaaatcagcaccgaccatgatatgttgagtttatatgcttccctcgctgctctttactactgaagaattcacgtttttagttgccatgtttagcaaatgcttatatgatatctggagtagtttccgtttgtgcacaaatgacgggtgaatttagcaaattattccgttctatgcctagatacatgcggagcctgcgtgtgctgctttcgtcaaattggactgtggtcagccaacgttgtctgacctgaagcagatgcaatgggattggaatttctgccgtaaacagctgcgcctacggcgatggaattcccaccgtagttgatcatccaacggaaagaggaacaagttgctgttgctagttgaaacttgaaagattgtaagaaagctccaagaccgcaaggagaggtgtactgtcgtttactcgtggttgaacgtctgcagtagatgcaaacgatgatacgagtttggatttcagacattgcgagtttggtttaggaatatatggcatgagaggtagaatattttcccgaattaaaaaggtcccctccaaatgggttattccctccaacacaaaatatatatatagcaacatcttaccatttctttttaagaaacactctataaaggtaggcttccacaatgcgcatacactcgtctctataaatacgcacacgcataccatcacctccggtacccctatgatcacctccgaaaaactgggcatcttatatatttttaccaatctattggtaatgctaaatttggaggcgctatatatttttttggtagagtagaatagtatcaattgtattgatatcgcaaaaattggaagtgatccaaacatatgaaatacggtattcgaaaattaccaaatatttggtagagtaagttttgacgtcagaccaaagcagtttctaatacttcccctgtcctaaaatataactatctttaagcggatgcgacacatcgtagtactatgaatctagacatgcatttgtctatattcgtaatactaggatgtatcccatctatttaaagctggttatattttgggacatgtgtagtattagataagatataacctggtatgttcagaatcatagtactgtggttttattcagatccatagtattaggttgtgtctaatctctgtccagattcataacatatttgtctatattcatgctattagattatgtccaatatggatatttactgggttgtgtctcatttttactaattttttttagtacagagggattagtattatttccatttgttaccttagcgaacggcacccctgtaaacgctcgatttttaggcaccgacgagcgctcgccactcgcgggagggcaaaccgcacgttccgcaattaattccgttccgaatcccgagccctctcactaaacacacctaaaacaccaactccgttctcggcaattcagcatcagtcaagtccaaaaacagacgacacccacacacacccggagagcgagcgagcgcgtgcgcaccgcacggcccaggaaacaggaaacgcggcctggctggctgcgacaccgcgccggccgaaccgccgaagccgaagccacccagggagggattcagccgcgcgagtcaacggccgacagccctctgccccagaagccaacaataacgggagaaaagaaaaaaaattgagccgcggaaggccggaaggggactccccgtcgcctcctctcctccaaatcccaacccacctcaccgatcccatctcaattctcaccgcctcaccgcgcccgcgccagcgcctcgcccatgtgatgtgagtgagccactcacactccccctctctatcgccgcgcccccgattcgcgagccgccccgatccctcccgcgcggctgataaatccgaggcggctagggttgggggtggaatggggcaggaagggatggggtacaacaacggcaaggggggaggaggcggtggcggcggtctaccgatgacggcgccgcggccgcgtggggcgtcgccgttgagcagccacggccaccaccaccgctcgcgcaagatccaccgcaccttcaacaacgtcaagatcaccgtgctctgcggcctcgtcaccatcctcgtcctccgcggcaccatcggcctcaacctctccctccccaaccagcccaccgacgccgacgcgctcgccggcgccaaggccgtcgaggacatcgaccgcatcctccgcgagatccgctccgacggcggcgccgacgacgacgccgccgccgccggggacctcgccggctccttcaacgccaccgcgctcaacgccacggaggcggcggcggcctacgcctccgctgtcgaacgctacgcgctcggccccaagatctccgactgggacggtcagcgccgccgctggctcaggcagaaccctgggttcccgtccaccgtcgccggcggcaagcccaggatcctgctcgtcacgggctcgcagccggggccctgcgacaacccgctcggcgaccactacctgctcaagaccaccaagaacaagatcgactactgccgcctccacggcatcgagatcgtccacaacctcgcccacctcgacaccgagctcgccgggtactgggccaagctgcctctgctccgccgcctcatgctctcccacccggaggtcgagtggatctggtggatggacagcgacgcgctcttcaccgacatggctttcgagctgcccctctcgcgctaccaagaccgcaacctcatcatccatggataccaggatctcctctttgagaagcactcatggatcgcgctcaacaccggcagcttcctcttccggaattgccagtggtcgcttgatcttcttgatgcgtgggcgcctatgggtcccaagggattcatccgagatgaagccgggaagatacttactgccaacctcaagggacgcccggcatttgaggctgatgatcagtctgctttgatttacctcttgctctcgcaaaaggagaagtggatgaacaaggtgttcatagagaattcgtactacttacatggcttctgggctggtctagtagataagtacgaggagatgatggagaaccaccatccggggctcggggatgagcggtggccattcgtgactcattttgtcgggtgcaagccatgtggaagctatggggattatcctgtggagcggtgtctcaggagtatggagcgagcatttaattttgccgataaccaggtgctgcggctctatgggtttgctcacaaggggctcgaaagccccaagatcaagagggtcaggaatcagaccacaaagcctattgatgacaaggagaatcttgatgtgaaggccaagatatcgaccacttcttgaaaagtcctgatgagagttggtatggcaatagcatacttgctttggctctcttcaaggtcagagcattttgtgacttggggatggtgttgttttattttccactctttttttctattctttttgttcatggaattgttattgttatgtaacagttagaggttgcaatctaatgtttatcatggagttaaatgtgataggggctcaaatcagcagaaatagacttgccttttatactgcgttacatctcaatgctactatgctagcttctagtgcaacaagcatatactgatttcgtacgtggtggtggcttgagtttatctatctcatcttcaatgctatatttaagtgaagatatgaagtaaaattttagtatggctaactgaagaaaaatatgattctaaaacttgacaggaggctaggaactcaggtcagaaggaagtagcctcaccttgtgtattgcattgcacttcaatgctagctttctagttcaaccagcatcaccaatatactgattttgtactggtttttgcttgagttcatcacttcatctatctttaaaccatagtgcatttaagtgaggatatgaagcaaaacatattgcatggctaatttgaaatgtataacattcaaataagttatacgcagaactttatatctcacatttgcaatttagttggtttagtgaggaaaaaaaagaagacatattccattgttatggaacttgcattaccaaagagtaactaccaatggaaatataatattttataattcgtacttgttttttaatagatatacaagaaaatatagcatggtgttgttgtttttttttttttactgattttgctcaagtgccacgttttttttctgcctgacgcatcattcccataagtcctaaaaccatggttttgacttttaagcaggaaagtgtggcatcttagttttatttatggatctgatgtctctggtgtattattattgtacaaaattacttaacagtgatggttcattcatacctggttagtgaattatcaagcttttgggtttcccccaaactttcagaggtatgctaccggtttggtttcctctcgatttgccaattcattgtgttgcgtacatctatgtccaatctatgatcctggagtttacttttttttaggcatctggatattttatctcccttaaattgttcaaaactggctagctgttaggaaattacttgttctgactgctaaaaatcaggcttcactctttttgtcattttgttttaaattatgatgcagatggaattaatccgagttgatgaaatgcgtcccaacatttcttaatgtaaaacttaaggctgggaattccaatagttgccattattttccggagctcttgagaaaaacaatcaagaatctagagttgataccctttgaattgcataatgtccattttctgtctggaccatataagtgcaagttgttatgtaacaggcatactgcttactctgagttgcttatattcttcatgtactctctgtatcagttgctgctgttctagtgctttagctcttgctaatgctgggaacaacaaattgcttgccttggagttgggtcatctcagtaatgcccctgttttaaaaatctcagtccatttttgttcttgtaacttttggtgaaagcctcattactgctgctgtggtatgttactcagttcatgcatctagttaatcttgcgactagacagtgctctgtgcagaaaaacaatttaagatgctttcagcattattctggcctcctatgaattttatcaaactcttctggagttctacttgttttggcccctggaatagtggaattgctggctccctcaggcctgagcggtgcctgctatgtacctgtttttttttttagatgggttaataatttaatcaacccaagatgctgatttgatcatggacagcaagcaagtcaacggtccaactaaaccactgatcaatatttactaattcgctaattatgctagctcaggatctgatcatgcaaagcagctatttctagctggagacttcagctgtgatttgttcgatttgggttaggctgtgtttagttcagcgcaaagtttggattttggttgaaattagagatgatgtgactgaaaagttgtgtgtgtatgacaggttgatgtgatggaaaatgactgaagtttagatccaaattttgatctaaacacagccttaattcgactgctgctagatactcgatgtcatggagatttgggacatggatctcaagaaactgccagcaacgatctgagaagaagacccgagcatgtgcatcatctgtcctatgaaagccaaaacgcccccatacaaaagggttttgaatctccaatcaaaattcagaatccgagaggtcaacatccggtcaaacttttcaaacattaactgtattttaaaatgcttagtttgaaaacataaaaatgatgtaaatatatttgtcttgaaaaaggcttccataatctataaacttgttaggttttatgaacttaatctaacagaaaaaatatggtcaaaatcgcatctcaaaaaccataaagaaaaggtaaatctcatatttttagcagagacaatactttgggttcttttttcctgaagatgaagattaagttttttactcaaaacgaggtggcattaatatacgattgattgagttttaattattacaaacttgaaaaataggttaatatgatattttagagcaactttcatataaatatttttcgcacgaaacacaccgttttgcagtttgaaaagcgtgctacgaaaatcttaatcttcatccaactcttatttgacgcacatgcctagattcattaacatctatatgaatatgggcaatgctagaaagtcttataatctgaaatggaggtagtagtatcttattaatagtaggtaggagtaggagcttcaggatattgatggataacattcagttgaattaaactgtttatttatacaccattggttagccggtaagcagtgatagacgtctgtttacaagtaatcatctgatataatcccttcgtttctaaatatttgacgccgttgactttttaaaatttgtttgaccgtttgtcttattaaaaaaatttaagtaattattaattattttcctatcatttaatttattgttaaatatatttatatgtatacatatagttttacatatttcacaaaagtttttgaataagacgaacggtcaaacacgtgctaaaaagtaaacaatattaaatatttaaaaacggatggagtataatatggcctacaccaacataaactaactgtttgcacaaaatatttgaatgagatgaatggttaaacggatatgaaaaagtcaagacgtcgtctatctattatattattaaaacagctttgaaagaagacaccacgttcgctgtgggggctagaaattcccacattaatcggagaaaaagaaaagaagagtccaagtagaaatacaatttaaaaattgcttgaaattcgaaattaaaaataagcaatattgaaagaagagtccatataagaacccaatacgagattaatcaaattcagaataaaaataaaataaaatctaaaattagaaaagaaaaggagagtctaagtagcaatataatttaaaataactgaaattcgaaattaaaaataagaaatattgagagaacagtccatatagtaacccaatacgagattaattaatattcggaataaatataaaaataaatctgaaattagtaaaaaggaaagaagagttcaagtaagaatacaattttaaattaactgaaattcggaattaaaaataagcaatattgaaagaagaatcgatgtaagaaacccaatacgagattaattaaaatttaaaataaaaaataaaataatatccaaaattagaaaaattaaaagagagttcaagtaggatacaattttgaaataactgaaattcaaaaataaaaaataaaaatattaaaagaacactatacggtattaattaaaatttgaaaaaaaaattctaaaattagaaaaagaaaaaagtatttccgttaggaatataatttataaataactaaaaatggtgataaaaaataaagactattggaaaaaaagaccatctaaaacacatgacgagataaattaagtaattataaaggagtagagtagtggcagttgatacgacatataaaaactgttaataaaacaccaattagaatcctaataacgattaaaaggtggggcgacaggcaggccgtgaaagcaaacggacaatgcggttgccgggacctagaaagtaaagaaaatagacctcattgataatcatatccgacttttaaaatctcaatgacaataaaaaggagaagcagcgggcggggtgtatagtagtatagttgcagagccgccgacggttggcgggacttctaaaaaataaaaaatgaattcgaacgatagttgtgttcgattttggaatcccaatgataataaagagtaggcggtggatgggccgtagaggagtatagcagcatcgtttgacgggacttctaaaaattataaaaaataaaacctaacaagacaataaactctaaaaactacaaggcccaatttttaaaggttccgaacttctaaaatcatgtttgattttaaaatgtcaattacaataaaaaagggaggcagcatgcgagccatgaaggagtacaattgtaaagccgctgacggtttggtgggacttctagaat

SEQ ID NO: 28824 - DNA, 9129 bp, Oryza sativa
aaataaaaaggatatgacggaagtaaggggtagcagctgatatgacttttgaaaactatataattagaaatacggggatgataaggtttggtctttcaaagttttaagacaacgagatagctatttaataaattttaagtaaaatcatactgaaaaatatatgatttagtttgggggctagccacgcaattgcgcgggccacccagctagttattataaaaccgaaaaagcggtgagagtattcgtattagttcaagtaacactcttttctttttttttacataagttcaagtaacactcttgaggatattacttgtctattaaaatcttatgcaagattgcagtattctctaatttcttccaaaggtaattccgttgaggatatagaaatgccttttattgtcctggaggctggagaacatacactgaagaacttcagtaagacagcatcttttgatgtcaacaatatgtaatttctctttctcatatatgtacatacagtatacaactttgatcgtcaagaaaacagccatcgtgaaaattaagaaacagaaaaaatatatatgcccccggtaatacaaaacaaaacccagttaattgataagcagaagctgtgccagcgaggacgactcttttaacattttccccaatgcactgcagatcaaggcaattaggcaaagctgatcgtcccatgtttccagcctacttctcgattagcttgcgtgcacgttggtttgctcctttcaccctcgagttgagttcatccacatcgccttgcagatcatccagcgctttgttttgcctgaaatgtatgttggttaacatagtgaaactccatttgaaaccactagcagaacaggagtattatcctatcttgaactattaggtgttgggtgttacaggtgttttggttgctttgttattatcaggggtttagtgtagctttggggaatgatctttatgcttataggatagtgtttttagtgtgaatcttttcttaagtctatgtgtatcttttctttatcaataaaatgaggcagagcttctgcctttgtgttcttgaaaaaaatatatatttcaccggtaaaaaaaaaatctgtctttttctgaataaattaaggagttaactcacctatcaagctctgaacccatgtcacaagccatgcccttgagctgcccaagcacaccactgagatcatctagggcatcatcctgcttttgtttctccacctgcaaaaccaaaaagaattgaagataatggatgctagctatgctagacaaatctctgattttttttattttttttgcgatggcggcagagagatcgagattaaacctgaactttctccatggcggtggtaggctcggcgtagctgcgattagccgacttcccactagggctcagccctagcttctccctctgctcgatgtggctcgccttctttttgaaggaatcatctgaaacatatcatatcgccatttatatgccaaagaacagtgagagcacatgatcgaactgggaattgaatttttcgatgcagatatatgtttgagttcgtacccgagacatgggctggacccttgatctgccttgttttcttgggcttccatggcttggagaagaaccctccaaggctccccagaagcgactcgccctatacacaagagcaaagccatcatcaaaaccatcatacattctcacatgaaatcctcaactttggcacgacattggcaatgctaactgaattttgtcaggaatcaagacggcaatgcattatacttctcactccgtttcatattataatcgtttgactttggtttcaaatttttttaagtttgactaaacttatagaaaaatatagtagcatatctaaaatatcaaattagtttcattaaatctaacattgaatatattttcataatatgtttgttttgcgttaaaaatactactatatttttcaacaaacttgatcaaactttaaaaattaagtttgattaagaaaaaaatcaaacgacttataatatgaaacggatgaagtacatagcatgatcattttttcagaagggaaaaaaagattcaaaatcaagctattgaccttggagaggtcctggtcgatttcgacggccttctcgtgggtgcggctgatctgctggccctgcttgttgagggtgacgagcgtgttggcggcgtcctccctgatgttctcggcgatgcggaggcagccgcccagcgcgtcggtcgtctcctcggccttgtacgccgcgtagttctccagctcctgcaccgactgctgctccagcccgcccgagtcgcggaagtcgtccttgtaccgcgccttcgccgcgccgctgggcgccgtgtacgcccccggcttcttcttcgggaccaggtccgagtccgagtccgagtcgaaggggtcggccttcgacgaagcggccttgccgccacgtgacaccggcatcttaatttgccgttaactcgctaattataatccctagggttcctgcaaaaccaaacagcccatgcatgtcacactgcaaatttgcaaaaaaaaaaaaaagactccaaagatgaagaaattttcccatacaaaaaaaatggataaaattaaagaggaaggaaccatcacagcacgaacgattaaacaaagcaaatacatgaactgctggagatattaattacaagacgagaaattggcatgagagatcggccaaattaaacctgcagtaattctttttgtattgtttggccctccctttctccctgatcctcctccccctggagggcaaaagagaggcaatagatctccctttattagaaactgaacttctttttagcaatgcaaatccttctctcttatatagtggcctcgtttaccaaacgaggtgttatttttgggaaactctcatggtccatcggtgctggagacacgactatattcgggggttttagaaagaacgtgcttctttaatttatcacatgctaattaattagtccaattaatgacgtgcaagaatgtaggcgacaataagattgtgagcatgcattttcaagatatagcggagcaaaagattgcattcttaagagtataagttgatgccgattttatgcagagaaggtactactgtccatgattatgtttactcgtggtatccttaacttgagcttagcaaatattcaggggtagatatagctgatttagaacattctattaactcatggttgcatgcatgggtggtgctggaccagactacctgagcatgagaagtgtgctggtgtcaactggttacgtttcttatggtaaaaacatcttcttctaagttcaagttttagatttcacgagcgctcacattaatttaagatactaggtgaaaccccgcgcattgctgtgagaatttagtatgataataataaaaaaaataatgtgtaagatagctagataatatcatattaagtagattaatgtggttcatgataatttaaatctaaatagtgtgtagaatggtgattcaaacgtaaaaaagtaaggtggtatgactttatggaagaagaaaagtagggagatagtttggaccgtagattaatcatctaaagactaaaaacaattgatgtgatatgatttaattagaggaaaaaaggagaaagataatttgtaccatagattaatcatttaagcactaactaagtgaggatgaactatatgagtatataggatatcataaaacataataaagatatacattgaaacattatgtgaattatgttgggtgataatttaacatgtttgtatttgaaaagctcttaaattataaaaactataaagatatagcatgtttgcatgatgtttaaatgtgatgattgttagtggatgatgatgtggcatcttgttaattagtggagatgatgtggtatcttattagtggatgatgatgtgtcatctttgcatgttaagcctaaggagttagtggaggataactttatactaggatagaatacccatcgatattgaggcatctgtggtgacttcgctaatctcaagatatatcggctcactctttcggatgcatgtgctcattgagataggttgtttgtatgtatgttcgtagagatgagtgtgtgtgttgtaagtatatgtgtttatagtgcgtttatataaaaggaattgtgttattgtgtttcatctatgatgagaaacggaatttctggaaaattctctggttatttgatcatatattaccatgtataactaatgtcttgtgtattgtttttcttgccaaaatgtgaaagaaaaaggtttccaaagcttgaactgttaacgagacaagtattacgatttcattctgttgtccaaaaataggtactcctttgaatgatagaatttattcccgcctttgctttatccagaaaatacgtataaatagaagtggtgagaatactaactaggttaaggttcaaatgtggggcatcggagtctcggagatcttctcttgtatagtctctcattttcaccagcgccggatccttggcaatatactctcactttaacagtaagttgttttttttaaaacattttggaacctcaaccctattgcaatattaggtactgcaaagatactcccataggctttggaatcagtgtgtagaaattcataacatcagtatccattcagctacccagatcgaacttgggcggaatctcagtcccaactatagtgattccgacaatttaaaacactatccatcaccgtcagcaaaacaagcatataactgtaagtcaatagtatgggatcatactgcttggcacagaatttgtcatgtcaaatggagtatatggtaaactacaagaggcaagtctagtgtacaaaaattgatgaaagggatacaattgagaaatgcccaggcaagtgctttcttgcaaaagccagatgcatctacaataacagcatccaacagcaggcatctctccgtccaaacatatcctttcgtgtatatatacaggaagatatttcctataacttaaatgctaacttaaagaaccaagtgatggatcttttgcttcaagaactcatacaatgaatgtcttctttaacactttcttgcctcttttcctgtttgtgctcaaagcattaagaatttctgaatcctcgtcgttcgaaagaattctagcagcatcaggtttgtccagcagttgcttggccacaaggtacccagcaatagaccaggtttggtaaagacgagactgtttcccaatgaagcgtgctcgtttggtgtcatagtattcaggccatttgtcgatagcaattcgcctctcagctacctctacagcttttgcagcaatctctggtctgttcatcttgatagatgctactgtgagctgcacgcaaagaaagtaatttctcagcaactatatgttgagcaaacaaatcatagtgaattgtcaattgttactacaaactgtctgcatcaggtaaaaacaaagtcagcaatttcaaccacaaaaaaaaaaaactttgttacagaataacgaacctgccataacaatgttggccaggatcctccattatgatatgaccaaggcctgaatcaatagatattactaagaagatgctcattggaacttgaacatgtacatagatgcaaagataattattccgaaaactcacgtattctttgggtcacttccagtaatgatcttccattcctggttctctagagcaggatagcatatcttcaatggcatctctgccactaaatcagaccatttggattcaatcagatccaaaatggcatgggattgatgagttgttgccaagctgcttactatggaccataaattccccagagaaaagaaccggaagtccatgtgagctggctgcaggttcccaatgaagtaacctcctttaggaggtatccactcaacaagccacggagaaacctgatcaggatatatgttgaacttgttcacagcatcataggaatattcttctgttttatatcgataaatctcattcagcttctgcatgtcaacccaatagtactctctaatatgaaaggacagtgcgataagcctattgtttagagcacgtattaaatcagctgatccatcttctggggttaacatttcacgcgcgcacaggagagctgaatagaacagtgcctacataaaacaatatttacgtgagtttgctttatcacaaaagagaagctgtaatgaaaaatacaggaatactcaatgtcagcccctttttttgaaaaatattattatagcccttaccttgtaaagttacgtctgaatataaaatgtaagtgaggccttggattaaggtgatgaatgtattcagttcacttaaactaggataaggcagaggaaagttattaggagcatcagcaggagaagcaggccatcctcttcatcattgatgctgattattcaatgtgcacacctatgaactaacattgttgaggacgacatcacagttattcctatcatcttgttgcattcaaactttttcaagattgactttggtccttatatcttattacgaaacttaaatagaaaatatactctattgcaacagaaatttactatggctaattgcaattgtttttaattttgatcgtgagaaacttgtaggaagtgtccaatttcaaaagtttatatttgttaatcatccaaataactaccttagctgaaatttctgatatgccaacagtaacccagattaattagtactcatacctcactgccatgtgggtgacacatgatacagcaggaactgaacaagaaaattacatgtttccatatagtttttgcaaatcattgaaatggaaatactggaattggaaaattaaatgaaaaaaaaactatataaatcttctgtgtgttaaaagttagatattatgatgttacaagatttttctaattgatgaatcttgcttcagttttaaaattaagttccttgctctacatgctcctgactttaaacttctatcatttccatgcccattttgtgagttgactgttaagtggctatgaaaatgaccattttgtgcgttttgagtcaagtcagctttcagttatcttagcgagccactttcatatggagatcgctgaaaaaactcaggggattggaaaagataggtttaacttttgagggtacacatgcttttgattgaatgggataaaatccattcacaaaagacacagaattgacaggagtatcgtaaaaaacctgaatttcaagtggatgcccatgaattcccattcgacgatcaatcatgcatgatccatcagttaccagtaatgtagggaacatgtcaaacccatcagctaaacaaagctttaatatcattttaattccagtctgaacatcaattctctcctgaactgtcagatctcctgaacactttccatacgccctaagtaatatgatccaccatagacctgaaaccatcaatcacatatccagttaagagttagtagaagcagagtagcaaaaaagaggatgtgctagctatctccattagtagctctacctgaatcaacaggtgccacacggcctattgctgcctccccaaaatcaggatccaagacctcctcagttgcatcttcatctccatcgagtggaattgttcgcaccttgaagctagcaggcattaagccctgtcctggactatggcagtccattgtcttctcccagctctacataacaaaatgacagcagaacttgttacaccttggatagggcatacaaattcattttgttgctacggtaactagaagagatatttgccaagaactttaaggatggcaatctcagtaagccaacacatttaagatgtgtaattgtatcattgtgcatcgacttttacatgagaaagcaagcacacagccaactttctgtcaacaattttatgtggaccaaagcagctcataagaaacaggccttaccatcgtgcgcacttcctcaagagatcaagctattatatgtctaaagaaaaaaacctagagcaacatattcagatggtcacaacatgaattgaaattatcaaagctggctcatgtgaaataattttattaccggaatgttcatttacactgtcacgatcaatacaaggcctggatctaaaacacgatgcaacaatgaggaagcaacgaagcaagtacctgaagctgaagggtgtgcaaaatgaaattgcgcacaatttcgtactctcccttcaatagaaacgcgatgccagatggtatgaaatcccgaataaacacctgatcataattcatcggattggcatcattcgggtcgttggcagcaatcgtcccgaccggactaccacaatagtaaaccacggactcccgcaagagctcccaagcttcatcctccacagaagacgccttccgccgctggggcggaggcttggcggcgctcccgtttacgctcccattgccacctacagcctgaccaggcaccctcacatcaccgagagcatggcttgccttgtccaccgcatccttaacccacgccccgttcccttccgtgaccctcgcaaggtcatcgatgcgctggcactggcactccacggcggcccgcagccccggaaacctgaccggaccttggagcgccctggagctgtgcaacgaattggcgctcctcctcctcctgcccctcgcggcgtcggccgcgaggggcaaattggatgccggggagtgggcggcgaatgcccccggcatactgtggagggccacctccgcaatccccattgccaccgtgctcccaactcaaatgggtgactgcaagaagcaccgcgcacggccatgtgttagataaaagctaacaaccaccagaaacgaagatcccaaaccgaaacgaattccgcgataatcgaaagaaaaaaaaaccaaacccaaattccatgttcgctacgctcagcatggcaagaacagccgcgcgcgagggatcacatgaacaagtggcgcaaatgattaacgcgaggaggagaggaggcggggggggggggagcaactcaccggccggaccgccacggtacgttgggaagcgcgagtggccaccggttcgacggagaaggcggacgctaagggccggggggagggggactgggtggagtggcct

SEQ ID NO: 28825 - DNA, 13020 bp, Oryza sativa
  unsure (1)..(13020): unsure at all n locations
gggaagaggagagaaaggaaaggagaggaaaggaaaagaatagggaggagaggaagacgaaggaaggggataaaacgaagaccggagacgaaacgggggaggcctggccgcccggggcctcaacgccaaccatcccatctctcgcaagtctcgccacgcatcctattttccgtttttcacatctcctttcttcttttctttcctttttttttttacacatgcgtagtaggaatcttttcgagttcaacgcgaacacgcaccggcaacaacaaatatcccaaggtccgaaatcgcatcgtttgaattttgtgacgtataggcaggtttcttttttctttgagtttttcatccactttgatgattattctcaaatgtcattctctcaagtgacttctgatcatttgtcatccgaatccaccgagtcgtttctattctattgtttttggctaacatctaataataagagtgatgaataatctctccacccctaaactctcctcaccccttctctcctgtctttatcttcatctcatcgctcggacttaagaatagcagccgaagagggtggcgttgagctcgaagaagcaatcgttggaggagaatcagggttcgtatcgctactaggagtgcagcgtcgagcaagtccagcgtgtcgagtagcaacatgaggaggtgtgagtaggacgcgatgtttgggaggaagttgtgcttgtggaggagaccgaggagctatagagtgacgggtgggacgcaacacggcaacggacacggcaaagggagttgagtagtggcggtgacggcaggttgcagagcaatggtgggaaggacagcagtagcgagtgtaggagcaagcgtctggggacgaagaacgagtgacaaccaaaggttgagctggaagtacaggcggtggtagtggaggaaaggaagcaatgcgaaagagagcggcattaacgtgttgctggcacgtaagctcgtcggagttagtcggctggatcctggaggatagtagaaagggggaaggaggaaggggaagaaaagggtaatttgatcctaataaattagaaaatgttgtgaagggtatgcagtggtatatatgtaataattgtaaaatcgtaatggcatggttgtaaataggtcaatagtgatggtatatttctaaaccacgaaatttattatggcacgaatccaattaatcctattattgtcgacgtttgatgtcgcaattctggtatttgcatagtatggggatcgtcggtgctaggatatacgcgagaatgaggtaaaagagacggagacagggatttttatacaggttcgggctctcgaattgtcaggtaataaccctacatcctattggccgaagccggtattgctcttattcatgataatcacaccagtacaatatttggggtagcctatctaactgttgtcgacatagcagtctgacgatctgactcgtagtcgacaacaaggtaaccttccacctcgaatccgtgcccgacgagatcagagatagcgctttcgtctctcctgacagtatccggagacaccgtagggtactagccgtgcttatccctgaagtcgatatccggcggcgtgtcttggcatatgtaggcttctatgttgtggcttctatgtcgattgtgttgggtgttgatcctccccctctcctcctaggggagcttgtatttatacccataggtgtccccttgtccaggtagaactagggaaaccaatatggatacaatccgagtagtccttgtcgtttccacgtagaactctggttgtctttccttatccggaactcctcctatatccgcaggttatttccgtataggacatggtatgtggtgggtcatgccgagatttagtcaactactattaggtatgtggtatccataaccctgacaattatatatgcccttttatggaatcaaattatcaaaaagaaccataatttcagcaggactccatgttgcttggtcccttacatcgctcctaagtggctaaatgggtggcaacctagggcaccacgccacctcccccacagtcctccctttcctcctcaccgtcgtcggagttggacactgaaaattgagcaacggcaagaatggcggtagtagggcttcctcccttccccggtgccctaggactagcatggtgaggatagggagtggatctagcgtgcgtgagaaggtcaaccgcctaggtacatggcggtggcgtaggctagaggtggtggcaacgactaaggtgtgtgcatccagaggcgaggggatagttggatctagttttcctaggccaaatatggtcaaggaaaccagatctggcaatgttgaccatctctatgcgtcaggtgtggcagcgatgggggcgaaagtggcacaagtatggctatgtaggcgtggtaaggtggcggtgcaggtggcgtcgacacaaggtggctgcggaggagtggaactggagtagggtggagtcggcatggacacatggttggcaggtggggcacggtcatagacatagctggcagagagctggagaggcaacatgaagaggttgcatggagagataagaggggcgcttggagaagacaccgtagaagggtgactcggatgcgcacgattgctggtgcttcttgttgggcgaaaggccaagtagtggctcaagcaatgaggacacggtaagcaatggcatggacaacggcttggatgatggctagcaagtttcttttgatagattggaccacttttaccctccttggagctcctcctctctaatggtcggtctacttccggactctggtcacggggagctccatggtgatgtttggtctggcttgaggtattatgcttggtggaggatgagtagatgttagcatcgacaatgctttgaaaggtcttgtggtagcgagctaacccatttggtggagatgcggtgcacgaggcttccatggctcaaccatgcattggtgtgttagagtagagtcagttatttagctgagtgtggcaagctcgacaatgataaccctcaattattctagttttggggacgctaagaagttgcggtgcaagtggtttcttcggtggctgtgcactgacttgttatggtggagtcggagctacttaccggggatggcaatgacaagtaacaataaccttcaactacttttatcttggcaatggttgtcaagatctgtagtaggcatgtagtaggagttttggccaaaaaccttgcttagtctaggactggtgtcgacgatgtcaacgtctatgggcatcgtttcccttctcaaagtcgttatttttttgcttttcacttttctttaggtgaaaatttagttccggtgttcagacgggctttgtaagtatcttagaagatactttcctcctcggagtgttcgcccaaaaagccctgcctcgtgtgttcgggtttttaagactgttgttcgttatgaaaagttggagctacttgtttagctaggcaatgatgacttgttctctgcatgggtttttgtcggtttttctcgattaaccgtgtgggtataagatttttgagcctagtgctcctcataaactgagcaagtctctttttcttaatgaacacatgaacttcctaacctcttttgaggttttccttaaaaaaatatatagtcaaattattgattattagctgttaatcattgaacatataagccactatacgatttgtttatatgtataaataacgtgaaaagaacatacagatcagtcatctaaatttctgtttaagcgcttagatagtacaaaaatgacaggaaaaacaaaagaatgaccccaggcactactagaaaaagcattttcgctgatgttgggtatttattttcgcaggtggacatgaccctgggagccaaatagctacctacaaaaatgtaaactagggtgatgctcgctgtccgcctacgaaaatctatccacctgcaaaaataccgcaaaaatacccttcatttttgcacgcggaccaattatgtggtctgcctacgaaaatagatttggaatataaatagagccaacccaggggcgacttttttctaagtcctcctccctcactcctcagtcctctcccgcgcgcatccctcccttccccctcacctctcccctcccctcacctctcctcctctccccggtcaccagccggaggcggtggcggctcccagcggcgggcggcggcaactcccggcccctcccccctccctcccagatctggtcggaggagggcagggccggcgacgctcccctccatcgcgacatggcggcggcgctcccatccctcgcgacatggcaggcggacggcggcggggcgcagcgggccggggcggacggcggcggctgccctccttccctcccagatctggcggtgacggcgagaatggtggaggcggtggcgtctgtcctccctccttctagatttgtgacgatgaatgttaatttgtgatgtgcttgttttgattgtaaacaatttgtgatgctttgtgaatttgatttggattgatggggaatggaaactagattagatgggggaatggatgccaatttttttaatgctaggagctcttttcgcaggcagactagttatacgcatattttcacaggcgttcatttacatgcggacaactagtctaccagcgaaaacaggtttagcacgcctgtgaaaacctctttgatagtagtgaggtcccagccaatagtgctcgagtttttatccaaaaaaaaacatagggaccagcgatactgaggccacgaaccttaacatcacgtcttccagattccgactatctccttcccctttatccatccgcagcgtcactgtcatcacgcgattgatagctaatcctatcgatcaatcgatcgatcgatcgatctcctccttatcacggactgccgcggcaagtgattggcacgggtgcacgtagccgcgtacgtagcctgaactcctctttcggtctctgttcttgtgatgctaaaataattaaactgatttgtttaaaaagatcgcagctccctttcttttctttactccaccatcagcgtcgtcgtcgatccgctcaaccatttggagttaaattacgaatcaggctgtcagctagcagcatcttggcaataatgcagtgccaattaggagtaagctcgtagatcgtaggcgtagagtcgttcaaaagctcctaaagttcagttaaaaatacagtgaactggaatcagcagaaagcatttcgaggccaaaaggccaccactcggtgtgcttttccacgcgggacgaaagcagtttcctaataccatttcgaacgatttccgagtattcaagtttgaaacagtaaactttacaaaaatttgtattgaaattttatcaaaaaaccatcgttcagttaaggttcgaggggcatgtttgtaaccaaaataaatcttaccaaattttggcaatatttcttacgtactactttgtccctaaacctttttagtccctgtcacatcggatgtttaacactaattagaagtattaaacgtagactaatgacaaaatttattccataaccctgaactaattcgcgagacgaatctattgagcctaattaatctatgattagcctatgtaatactacagtaaacattatctaattatagattaattaggcttaaaaattgtctcgcgaatttgctctcatttgtgtaattagttttgtaaatagtctatgtttaatactccaaattagtgtataaacttccgatgtgatatggactaaaaagttccagtcccatcaaaacacccctttaatgtgttgtataacaaatattcttttcttctaatatattgacgtgcaatccttttgtacgttcgagaaaaaaaaagcatacttgcatgtgcaaggatgttcaacaatgtcgttaatagaagtatagatatattagttagagaaaatagtcaaatacaatgtaaagataagatatattctagagataaaatagagtcctagagatagaatcctagagataaatctactattacttgtattatagtctaagtctttatcttctatatactcctgtatatacctcttaaaagggttgatataatatataaaaaaacataaaaaatacaacaaattaaatttttctacagtcgtgctcacgctgcataccggtaactagtcaagaaaactatttgataatgctgcttacgaagcaccgtatattcacattctgtttttccgattacaacgatgtacacccacttattagtattcattcaaaatgatagaagcgaacggtaaaatttagccccactaaaatcctactgaaaacacacgtgtaagtttaggacgtgactagatgcccggtgtctaatctagtgcaaaaaaattggatgtttaaaatattgcggctgaccattagtggaacatcaagttatacattgttaaaataaaatagtcatataaatatttgaaaaatatgtgaaacacagtaacatatatgttgaatattttttctatcaaaataccattatatgatatcttaaatatttaattacaatgtatacaatagtgtaaactaattatgtaccggataaagctgtgtttgcaatcccatgttcccaatccctcttttgtttttcgcgcgcacgctttttaaactactaaaatgtgcgtttcttacaaagagtttctatacgaaagttgcttaaaaaatcatattgatccattttttaaacaaattagcaaatacttaattaatcacgcgctaatggactgctcagttctccgtgcgaggagtttagttcccaacttcccatatccgaacacagccttaagttaacgaagattcatgcatgcaggaggggctggcctggtgagctttgcacaaagagaacaggaggtgcatgcatgtagtgcacatttggtccaaaaaaaaaatgtgcacgcacacgcagcaacaaaccagtagaaacattttccgcgtctttaacatgaacctaatgaataaagtcatatactccattcctaacccaatgactagtatgatatccatagtattaaataagctaccacctaaaataaaaaatgatatggcaattgagtaaatgaggaaagagaaaaaaagcaggtcttgcatgagatatggtttctacgcaacattcaagacattatatgaaataaatacattaaatttaagtatggaaagatggtgttcgcattgaaagagtagtgtctagtattaattttttgataatgtgaagttttatagaaactatgtctagtgtcttgggctctcaccatggtgttcagaactagtgatcaatcgcatttataatcgaatccgagagatacatttaataacagtacatagttggacgaattcttatctttgaactgaagataaatctcttttaaataaacactaccttgacaagcaaacaataaataactactagactctgtctgttgttacaatcagctgttgtcaatatatatgttgaatatttttttaaaattttttataatcatttagttaacatgtaataaacgaatgaacgtctatccgagtgattagaatcatctcacaagtcttacctaaacttttgcatcgtaaattgcataagagtaatctacaatatttccttttcaccgagtaatctatcactatggtcaaatcctatagcgaagagactaaaaccttgtggtcatctcgctcgaggagtgtcagagatattaccagctaccgacgacgcaacagccaacagagcatgagttgcccatctgattttgcatcaaagccagcatgttacagcttagatgagcttgtgatagctctgggagtggcatggcaccgtctagcaactgcacgacttgccgtatgcccggacgagcactgggcagaggatgtaaacaaagcaagcatagtttcagcaccaggcttgcttcttccacggcaaagtcgccttgcagcggtgggtccacagcgtcagtgaccgtcccttgccgccaatgctccagcaccatgtccaccaacaagaggttaccgccgtgttcgtgtcttgtgagacaggcctccgtccgcaagtaacctctagcatgaacacaccgaaggcgaagatgtcggatgcctttgatggcctgccagtgtgccctagctcggaggctaggtaccctattgtgctgaccacgtgtgtgtggtgtgtgggtcggtgccacgatcatataaccttgcaaggccaaaattacctagtcgacagttcatttcggcatccaacaacacgttgcttgtcttgatgtctcgatgtagaacgacttgttcccaatcctcatggagatacaatatatactcgatgcgatgcctttgatgattctaaacctttgagccaaactcatgattttgctgttctcagcatacagatacttatcaagactatcatttggcatataattatagactaacagtagcttacccatccgccagcaatatccaagcaactgcacaaggttccggtgccgaagttgaccaatactccctccgtcccaaaataagtgtagttttgcattattcatctctaatatttgaccgttcgttttatttgaaaaatttttatgattactatttttattactattagatgataaaatatgaatagtactttatgtgtgactaattttttaaaattttttcataaattttacaaataagacggatggtcaaacgttggacacggatttccacggctgcacttattttgggacggagttagtactaaccacctcggcaataaactccttcattccctgcctctatagagatgaagcccaagcccttcaaggagtgcttcatcactgctatcaattttcactgcaaattcctcgtgcttgctgctacccctacatacagaaaaacacacacacacacacacaaacacctgacctgcttattcccttcatccgtgccagccgactgctatggcggcatgttattcttttgttgtatgttttcttcttcacatgcacttctataaacatatcattggagtatgagactcatcattgtgccacaatagcgtatcatataatcatgtgattgttcaagatgttattcaaattcgttcaagcttctcctgagcggcacaagaaactcaggataggagctttacccttaccgtactgatgatgattgctcaaaaaatcagacatacagggtgtgtttagttcgcgtcaaaattgaaaatttgattgaaattggaatgatgtgatggaaaagttgaaagtttgtgtgtgtaggaaagttttgatgtgataaaaaagttgaaagtttgaagaaaaagttaagaactaaaccaggcctgtatatggttctcccttgtgtcagttagtagttcttgccaacacaagtgcacatttgcgtgtggcagtttcatggcagagcgtatatgcgaatgcgatccacggttttgggtaatattatctagcttttaataagaggatggatgtgctgcttcattacatattctatttttattcatctatcaacaaggctgtgatcacacactttctattttgataccattgtacaaaatgaaaaagggtaggtaggtggcttctattatttgcgagttgttgaccttggccattatatttcttagctgttttatgttgcagtgaattaggattcagggtcaaatcgtatatatggaacaccattcttgcggtattcctatatcctatatataaatagtttaagtttcactgccggcctttttttcttttcagcaaagttagcttcagtcaactctgttctgaattggtttgttaagtactagatggaccttatggatcattgaattccacggaaatacactgaaactgatgagacgtgagactaaatcaccgactagtcgactacttttcgttcggccattaattgaaggccatatttattcgggttaattagattcgtaacattaaaaattgtcggtttggaaatatatcattactatttatgtatttgtaccgatgccattgatgctggtttgtaatctcagtgatgccactaagatacgtatttttgcatgtattaaacaaaaataccctcatcttctacctctctctccccttgtcctctcctctttctctgctcatgctcctctgctcctgttgttggcgatgcttctctactgctctctgattgggtcgacccgtctgcatccgccgccggagctcgcggcactggacaacaccgtgcaggtccaccggtgctcttcacgaaggccgtcctcactgcgtcgggctcgggcatcgaggtggccatcggtgacgaggtggatcaagaggcagttgctggaccagagaaggcaatgatggcgcatcgggcagctgcgagcgtggtgagggaggtgcaggagctcgtcagagaggagaagtggccactcttcaccgctctttccttggtcctttgctgcttcggcattgtcgtggccatcgcccagggctccttgctgcgaggagaggcggacggatctaggataccatcatcaccatctccatcaagcatcggcctccatcttccccgtttccaccttgctagccgcagagagggactaggggagggaggagccacattgtcggagtagttggaggaagatgccatcggcgatggggactgagggccccatggcaacgttgtcgtttgtgtggagctctgcgtaggaggacgccagtggcggcacgaggtgcagggagacacggacatcctggcttaaggagcaccggagaggaaggagatggcgggtgcggtggccttgtccatcgttggtcacgcttgccgctgccgttgctaaactatcgcctgtctctcacgccatggaagagaggaggaaggaaaaagggaaagaaggaagaaggggaaaagccacaggttggttcatttttttttaaatgaatccaaggggtaagtagtggctataaggggtaagtagtggcatatctcaaatatgtgtaaaatttcaatggcacggttccaaatactattttgaaaccaacatatttttaatgacattgatccaattaacccatatttagtttgtttatgtgttgcttgaattttatgctaacatgctagtagtatccatgttgtcaggtcattctgttgataaattttcgaggagtaatcttccagaaatggagaagcgcaagtaagtagccagtctcctgttctcagaagctggttgaatttggaagcttgaaaagcagtggtaattgcaggtacctggttccatgtaacatgccagttgggcactttattttcatacttcattccaggctacatttgcctccaggaacagcgttgtttgtgtttgtcaacaacactttgccccagactggtgagttttgcatatgaagtagtgttttttttttgtcccgcttgaacctctgttgaagcttcagacatacaattttgttgtggctgcagctcagctgatgggcagtgtgtatgagtcatacaaagatgagggcgatggcttcctctacttgtgctacagcagcgagaagacattcggttgaccaactcctccgtggagatctgctttgctgtaggtttacctcgggcgtcaataatatatgcatgtatatatattagtatgattagaaattacaatgatgtgttttatatactgtacattgattgatgtgaatgaagtgttacaaggaggaggagaaaaggttcataccgaacttaattatcccacctaaatttgtgaggcaaattaagaagaacataggccgtgtttagttgattaggtgtaaaaattttaaagtatacggatatatatttaaaatattaaacatagactaataacaaaataaattacagattccgcatgtaaactgcgagacgaatctattaagcctaattaatctgttattagcaaatgtttactgtagcaccacattgtcaaatcatggcataattaggctcaaaaaattcgtatcacaatttacatgcaaactgtgcaattggttttttttccgtccatatttaatgctccatgcatgtgtccaaatatttgatgtgatgaaatttttggaagtttgaagggaactaaaaacacaggcatagatcactcattttcaaagcaggatacagagaatttaagagtttaaatttccaaagagctttgtccgagcaggcgagcactctatcataagcttgcttgtacaatacaaggcttgactcaaacttggaaaatggcatccatgtatatatgtgtatgtttnatcggaaaagcgaacgcgcgcgtgcgcgttgncggcgagagtttccgatagtttagcttaattaactaagtgattagtagataatgacggtaattaagatatgattttcttttgtccggaagatttttttactaaccgattgaaaacttttgaagcaaattttaaaaactttcaaaactcaatttgaaaatttttaactcgaaatttaaatgtgtaagataaattttgaaaactttcaacccagatttgaaaactttcatctcaagatttgaaaactttcaagtacagatttgaaaattttttaagttaagatttgaaaaaatatgaaaactttcgactctgattcaaaaactttcgactcagattcgaaaacttttgactcatattcgaaaacttttgactcggattcgacacctctcaactcgaagtcgaaaactttcgactcgagattcaaaaactttcgactcgaattcgaaaacttgtgactcaagattcaaaaactttccacgcagattcgaaaactttcaactcaaaatattttgaaaaaaataagtgtgctaaagattaaaccaagtaataagaaaaaaaatgaaaaatcccgaaaccacgcaaaagaaaaaagaaagagcccatcgcgaaaaaaaagaaaaaatggctgatgggccggaaggcccggtagcagatggcgcgtgcgccaactagcaatccccatgttttatatactagtaataagt

SEQ ID NO: 28826 - DNA, 3267 bp, Oryza sativa
acacgaccagatcttacatggtctttcgtctctgaaggatccgacaaggccttattggctctgggcgtccccagccgaagttccctcaggttcctcggaggccttgtcaagacggcgtaaagggacagtaggataggtttcaacgctaggtgtcttttgtggtaagggatctctgggtaaaacacttggcaatcttgtgcacctgatatcaactttgttgaagcaggggtaatgggagaatcgctacatcgctggtcgaggaccaggcagtagtcgtaactcgaccacttaaagtggaagtagtgggagaaacgccacatcgctggtcgaggaccagacagtagtcgtgactcgaccacttaaagtgaggcgagagagatcactacgttttactggttcgggaaccagaagtaggagtcttttaatcacctataggggcgctaaagttagtttattacatgtgcatatcatgtggccagcatgactcacatacctaacttatagcatatccggatgtccgctcgcaatcatgtcgggtgatcaaaccgacggcgtttacgaggaattatccgttaacaaccttttctcgagtagtccagctatggccggtgctatgagataggtcgtcggtcttcgttggtaagttgggtgcgacgactccgcatttgtcgagaatgttctcgatagtggggtgtactcgaccacaacctactcgagtgctcaaatgtttctgaaaaatattttctagaaggcaagacatatagcagagaatatcgagtatgtactcaaaaactgcatggatcttctagtattattaggatataacgagcagatgtaaatatcaggtattatgtaaaccgtaaacaagcatgacttatacagaagaagacagagcgagcccccagcgttagatcgtagtcgatttaacatcggggacacccgcacaacaggtattattgtataaaaagcatgctctgggtaaacataataaattatggatctgacaatactgtatgatctgaataggtacgataaattgcagataaaatattgcgtacctttatagatacatgccggatgtatctacgaaattagtagatcaatttaaaaaaccaatctaccaattaccttgctgcgtactcgttcgatatcaggcaatctgacatcttttgttacgccgcggagcttgaggcttggatgatctcgatagaccaagttgtcgatgacgatgatggttccgatctagtcggaagatgtacttggacaggttggatctccccacagccgaagtcgtcgagtagcttgttgtcggagagtccatctcttaaacccatctcgtcgaaatcctgaagcaccaaaatccccctacctggcgcgccactgtcgacatttgatgtcgcaattctggtatttgcatagtatggggatcgtcggtgctaggatatacgcgagactgaggtaaaagagacggagacagggatttttatacaggttcaggcccccgaattgtcaagtaataaccctacatcctgttggccgaagccggtattgctcttattcatgataatcacaccagtataatatttggggtagcctatctaactattgtcgacatggcggtctgacgatctgactcgtagtcaacaacagggtagccttccacctcgaatccgtgcccggcgagatcagagatagcgctttcgtctctcctgacagtatccggagacaccgtagggtactagccgtgcttatccctgaagtcgatatccggcggcgtgtcttggcgtatgtaggcttctattgttgtggcttctatgtcgattgtgttgggtgttgatccttccccctctcctcctaggggagcttgtatttatacccataggtgtccccttgtccaagtagaactagggaaaccaatatggatacaatccgagtagtccttgtcatttccacgtagaactctggttgtctttccttatccggaactcctcctatatccgtaggttgtttccatgtaggacatggtatgtggtgggtcctgccgagatttagtcaactactattagatatgtggtatccataaccctgacagtagctcccgacttcaatgcaaatgtacgaattcatattctcaaccgctgaccatggagtgactgttatcgagctcaagtgaccgttcttagtgaattcagagataacattagacttcctttgttagcctcgtgcgggcacctaaagggttttctaagtcaatctccgatgtcaaccaagaaggtacagagcatacgactaagtctcctgtcttgccgtaatcgagaatttggattgaagtcaagaaattttatctcggcgggtacaccatctcttcattccgtattccttgtcgagatctagcaaccgttctcgagcgattgagaaggcgtagagtctacgacggagctttgtcaacatttgtcgtactcgccttagtcgatcttggtgtagaaccatagagacatgaagttttcgacaatgtcgaatagaattttcttgaaatcaatactcagaaaagaatattagatagaaatagccctcgagcgaatgctcaaagggtgacatgttataatatgacagactagtgaattgaatgtacagaccagtgttttgtatatgagcgtcttctctcttaccgactccgatcagtcagtttgtagagttatacactctccctagctcccagccttatcgtcggagaatcgttctcggatgacagggctcttggacctttgacctgccttggttgaacaagcactgatcctagcccccagccgtgaagttagaaaactcaatttccgattacacggcttggttaatacgcacggcgagaactcttacacgaccagatcttacatggtctttcgtctctgaaggatccgacaaggccttattggctctgggcgttcccagccgaagttccctcaggttcctcggaggccttgtcaagacggcgtaaagggacagtaggataggtttcaacgctaggtgtcttttgtggtaagggatctctgggtaaaacacttggcaatcttgtgcacctgatatcaaactttgtgaagcaggggtaatgggagaatcgctacatcgcttgtcgaggaccaggcagtagtcgtaactcgaccacttaaagtggaagtagtgggagaaacgccacatcgctggtcgaggaccagacagtagtcgtgactcgaccacttaaaagtgaggcgagagagatcactacgttttact

SEQ ID NO: 28827 - DNA, 516 bp, Oryza sativa
taattgctgccatctagagttactgtgataataattcaagaattaacattgtgccattgaaatcactagtatgtttaacatgaaggagtagcataattttgtgcttcttttcttttcatttcatgtttcctttttgctagaagcaaattgacatccattaaaaacagaggatctggactagcaatgacagtagggcttgctcatcacagttaaaactggaaatggaacataattgaagtggccagtgccataaatcgatctttctgtaatccctccttattacatgaaaatggagaaagttttggatggatgaatacaaatccaatccaaaccataccaaaaaaaaaaacaacaactaattactttctttctttttgacaccaatagacagagaatgcaacaacacaaaagctactatacaccatgaattctcgctgtactggtgttctcacatacacatgcgcgtagaattcaacacaaaattaaaccaattcaacacgagatcgacgagcacca

SEQ ID NO: 28828 - DNA, 17581 bp, Oryza sativa
ctcattttgactaaataacatgttataaaaataataagggatagagaaataccatacactaaatgtcatatatgattattattgaaaaaatttatttggtaaacaatgcaatatacatattatacatattgtctaccaacataatcttctctcgctgtagtaagcattcatttggtcaagattaggtataccctctacccttcgatgtacgttatatactgatactgtcgacgtttgatgtcgcgattctggtatttgcatagtatggggatcgttggtaccaggatatatgcgagattgaggtaaaagagacatagacgaggatttttatacaggttcgggctcctgaattgtcaggtaataaccctacatcctgttggccgaagccgttattgctcttattcaccataatcacaccagtacaatatttggggtagcctatctaagtgttgtcgacatggcggtctgaaggtctgactcgtagtcgacaacagggtagccttcctcctcgaatccgcattcggcgagatcagagacagcgctatatctctcctgacggtatccgtaggcactgtaggggactagccatacctatctctgaactcgatatccggtgtcttgtcttggcgtatgttggcttgtatgttgtggcttctgttgttccgtgtcccctctcttcctagggggccttgtatttatacccataggtgtccccttgtccaagtagaactagggaaaccaatatggatacaatccgagtagtccttgtcgtttccatgtagaactctggttgtcttcccttatccggaactctatccatatctgagtcagtttccatataagacatggtatgtggtgggtcctgccgagatttagtcaactactattaggtatgtggtatccataaccctgacagatacggtatacccgcacgtatacgggtagtttccttatacattaaggacatctaacccgtgatagaaacataatctatggacggaaagagttctactcggataatactgggtctttaccatatcgtgaggggtccaatatctccgagtcctacttggagatcaactgacccacgatatataagggaccccctaggcaggacctaaggcatcgaatattactgccaacacatccccacagcctacaaagccgaagcctacaggagccaagtcgccgggagatctagtcgggccaactcaactgcggtctcgtcggtatcaccgagttctgttattccctttgtaatctgtggattccatcatataatcccataccaactggattagggctattacctactaaggggcctaaaccagtataatccttgtcttttgtttgcctgatgtcgtactacgtagatcctcgtaccaacggaccccaataccctctatatctggtctacgggtatcccccatcgacagtgccgcgccagataggagaacttggtgctcaaggttctactactatgacttcaagcctcctcgacggtaacatcaaccccagcatcaaccaaggagcttcaacttcaacgatgctggtgtggactcaagtcggcgaaatcgtcttcccggtctacaccacgatgccgatctcgactggcctagcaattaccgggagcgagaacggcgtggttacgaccctggtcgactctatgtcgaaagatcctcccgcagaagcggagaacggaacatcgataacatctgagcctgagaaggatcctagtgcggtcaaatcttgtccttccgacaaaaagcacgagccgacaaggacaacttccgaggacgacacagaagctgagaagataacccgacaagccaagatctattgtatgatcggcaatgatctgtacaaaaaggcgccaaacggagtacttctcaaatgcatctcgtccaatgacggcaaacatctcctcctgaacatacacgaagagatctgtgggtcacacgccggcggatggacgctggtaggaaaagcttttcgacaagggtttttctggccgacaacactcaaagatgcctgcgatatggtgcagcggtgtgaagcctatcaatttcacagcaaacacacaaaattccagcgcaagcgctccagactatccctctcacttggccgttctcgtgctgagggctcgatatactcggaccattcccacgaggacagggtggctacaagttcctattcgtggcgatcgacaagttcactaagtggattgaagcgacgcccacaggggaaattaaggccgacaatgccatcaagtttatcaaagggatgttctgcagatatagattgcctcacctcatcataacaaacaacagctcccagttcatcagtgccgaattccaggattactgcattggattgggagtcaagatttgctttgcctcggtttctcaccctcagagcaatggataggtcgaaagggcaaacggaagagtactacacaggatcaagacccgtgtctacgacagactcatgtcacacgacaagaagtgggtcgaagaactcccctctgttctatgggccgtgcgtaccacaccgacaacatccaataaggagacacccttcttcctcgtgtatggcttagaggccatgctccccacggagctacaacatcagagcacacgagtacataagtactccgacgaggaacaggagcagcgaagcgacgatgtgaatctactcgaggaacatcgagaaagagttgccgttagagcagccagctaccatcaggcccttcgccgataccacgagaagcacatcagagcacgcacactttcgatctgcgattacgtcctccgacgggttcaaagtcaagtagggcgcaacaagctctcacccaagtgggaaggaccatacacaatcacgcaagtcttgcagccaggtgcattcaagattgcagacggcgatggtcgcgagttagtaaattcctggaacattgatcaattacgtaaattttatttacaaatcaatagtctcaaaatttgtaagtcatattacgatttcaataaagttgatttcaggttaagaatattgtcagagtgttccttcccgacgatcccttaccacgacgacacctagagttgaaacctatcctcatgtccctttacgccgtcctggcaaggcctctgaggaacctaagggaacttcagctagggacgcccagagcggataaggccttgtcggatcatgtagagacaaacgaccatgtatgacctggtcatgtaagagttctcgccatgcgtattaaccaagccgtgtaatcggaaattgagttttccaacttcacggctgggggctagggtcagtgcttttttcaaccaaggcaggtcaagggtctaaaagccttgtcctccgagaacgattctccgacaaggctaggggctagggagagtgtatagctcaagtgactgatcgaaatcacaaagtgagaaaacactcatacacaacatgcccagagtaagaaaacttagatagattccttttctattttacaagtatttcttacaagtcataaatacttcaaagtatattacatgcttccttgagatatttttctacataatacaaaaactaccagacggccaacgccaatccatggagcggatctccgcaggaccgtcgatctccgcaggtgtcctccgagaacgcgagaacccttcgcgaaggaactcgagatgcagctgcgaacgatgatctcggatgcaggctagcacatgtcctctggcatagcggctcgctcgacgacactcctgcttcagggcatcgtcgatgcgctggccaatcccttcgagctgtgcgcaagcctcattcaaccacgagatataaccagccgccgactcctcgggatcttcgcggggaactcagagctccatgcaaaccctcgccatcgacgtgcaacagctcctgaggtacgagttgaaccacacctcgtgacccccggagagcttccatggcctggtccttcttcacctgcaccatgatttttttgagttccaccacctcgagtttcgtcttccaatatcggattcgacgagctcggtcagccaacatgttcttgaaatctgcccgacacggaaaagactaagtcaagctattcttctcttccgagaacacagctaattaagtcaatccgaacacaaggagtgaaggagagcaagatacaaacctagcaacgtcatcgccatgtttgcctccgcggacgggccctgactaatttcctcccacagcacgaacggctcgagtgtgagcgccggaacgatcaccggcatatcgggctgcccgtgctgctggacatcctcgacatcaatatatctacaacgacaacaaagtactcagaatcacatgctaaggaaacaagggagacagtgttgacggtcgttatcaaacagtttcgaccgtcaatattatcaaaataggagagaactagtgatgcttgcaatgcatatgtttgttagaataataatattccactagtattaggtatactaacctttttgtagagaatgacactaaagtggaggagaatcgacatcaacatagacgataaatcaatcggacgatgtcgagaaccagacttatgtatgaatgggccaagaactcagaattgacacgatgaattgggccaaaattcacaagtctacaaagtgaagcaatagaggaagtcgccaaccgaagatgggctggtttgggccagcccatggttcagccaaaccagggggttcggtgtcacgtcctgataaattcatcccgaaataaaaattattttctaaaaggaataatagaattaattaaaattcgaaaagaatttggcaaacactaaaatacgtacaagaaaaattcaaatgtggcccggagaatttttgttaaattctccttggtctaaaaagagccctcaaattttagtggaattttcagagcaccaaatataattattaagaaataaacaaagtttaaatgattttataaaaagaaaagccctaaaaaagttccctttccctccccctctccctcttgggccggtccggcccagctccctccctctccctctcctctccccgcggcccattcggcctcctctccgcgcgcgcgccgctgacgggcgggcccgcccgccaccctcgctgacgggtggggcccacctgtcatccctgtcctcccgccgctcccgccgcctcgtccgcgccctagcgccgccgccgccgccgaatccgccgcatcccgtcgtccccgcgtgcaatcaataggggggaattattccccgtgatttcctctctctttccccccattttttccctccctctctccctcggattcgtttggaaacctctcccctaacctcgccggcgccatcaatggcggccggatcttccgcgcccgtttccccctcatccggccgccctctctcactcccaaccctatataaaccctccccgtgcctccctccaccgtttccgccactcgccgctctctatccccgccggagtcgagctcgcgccgtcgccctctctctccgtcgtcgccgccgagctccggtccgccgccgttgtcgtcccagaccacctctcccctcggcgccgcctccttcggcttcgccgcatccccggcgacctcgtccacccctccgtttcgctcgccgaccgccggagcaccgtcgaccccgtccacccgagccgcgccgccgccttcctccgctccggtcgccgtttccgtcgtcgccgtcgacccggggtgagccgtggaccgccgcttcgtttcccccttccctcccctctctcggccgccgctccgccgtacctatggccgccgccggcgaccatagggacgcgggcgcgccgcctcccgtcggctgtgccggcgtggccgccttcgggcgcgccgtgcggctgccgcgtggggcccggctgtcagccgctcgcgccctcgggtgcggctgacgcgtgggacccacggcgccggccggtgtgagcccgggtgcgcccggtccaccgtggaccgtggggctgccgcgtgggccccacccccgtggacccggtccgcgcgctcctcccctcggctgacgcaataaatccattttaaattaaaatttaaatgaacaaattcgcaaatattcatttaaagagcatataaacttcaaatggccataacttggccatttgaactcggaattggaccgttcaagtctctaatttttccctaagaagtcaagaacccatttttgtgctttgttcctgcttgttatatggagtttattagagtaaaagccttttcttttccgttggtcgtgtagacgctgcagcttcggaggatccgctcttcgtggaagttgaagccggcgtttgggaaagcgagcaaggcaagtcacatcatccttgaacatattgaatcccagtttataaaattatgttgctttaaattattgcattatcactttatttaaattcccgcgttatcactgttttatctagccatgcctatctacctttgttatgaccttattattattgttattgttattattaccttgttcaccctagattaaacaaaaccccaactagtggacactctactcatagtaccactagtataattttaggtagatgcttcgctgattaattaggtaacattaggcggttttacaactctagactttgggatattcatatcacctggacactttggaattgttggtttattgtggaattggattcacaccgccccctctattcaaaatccccaaaatggttttaggctgagctcggggtgcatggttttgatagtagcacctcggccatataaggaccggtcttcgggcctctgttgcaaagcactaccgtacttccacatgtctagtgggtaaggcttagtttgtggctcagtctggttataaacaaaagtacacggatggagatggacgaagtcgggggtcgatggacatctctaggacaaatgaaggctacacgagctgcggcccggtagtcgagatgtcatggcacagggctggtgtcctgctgctaggggctcaatcctgcctacctgtcccggaggttccggccgtaggtgggattgggtcggtactcttgtctatggctaggatgggttgggaactatgtcacgtcttccgtccgtataccgtggtggtatgtggcacgtggttacacatgaggaagatgtgtcttgtgggtaaagatgtacacctctgatcagagtataatctattcgaatagccgcgccctcggttatgggcaagccaagcaatgtacccaagttagtgttttaattcttaaaatttgctcaacaactaaaatgtggaatggttggcctgggttggcttgggacgagctgggatccagggtcgggttgccagttcggtctgaatcatcgtaggccttgggttaaggcaggttcgtgcgggttcacgaccttgattaataatactgtgtagctctaggatcgtctttttaaaatggctttgggcaactaagtgacttttaaatgctgttttctgcaaaacttaacccctatatcattaccccttgtacccccttgcattaatcgtgcatccgccggtgtggcttgctgagtactgtggttgtactcattcttgctctatctttctccccccttcagtaagagaagctttggagaagatgtcttaggtggagtcttggcttacaccccagttgagcgcctgtgaagatggagccgtaggcccgctagtccgctgctgtttattttttattgtcaggccttaagtgcctttgtaataatgtaaatattatcgatataataaagatgtgtcttttatatcatgtttgtatggtgtaccccggcttttcctgggacggggattaatacactagcgttcgggaaaatgcaattttctcggtcgcgacattcggccaaacccccatctccaccgttgaggccacagtttggcatggatgtccaagattgcaccccaatgacgtttggagggtacttcggacaatccccctttcacaactgtcataaccacctctatataaaggcttcactctcttcacttcaacacacaccttaagcaatggctctagtagcttttctcttctcttttgtaagatttgtacttttattagaatactcttctatatacatttatggtattaaaatactctccgagtatataagtacctactttacattatgttcttgttatactgaatatacggctagcttatctgggagatgctttggtacgggtacagtgtttgcttatgcaattactctatgtcatgacgatgatattatagtagtatctggtagtttagacgtggtgtctagattacgggatatcattatttggggttatatattgcggatgagaggtgggccgctgatggtgacagctcagtacaggtattcctccgcgcctatatataatcctaagttaatttcctggggagggtattcctctgtatttagccctagttgtatggtcatgacgggctgtcgtaaggaactcggcagtcaggggtggcttcttaaagtaccaggagagcatcggatagagggtattagctagtatatcagttaactagaatgtatgtatactatgtatattagaagtataggagtagatttcctttctcttttctttccacacagcttagatgatatattatgagaatgagtagttaatgcttgtgtgtcactctacccttggattatcttaacccctatttagaatatgattatcacaagtaatatataaattattagttgagttctctctacatgatcttcccacgggataaaataaatacgatacccttggaatactctagagtgaaatgctacaatggtatatccgtgcgcttgcggatgaactctgtaaccataatataccagaagtatttctacgccattgctgggaattatatttctagtaatgtcgttaagaaataccatcagacagttgttcagataagaatagttcggatccatagacaagttttacagcatgaaggttaaggggtacaagggaaaacaaatgtcctactcttcaaaaagggggaggacggactcccccaagtcaccgacttcttccatcgtatccttgcgtgcgtcatcagcggcccccagatccaaagccttcttaaggtccagatcgggatatgccagcctcatgcacgcaaggacatggcacgccccggtgtagatgccgttggacgtctcctccccgatcctagccgcgtgcttggatgtgatctcctccatcgccgtagccagctccacaagcgatgacgtcagcgagaactcatcgggatgcgccgggatggtagtcgtgacactacactccccggcgagttggtgcaggctggtgaatgacgttcgcagcgaaccgcagatgtcgatcatgtggccctcgagctcggacatccggtgctcgagtccgcgccgctgcatctcgttgccggccactagctccctcatctttaggaggtcctcgtgggcctccggccaggtcgctcgctagctagtcggcacgttggtttgccgatgacgccgccgccctggcctcctcgatctcgtgacctacgccgcgagcaccggcctagaggatgcgctccatctccgcttggagctcctcccaggtgagggcatcggtggacgggcctcgggtaggcatgaggctgacagcagggccactccgtgccgcctcctggtccttagtagcgaggtcgccgcaggggacacgctgaaagcggcatcagtcccaccttgtgccgtctttgcccgcgccgccctgtgaagatttttctcttccccatgaggcgaggtgatcggatttttgaagatgacaagacctcaaaaatgtttacttacttctcaccgatcgtcaccaacctttgccttcgctaaggtggaggagacgcgtccgagtcctgagtaagatgaaatggtatgagatcaagttgttccgactacgtgttagggaaccacaaagaagcttaccgtagagtttttcgctttccgacgggtccctcgtacggaggagaatttccttcccctctttgggacgttgctaccactcgtggtggcagcaacagcgtcagaggcctccttggcgatgctctccttcaacgacgctgccgcctggtggtccatgagtggcccgattacgtccgtcagagggagagcctgcacaacgtgaagtcacgacacgatctcgaggagaaagatgtaaaggaatcatcgagtacactgacattgatcgcagcggcgcgttcggccgttcccttctcgcaaagggggatcgagatctcgcccgtcgctgagggggcgctgatgatcacctgactgacgcggcgccccccggtgtcactgtctagacctgtgaatcgaaaacgagaactcgataagttaggagaaacagatggactcggaacaagattagaaatgcgagcaaaaatacaccgaggagagatccgggtcgtgtcctctggcccagagtaatcaaaggccggatgggcacgggcctgcagcggttgaatccgcctacctacgaagtcggcagcgacttcgtaccccgacaacccccaatttcggagatcatcgatgatctcgataaaagattggagggagggagtcagggcgggtttggcggtccactcagggattttgtttggttgttctttagggacaacaaggacgggatccgagttttctatctgaagatagaaccatctcgcccgccacttgctgtgagaagaggggcattggaaggggatgtaacgcgacttcagccgatcccgaagttggaatgcaacgcatccagataccctgttgggttccatccatcgcagctcatagtaaaagcggaatagatcaaggaagggctctaccccaatgtaggcctcgcaaagatgagaaaagatgctaaggaatgcgatggagttggggttcaagtgaagcaaagaaaggccatagaaattcaagacaagaagaagaaattgagaaggcggaggaagaaaaccgcaagaaatgtaatcttcaacgacaaccatgcggcctaagatgggtttaggttatataccacctgcctccctttgcatggtcccgcgacaagggagggcaccgtcgtcttgcagcttcctcaaggacgcggtggttgaggtagacttctcaagatccatcgccgtcggaggatcgccggagaacaagagggaagaagcaagctagggttttctttgcggagagcggagaagacgaagggcgctagaaggcaggagagttttctggcaaatggacttcaaatggactcccaaaatccctttaaataagcgcactaccgacgacgcgtattccaaggaaaggagagagattgctgccggaaaattctgggtccgttgcgcgcggtagttttcagacttcaatttaaattcactcatgaccgttgaacttcatgcggtttttgtcgatagctctttgtctctatggtttttgcactgagatcgactagatgagaacgacaattccgacatcagaagtcgcgatcaatgacatgagttcatttaagcagaagtcaggggctactgtcagggttacggataaggtataccatctacccttggatgtacgttgtatactgatacggtatacccgcgcgtgtacggatagtttccgtatacataaaggaaatctaacccgtgatagaaatagaatctatggacggaaagagttctactcggacaatactgggtctttactatatcgtgaggggtccgatatctccgagtcctacttggagatcaactgacccgcggtatataagggaccccctaggcaggacctaaggcatcgaatattactgccaacacatccccacagcctacggagctggagcctacaggagccaagtcgccaggccgggagatctagtcgtgccaactcgactgcgttctcgtcggtatcaccgagttctgttattccctttgtaatctgtggtttccatcatataatcccataccaactggattagggctattacctgctaagggacctgaaccagtataatccttatcttttgtttgcttgatgtcgtactacatagatcctcgtaccaacggatcccaatactctctatatccggtctatgggtatcccccgtcgacacttctaagctttattcctaactttcagtcatatcagataatatcttgagatatgactggtttttctccaactattttttatgattgcccaaaaatattaatgagcactccttttcctgtatttctcattttctttcttctcttaatgattgagaatattttctaccttccatgtcctttctttctttctttttttagccatattttattgcaagctactaatatgagagacattttaaggacatgatggaatatttatttggtggatggaaatgttgctcacacctagggtagaggtaaaacaaccatgataggtggaaggcatattttgttaatctccagtatatggtgggtgcacgtaagtgggtatcttggtcaagacagcataaaaagaagcaacatatgattatagggttattcaattaagatcatcatattattgaggaacttataaattttattcttttttaaaaaaacatatgctccggaattccagtatcacttagagaaagaccatagcaactctatttcacaaattcatatccaacaacaatctagatttagatcatgctttatgcaatccacaagtttcaaattcaaggcaaagattttttttgccaacaaactcaaaaactatagtgaaggttaggcagtaaagcactagatagaaataagaatagagcatctattcatcatttcaactgggaaaaattaaaacattcattgatgatggcagcagtgcacgttgccaagaaaccgttgctactgccaagtgattcaaggggcagtggctttggaggaggttactgcaaccagcagcgtgcagagactgcgactggttttcagttttaggattcctctgaaccagtagcagctgctgaacaatcatctgcagatgcagtagtaggtgtctagatcagtttaccgatcgatctgaagagaggtgaattaattacaacgaatgaaactacagattcagagaggaagatgagggaggaagatactgattgttccatttggatttattttgaggagttgcattgcagatagacaaacagaattcttgatgtaaccggtgcaaggaaagattcagatttcttcctatgtcattaatttataagtttttttgttttgattttcatgtacaagaatgtaaattatagtaaatggtaacatcgtgcaagctagtactcaagcatatttatatgataactaggaaggtggcccgcgcgcatgtacggacacttatattattgaaatgtaagattattgtttgttaaaaaattttgtcccatagattaagggtaaactaaagttcagataatgttattttataataatttaaggtttctatttttcttaaggtatcttaaaaaaccattcataaacttttgagtagaagatggattaagtaattacgacttttgaatcatgtttttttctcaagtaaataagaaattattgctagttaattatcatacagtccaactatatatataccatgtagtatggtcacaaatgaaaaatgcgagagcaatatactcaaatttcttgtgattaaatcatctcatgaagacgtatgatatagtaagaaaagaagggaagcgtatgcatgcaaaaaaagaagaaagagatcaaaataaaaaaagggaggggaagcttacataccgacatatgtaggtgcatacctatgccgcgggaggagaggtgggacctcgtagtatttagtttgttctgagatcaatttaatctaacggtttataatattagacttaccgttttaagtgaaaatcaagaaatagatactttgcttttttcttaaaatttctaatacttgctctaatttattatagaactatgtgacaccttgagagcattttaaggaattttaaaggacttaacacatgtaattagaatattgaccgcgtaatatatatgagaatatggtaatatttgttcctgcttcgtccttgtttatatacatgtagagagaaattaattatgtggctggcaagccactagatatctaattaatagcaattaattttgacacctatttacaattgttcatagtagctcttacatatacatcttacgattttgattatttgttgatcaccatgactcgcatgaaaaaaatatgtgtactacatcttacggtttaggatatgaaattgatgaattatctgatttatgtgatagctatttgagggtataaacgaatgatttgacttctaagaagttaaaacattgtttaaaaaagacaccatttagaaacttggaaagcgtacaaacgtaagtccaaaatatggaattggaaaaaaaagagggccttaaactactttataacacccttgtcttagtaagagttctattgacatttataatataatgatttgtttcacatgtacgaacaactagtacaaaatccaaatatgacataacacaatacattataattattatgtaatcaactcttagtccaaaatattcttttttttgccaacagggccaaaatgttatatagtttgtatgcatggttcatagttgagacaacaatacttttgaacatcccaaaagaaaactcaaaaaaaattagaacctttttagaaattgccacattttcatatggaaataatcgcttggaaaacagttttcacgaagcttttgtaaagctttcataataatttccttttcaagcaaaactttaggcaatagttccagaagtttagctttgaaaaccttttgaaaagatgattttgaagtcatgcactcaaaatttggttttgcatgattttgcaataaattatttggaaccaaaattcacagatgtttttcaagaaaattttcttttgcaactaattttgaccattcctataattttaatataatttcaaagcggttttgggagacaatttttcaattacattgtttgaaacaaacacttcctttcttttttggagcaattttctttataaaactatatttcagaatgcaaaagttaatttgttttgcaatattttctatagacaattcacaaaacaaagttttcgggggaattatgccatatgagttggacttgtccttggaattttaaagcaaccggaaggtgaaattcatatttattttatccttcatccctaaattcttgtccacattgtagtttacaacgttccttttagtaaaatttcctgatctgcataccatcttatgtttctcctgatccataagcttcaaatctttgtatgtttatggaaataactagcaatcttgcatggctttcttatagatacgcagtccgtttctcttccttttattgttctccacgatattcccatgccaaggtagtacatttgttgtcagtggtcactaacggcttattcgagacttcacttctactgcacgagggtgtaaccaaaggaaactagtactaacaatgataagttgtcatgatcgataagttagtttctgctcttttctttttcttcacattattttcatataatatgatgcaatcgtctactttcgaggatgaggtttcggcaacaatcaataatattcctatagcgtcttaattgctttcggttcttattctataattttgaaatgtagatgagaatatagaaccaatattttttaatcacaaatcgagtagtaagattgccttttcaaaggaagggttgagatgtaaggtatcaaaataatttttcttttcggtgcatcggaatcagacattttccaagaaaggtaagatgacgtcaaaaattgtttgaatgttttcacagatctttttttagcatttaaaaatagctttgaaaaatatagagtccttaaactaacgaccattctatctaggttctcgaactacagtcgatatgctctgataccagctctgtcgacccccgattttggaactcggaaatcttctgtgtttatcagtaccaatccctggatcagtagttggtacacacatacatagccaaatcacaacatatcacgaatgaattcaggctaagagagttaaatgcttacattagggccaggcaggccaacaactaacagagaacaacagcggaagacaaaataatacaagggcccggttgacatgccacaagcagtcgactgggaacgagacctagaatggaaccacactccgatcatcttgttaggtacgcaagcatactaacaagggcttctcttcaacactctgctaaaagatatatagagcaacaatgagtacaaaagtactcagcaagccaccacacaaaatgcagtaatgtacaggataatacaaggagtggctatggttactttgcgtaaagctgagttttcaaatatcatttcacaaacctaagacctagcataaactgttcaagttttagttccattgttcattaaacagcgacggttctgtccaccatccattgtgttcccaaggatagcttcccgccactggtcgtcatggttttctggggtctaccccttctcgcctctcgagaagttgttccaccagtacaaaatcatcatgcaacatcccacccaaccagtttaagaatttagagtctagccaagtgtaatacatgtcccggtgctcaatatccgcgagcacggctattcgaatagatttggtttactcacattgcagtggatgtacactttacccgtactccgcgacttgcccaacacatgagcctacgtcccaacgaatgagacttgccacagcaaagcctttcgataacctcacattggtagtacccgctccatgaacttgcatcctcctgtactctaggcgtcataagtttctagcagtgagaggagttctggcgctcccgggaagggaagactcacacatgcattaagttttagttaagttaagtttacacatggcagtcctaccgatggcgacaccactgtaagcactcgcccctcgcggtcccaccaatggctgccccaccgtaggccctgcctcacacacatcaagaataaccactatgcagggatactgccttcgctcggctatgtactccgctaggtctatacccatacgagaaatacggttgtacgagagtcgtttcatgcttaacttcatggctcggtccttaactgaacagggatggtactagccttttccggactccacccaagtaccccagccgccccagtcgaaaacagtgtttaattttatttctcctttcacagttcgtgtcatccttgtcatggcaatgtggcgctcatgtctccacatgccgcatctcaactaccttccctaaggtagttgcccaagcatatagcacttgataaatatgagaatgcatgattctaattagcatgactaagcatttgttcaatattgactaagtacacacgatagcagggtttacaatggtcatacagataatcaatatcaaggcatg

SEQ ID NO: 28829 - DNA, 3299 bp, Oryza sativa
ggacattcatattcatatatatagcatgcaattttatttaaatcaacataattttcgcaataggttcaacatgctcaaagattagtgatgacttgcctgctcaggatagttcttattcttggtataatcttgatcaaccttcacctcctggaagctgcatacgttgcctcaccactaatcgatacacaatttctataatatgcgagaaaaccaatattcaagcaacaatcaaatatgcacaaacaaaatataattgttcggaatatacctagggctattcatatcactcgtgcttgctaatggattgtaaggtgctacgaagtccaaactatggctgctcacatacagaactcaatactcaggactatggaattatctatgaactattgctatgtggagttcatggctaaactagctttgattgtaatttaaatggtgacaccctacaggagatttaccaaggctcagtggataatttaatcataacaagagttctaacaggatggattatctaagcatggctctacaaatattactgtattagggttccaacgaattacatgctatgtaggttagattagtgtggtccataatattatagttaaagtttatctcaatgcataattttaccataaataatcctaagtcacggtcaaactataattgtgtgtgaggtcaagatttataattagtgttttatctactatacacgcttatcatagactcctcagtttaatatatgaaaaaggtaggttattgttcttgtgtatgatttaaatggactgtacagtagttgtgagtgcaataacatactagtattagatcatttactaagcatgagctatttactgtaagctatacagtatatgtgatgcaggtggatttggcgagttggtactgtttatcaacttaagattaccaacttaaaagatactattccaaagaacatgacattaagtaattaatttcgtataggtgatttaatcacactagctctgttattatttctcataaacaagttaaagattcatctatgagtattaatattttagttacaaaatatgaagctaaactttatgtaactaatttttaagtcatgaatttaattatatggccatcgaatattaaataagcactagtattttcctatacatccattcatttgagacattacttatacttagtttatgtggttgctacagtgacaaaacatgttaaatatatttatttgacatctactctactgtacaatatcaattttatttattagcacatttttaagttgaccataatctaatcatttgatattaatatattttattaaatagtgagttatataccattggaaagcttatgaatttagatgaatttaggttcaagtttcactcgaatcggagctaaaatgaataatttatactaatttaaagattcaaatttgagttaatccgagaaattgtaaaaatgcactgttcataaatgatttatttttaatcggaaacattatccaaaacccaccgtggttgacatgtgggaccggccctggttgacttatggtcaaacctgcttgtttaattaccattgggtcccgcctgtcataggaacaaaatatataattgtgttttcttagattttaactatagggaccccacctgccattgagtgggataatcaccgttagggataggattactgtgcgctaatcacatgtgggtcccacacggtttctctctctcctcatcttcttcttcctctcgcccgttaccgagcgaggcagaggcgcggctcggcgcagccggcgttgccggcccgagccgggacggcggcgggcggctcggcgacggccagggtgaggcgcggaggagctccggtgatctcccgccgatggcagccggcgcgcgaggagacgggggcgcgcggcgccatcaggcgacgccatgcccgagctcggctacaaggggcttcggtgctagggacatccttcggccgaattgaagggtgcgggagcatctacgaggtatggggattcgatttcacgaactatatggagaggggagctcccgggatagcctacccacggagagctcgccggcgatgaaacggcggctggggcggcacggccatgggcgctaatcgtcgattttgaagccggcgctagcaattagatgtatggaggacgctacgggcgcgagggtgtaccgcgagatggcgagatggcgaaacgcagcgaagtggagctcgacgcggtgcaggacaggggcaaacggcagcgacgtaaggtgctcgacggcgtttcttgatgtccagcggctaccccgcttcccccatggcgacgcggcaagcacggttctttcctccacttcctctaaccttctgctccggccggggagcctcacaatggtgatctctagcggtggtgagagggtgatcgcaaggtgttcgatgaaatgcatacgagaagaaggctgagagggatggggattttgttgagggcttcgcttaggatgcaagcaaactatggggataagatcaccagcacatgcctaggcgagctagagtactaatggtgatcggataagagcaatgaggtggatgacgcggctgagattcatctccttctccattaaggttctgtggcttaatcatcacacctataacctatagactgcaggtctgggcgctagctggaggagagggctccgttttatccattgggcgtggatgggggcgatgggacgcgcgtgtctgggtgatgaaggcaggcgtggcgacggcgacgcgcgcacatgggcgatggtgcagctccgtgttttctggagagaatctaggagagcggttagaggtgcggcttggcgtggtgcgggccctggcacgacgcggcacggaagggatgacgcgggcgcgggcgtgggtccggcgcgatgcgacgcacggcgcgatacaacgcgatacggttgcggagcggcaagtgcggtgcggctagggttggggtcggacgcagctgaggggaaggaggcgcggttgcggtgcggcacgggcgtgactggcgcggccagaagcgatgtggtgcacgcagtagacgggatcgaacggttggcggacattgaatagtggcggctgagaaaagagagaaaaggaagaaaaagggaaaggaaggaaagggaggggctaatctgcaaaagtgaatgggattgaatttgaattgaaatgtaatcaatatattttggttttgagaattcaaatgtttgatttgaatatttatttggttatttattagttcccaaatgaatttgctttccatt

SEQ ID NO: 28830 - DNA, 9599 bp, Oryza sativa
agacgcggccgggcgagcgcatgcggcgtgacaccggcggccccgtggtgtcggcgtgcttgcttcgccgccggtgatgaggaggaggagcagccgtcgtcgtcccggcggggctgcggtggacggcggagagcgggtcgagggcgaaggagcagcaccagggctggcgcggcggggggccctgagggtggcggcgtcggctacggcggtggcggtgcgccgccgccgtcgccaccggcgacgagccgggcgtcggcatttgcgagttggcgtgtgggaggagagtgcgaaagggagggagggaagggaatgaagaacatgtgtcatgtagttgttgtttgcatgggtggtttgtgtggggatttttttttttggttatgtagcaccgccaaatgcacacatgtttctgtactccagagttatggattttgaattgtgttaagagggtttttttcatacagaagggtattttttaaccaatcctcaacatccaacaaaatatatgccacctttttcaattagatctttagcctaccaatagggaccttagccatcacataccccgaattgaatttcattcctatgaagatttgaagttaagccctcggggtgcttctaaccattaggctacatgccatttcgcaattgtgttcatagttaggaatcattttcttttgttttaacctatgtaggtgcaattaagctacgtgaagtgtcaaaatatgtgttaaaaaggatagctactccatctatcgcaaaataagtttatttttcatttatcctacacgtatcaatatagaaaataaaaagccaagaaaaccctcactttatcaaatcccacaaaaaatattcttctctttatatactctcaattcatttatcctctattttaaaaaactttgatacaataattacttaaaaataaatttattttagggcaaatgggaggggctaaaaataaacttattctaggacagaggaagtagctcagttttcccatcaggttgtaaatatttgatgccgaggataaaatttagtcaaactttgaccattgattttatgtaatgataagtttgtaaaatctgataaatctgtgatagtatgacaatgggcctgttcactttgttgcaaaaaaaaccttaccaaattttggcattgccaaaattttagcagctatgccaaaattttggtaacttgctaaaattttggcaggatttcttatatagttactaaaatttggcagcaaactaaatgtagccactttttttttgtaactttaccaaaatttggtaaggttgaaaatgacaccaaagtgaacaggcccaatatttttcaagacatatatgcaaaccattctctctttttttatataaaaaatatgaaaatggataagttattgattattaaagttgcaaattttgaccaaatctcattctaaatgacaagtatttatgcgttgtttgtacttgttgatctcgaacaaagtaactttcttatgtgtaacagtgtaagttagttaaattaattaggcaaatttatatgctgttaatgtctgtcttccttgttagatggatactatcaagtgttgtatatgaagtgatatttttaaggattggcatagttaccatcaaagtaagtgaatatactaattaagtcttaagagtacaagatctatgttgactgaatctcatgttttgtacattctccatcggtaaattctaagaagaggtataccatgatgtaaatatgacattattttagtagataattgccatgaaaaattctcaattactcatctaaaaagtgccctttttaaaaagctaacttggatgcataagtttcattttcagtggcatatgcttcaagatatatatatatacacacacacatagccctttcatttttgcctatactgtcactcttaaggccggcttaattagcaacctagatatcaccggatatagtacagtccgctgtaaattgcctatcacataactagtagtagtattgtcattaatcaattttaactctagatatgacccaagaggcatagataaatgcatcatgtgcccaccattttattatagcatcttttatgaaaaccaatattttgatgtaaccaactcaaatgcttgttctataagaatatcaatagtgcaacttctctaaacaaggatcaacagtgcaacatattgcatgtgattgttgtatggtctacatgcacatggatatacaactatatctctactattataaaaattaaagatatttttaccggtattttagtatgtcatccgtgtttgagtcggtttttaagttcatttgcttttggaattatagatttgtatttgagtagactttttaagtccgtttgctttcgaaaacataggagtcgtataagaaatcttaaaaaaaactcgcatgctaatcctacttgtagctcatgatcttgtaaaaacaatatccaagcaaattcctacaatgaatttcactttagctaaactgtataacaataataacattaagatagccttcaccaatttcaacacatgtgtattttttttctagtatactgcaaaatatgaatgaaacaaagataagatacggatagcggaccttacgagaaattcaaacgaattttaggctaagttcgtttgctggagttggaaactatctctcatgcacgcaaaatagagcgacccgttagcctatgaattattaagtattagttattttttaaaaaaatagattaatatgattttttaaaaaaaacaatttttctatagaatttttttaaaagaacaatatttagtaatttaaaaagtgtgcgcgcgaagttggtaaccttaagcaacgaactcagctttagtgaaatggcaataacctagttgttgtagtgacctgagtagcactctaaggtcttaagttcaaatctaatttcagattgggttatttgagagctaagttccttgtttaataggctaagttcctaatataaaatggctgcatatatccggttggatgtaaaggccgggtaaaaaaaacccttctctaaacaaaattagaactcatataatgatgatacacaaatactaaccaatagtggagaagatggtgggggtgagcagagcaaatttgtgttgggtggcaccctacgctaataaataaagctacaggaaaagcgggaagcaaaggatgccgttgcagcttttgggggcaacggcataatttcctctcctctcgtctctccatccatacttttccttcgttttaagcggcaaaagctcttcctttcttgcctactaatccatctgctaattggacctccttcactctaatcatatgcctcgtcaatgcacttacgctggtatcacggaagttcatcctaattaaactccataccactaaaatataaaaatagatcaactatatagtgtgttaaagattgccgccgccgtctttactactcaactatccaataaaaataaccttaatttctttgagaacatttagtaatgaaagaaaacaaataaagtaactttcgctaataagaaagtagtattgtcaatgtcaggtgaaaaaatgtaagattattgagatacaacacctcggtttgtagaaataagagggtaaaaaacattaagataaactttaacagctagaaattaagggctttttttgcatagatagatatttacgtgtttttttttgcggggagatatttacgtgttatagctgcatgttgttgtccagagttcaattgatttcttcatgtgaaagttagttacctcacatgacatctaaaactagtaacctaggtgattaactaaacatatccatcttaaacaaacagggctaaaataccacaagtgccaagccttgatgcaatccaaagctccagtcaataggaccccgtgacacatagccaccgcaatcgccggcgagtagtggccttatccggcgtggttaatactataattatcaccaaaatttggttaataattaccacctaaactaatcacacatgatgatgattattaatcagctagtagtagtaatatagtactagtagctagctaaccatcacatcataatcatgctgctcccctatgctttttgtgtaccaaacgtttcattccaaaataataatgacacgcgcatgcatgcaatgcaatactccagctaataacccaacctccatcctctgatttggttaacaaacccttgtggccatcaggggtaatgaggattaattaagcctaatcacacgttcagccgaccaaacagtggttagccaacctgcaattaagcatttttaatttggttggtcatgggggaactgttgttaattatggaggattaattagagggagagagattggctggctagctggttttggcagtggcaatcactctgatgtttgttgtgtgaccaactcttgctgctttgtttagtattatccagtagataggttattcctaatgactcaaagtggatgtatgtaatactaggtataatcttatcttttggttgttgagaacattaattatatatttttgatggtatgtggagagggtgagtgattgaatgaagcacactgctccactagtactgaccatgttattactatacacgatgcagttcaactacgaagctcttttggtacgaagaaattttaaagaaattccaacagaattaaaagtttactaggttgtttgttttatcacctataggggggttaaaaaatggcggtggaaatttctgacagtaccaagaccgttttcgtaaaactaaaagtgacgccgtttttccgattctagctatatataaaatttaattaattaattaattccatcagcattgtattgaagttgtcactaaattgttaagagtaaatttgacagaactaaagatttcaggtaatatatcataaaactacatgtttaaggctaattatcacaaaactatagattttgggtttaaatccttagcactaatattatgtttgaattataaacatccaaattttgtgattaaattgatactaaacttgttgttttttttggtaactttgttattaaatctgtagttttatgatactccaccttaaatctgtagtccggaatgaatttcatgttaaacctataattttgtgatacatgcatcatcttaaatatatagttttttgataatttaatcaaagtatctatagttttgtgaaatttaatcaaatagttaatttggccaatatgaaatttttttgaccgtaccaaaaccattcctctagctagaaatgataacgttttgaacgttttcatccttagttcacctatgtatattgctctttcatgtgtaatactgaaatgcataattttttcaaattactacatgagattaaaaaaaagaaagaaaattcagaccaaacaaacctaatttgttccaaggacctagtttctgcaaggaccaaacaataattcatggttaattagatctgcaaagttagaacagagatccgtaaaaggtcgacacgaactgtatgtattaattgtattgcatatgtaactatgcatacttgtagtggctcccctattgttaatattgctacaagcctaaaacacctcaaaattaaactctctttcattggcaatgtctagctgcatcaagaaacgacactgtttgagtattaagagttaggtggatttcgggtgatatatagtaaaccttgtggtcgaaggagctagctgttcttggcctggacgatattaaaagcttggaattccaaacagtgatgtatagatgcatcttgttgtcaataaaagcaggtgagagatgagatccccttgtccataacgaagcttttactggaaaaacattccactttcggaaattctctagtgtgtaatccgcttcccttttctggttcccgccttccttgctgtagtcgcgtcttatccttggccttgtaatgctgtaagcgtggcagcgaaggcgtattagcagaagcacgtgttattattccaaggaccagcagcaatcgaccagagtaaacgtaaaggcatccacggtttagtgaaaaagtagtccataagcaatacaatattccattcagccacatagcaacattgtggaactagtcatagcaaagaaataacaaaagttacccataaacatatgaactgtccatagagaattaaatatgttacttgtctctacttcctctctcctcctaatactatttgctatctatatacattgtggatgtttacaatagttaaaactcatatacgtgggtcccatctatatggactacttttgttatatacattgttgtttccctaagaatcaaacaagcattaggttattattcttgagatgacaccaagagagatactactacaagttagtgcacctaaaacgagaaagccactagcgcatgattaattaagttttaattattacaaactcaacaaatagatatatttgatattttaaagtaacttttatatagaaaattttcgcacgaaacataccgtttagtactagtttgaaagcatactaatggaaatcgagataaaatctaaatcttatgcagaaaagaagagggatggacctgtatgataatttggtcaataatccatctcaaatggggcggcctatatgaactggttttctggccgaatacgcttttgatgcaatctggtagagaactcttgattgatcaattccattatgaggaaaaaaaaagagcagctttgatttgactaaattccggtaataactcactctatgctccattcaaaactggaaccagggcggccacaagaggaatgaataccttctccattgcatgctgacaaatgacagtgcatgtttgctttttaaatttttttgcaggaactgacgaactgtgaaacactggagatcttcagggcaaaaggaaaagtctattctcagttgcccagcatatccatgccaaagaggcaaagaacacaccattctggcgcacgcaaatttgtttcaacactcgttgcactgtacatattacattctaaagtgatgaggtatatattgtcgacgtttgatgtctcgactacggtatttggatagtatggggatcgctggtgttaggatatacgtgagactgaggtaaaagagatggagacagggatttttatacaggttcgggcccctgagttgtcaggtaataaccctacatcctgttggccgaagccggtattgctcttattcaccataatcacaccagtactatatgtgggtagcctatctaactgttgtcgacatgtcggtctaaaggtctgactcgtagtcgacaacagggtagtcttcctcctcgaatccgtgcccggcgagatcagagatagtgctttcgtatctcctgacggtatccggagacaccgtaggggaatagccatgcctatccctgaagtcgatatccggtggcgtgttggcattatgtaggcttgtatgttgtggcttctggtgggtgtgtgttgattgtcatgggtgtcttccatcctccttctcctcctagggggtcttgtatttatacccataagtgtccccttgtccaagtagaactagggaaaccaatatggatacaatccgagtagacctggtcgtttccatgtagaactctggctgtctttccttatccggaactccctccatatccgaagtcagtttccgtatgagacatggtatgtggtgggtcctgccgagatgtagtcaactatcattaggtatgtggtatccataaccctgacatatatataatggataaaagtgaatttatgacaagtactcctatttgataaggatgaatgatgaatcgaaagaggtaaacacgttcaaatgttgatttaaaaagtttctaaaagtaacctttttttttttacaaaaatcgtgacgtttagaaattaaggaagcagcccacaataatccgtcatcggttaggtcaaaagaacgaccccttaattaaaagaactaaagaagagagtgatatgaatttcagaatttgatgcactgatgcttgtaagttgcaactgtagtgatgaccaccttgtacttacgtgggctactgcagatttgtgggccttctaatgggctttagtttgggctgcagacaaattaatgaactttctgccctttgtgaattgatgcaagtcgtgatcctttcagtttaaagtatttttatagaattattatatagcaattaaaaccttaagatttttttctactaaaaatgtccgtgcgttacaatgggcgaagacaaaaatccaatgataatatatgctttcttcctttccctgtataactatgtcgcgatgacaataagtgttaattcgcttatacgagagcctacgctctatttcacggtatcaacatagggtgtgtttgagggccaggataggagattgagaagattggaaagatatgcaaaacgaggtaagccattagcgcatgattgattgagtataaactattataaacttcaaaaatggattaatatgattttttaaaacaactttcctatagaaaaattttacaaaaaatacaccgttgagtagtttgggaagcgtgcgtgtgaaaaacgatgtactttctaactcaatgtatctggaacgaacgcagccatagtcttcatgacctaattttgttagagcgagagataagggaaagatgctacatttctagtataataactcgattatgcacataataaacaacgcattaatccttctgttattttctcgtgttacatacatcaattagtcgcatgccgttaaaacataacactattcaaatcatgttcaccttttggatcctctccggacaaaggtcacacagagaactttttcttataaatactgatcagaaaaaaaaaaacaataaccggtggcggtgacctttagttctcgaactaatgtttgaattaaaaagcaaatgtagcaatgatactgctagttttaattactatgaaatattttttacactctcctatgtcggtgattacatgcaacgaattttgccatgaaaaaataatattttttatagacccacaaacagataataaaaataaaaaaaatacaaccaactgtagaaacatttctttgaacctagaaacgataagaacttagttttgttttaatatggtttcagtccttttgcctatcataggattattcatttcgtattttttacggagacattttttgttgcaaatatggcaagttctccccgatatatctctataagtgaaaggttaatcttgaaaagccacctcattaatccacgtaggaaagaaaacatgggccatccgatgaagataaaaaagaaagagagtgcacgatctgatcggtaaaaaaaaaaaggttccggagaactcacgtccgccatctctggacgagatgagatgagtgagatataattttttctaattttttggttttttaaaattcttttatggtttactgtagtatgaaaagaaggggggagaggagggaggagtgtatgcagtagtataaagaagggggcagacgggtgatcgctgagcggacgggggagcgatcacccgtcc

SEQ ID NO: 28831 - DNA, 18530 bp, Oryza sativa
  unsure (1)..(18530): unsure at all n locations
cccaaatctactttacaatcttatcaaaccacgactttaggccgttccgtgatatacaaggaaacgtaatacccaagtcatgatctgttacatattccatatatataagttatcccctataactagtcggataaccatgccgtgtgggtatggggtacccataatctccacagtagcccctgagaccttcacagtcgaaaagataatcttctctcgaaccagattactccaaagccgagtacttcaatcatctttgacatggtctcccgagtacttttaccaaatctgaagactgtggagggctgaaaaataaagtcaggtgcatcgactagatgcacctaataggtgtagccctcgactatgcagttaagtgaacaaaccaagcatatagtcaataaataaataatccaaccaaccgagtggcttcgataattatagttaaccaagcgacttgatattaatatgtagcatatgcggtgtaaatccctgaataacatgatccgagtgatataccgactgctttgtaaaatatgatgagtgtaacctaaagttggctacatcattgaaaattcacatagcaaaacagctataaaaaagcttgtatgttgtgaataaagaaattttcaaagtattgggcgtacgccatgcgcacactgttttaacagatgtgcttaagtctctaaaagacacatggtttcgccgcacccggaaatatacggcatatgtggtgtaaaatccgagtaaataaactcataaaagatttaccaaccgcctgaaaaatgaccaagatatataatcagcctaagccataatattggtcaataaaaatgcacacttacgtggcaaaaagcaacgatattgtacccaatcaattgcttaaaaacccaaacaacaccttgacttatataaaaaagtcagcagggcagctatataaagctttattgtttgacacattttaagatgcattgtaccaactcctaaaaagttgagtaactgtggtataaaaggattttaaggtattgggcacttgatcacgcgcactttggcctaagcaaaaagtgcctaagtccctaaaagaacgtgacaggccacacctgaaaatatgggctgcagacatattaggcctaggccaaaaaatatgccttcgacaccctttaaaggatgacgcatgtaacatgctcccgagtaatagatcttccgggtgatatagaccaagtgtagctcatatgaatagcttctgatctgagtgattatcccttatgggatactccaaaatagatataaaaattgaatcccgactggcgccagtattcggttgataacccttacggggaataataaatagtccagtctttgagcatagaaaatagacccatgatcatgaattcatgttgcatgtatccggaacaagtccaaattgaaggtatgatacttgtgtttgaactagtaagcccctgagcatatagctcgtccttctgtcgtagtcacaattgtccattgatggtagctgacgcagttagcatagagacaagacaaccgatatagagataatattgcccaccagaggtggcaaaaatattggtggtagtgaagatagtgataccaatcaaaagtgatgaaattgcacagccgtggaggcgaagaaaccagtcggcaacagtcaggtcagccagcaatgaatatgaaggcgcccagcgataaagttgtctagccatggcagcgaaataatcagtcggtgacagacgagacagctggtgaagaagatgaaaacaagccaatgatgaagacgtagacgcgaatcaacgacgatggcgaaatcctccaatcatgaaaatgcaggaaatagtcgacgacgacaaacgcaactgtcatgatgaagatgacgatgtcggtgattcagtcaatagcggtgtagcagccgatgataatgacaaagacgctcatcaacgtttgcgtagtaggtcaaccgtgaaggtgaaataataagtcggcgaagacatagtcatccattagcaacagcggagatgtcagggccgatgaaacagaggtgctggtgatgatgtcagtgacaataatccatcaaattaatattatagctgttgtagatgcttcacttggaggagagttgatgctgttgtccaactcgtccaaaccgaaatatttgaagttgttgaagtagaatgtctgcttcgaagcaaagatgaagataatgactcctggagttgactcattagttgattaattggtttcttcagcttgacataaaatttgtcaaattttgagccttgtatttgtgtagcccccgactctttgattagttgggaaacaactaaacatagagtcaagaactgtagtttcttgtcgttgaatagtcattgcttgattgaagatatgtgttgaagatgtccaagtagaaatcctgaatattggagagccacttgttgtagtaaaataacacggcatcgcatgccgagatgtcgaggttcacaaagacgtcgtggttggtgaagtagcagcaatagagtttgccggtgccgaagataataaagatgaagtcgctctaccatgatgataaagttgcatcgctgtgatgaagtgaaacgagtcggcggcaacagaagcaaactggtagtgaagacgcgcagttgtgaagatgaaagcaccggtcggcggcggcataaccagtcggcgacggaagacgatgatgtccatcagtagtgatagcggtataaaccagacgtagaggcgagggcgctagtcaacagcagacgagatgaccggcggtgaagaagataaggccaatcaacactggcagaatcatgcagccatggaagtgaagaaaccagtcggcagcagacgtaggcaactggtgttgacgatgctgatgcctattagcggtgacggcgatgtagccagccgtgaagaagatagcatcagttggcgtcataacaggccagccgtgcaggcggtgacaccagacggcggcggatgaggcggccggtcggtgaagcggccggtcggtgaagacgtagacgcccaacaacggtggcataataggccagccatgcaggcggaaacaccagtcggcagcggacgaggcggccggtcggtgaagacgtagacgcccaacaacagcggcataataggccagccgtgcaggcggaaacaccagtcggcggcggacgaggcggccggtcggcgaagacgtagacgcccaacaacggcggcgtaataggccagccgtgcaggcggtgacaccagtcggcggcggatgaggcggctggtcggtgaagacgtagacgcccaacaatagcggcataataggccagccgtgcaggcggaaacaccagtcggcggcggaggaggcggccggtcggcgaagacgtagacgcccaacaacggcggcataatagggcagccgtgcaggcggtgacaccagtcggcggcggacaaggcggccggtcggtgaagacatagacgcccaacaacggcggcataataggccagccgtgcaagcggaaacaccagtcggcggcggacgaggtggccggtcggtgaagacgtagacgcccaacaacggtggcataataggccagccgtgcaggcggagacactagtcggcggcggtgaaggcaagccggttggtgaagacgtagacgcccaacaatagccgcataataggccggcagtgcaggcggagacaccagtcggcggcgacgaaggcaagccggtcggtgaagacgtagaggcccaacaacggtggtgtgaccaaccaaccgtataggcgaagacaccagtcgacggtggacgaagcggccggtcggtaaagacgtagacgcccaacaacggtggtgtgaccaatcaaccgtataggcgaagactccagtcggcggtgacgacggcgagccggtggtgatgttctgactgatccattcctggagcgtaagagataagcttaaagccatgaatcccttttatgcatatttggatttggatcctgcagaacaaacatataggatgagtagtatctgatgtaaatataatactcgagaaaaatgcaagtattttaaaatatttataaatatgtatttctcctcttgtcaattttgatttccccgagcagatgactccttacgtttaaacactctgcccgactagtcatagtccccaagcatcgggagtcggcctaggcacttcccaaacatgcatatgagtgacatgagttcgtcattaatagaacaaagtttcacggatcagaatttactactcgtgtacttttgcaattattaagagcagaaaataaatttatctcatctctatgcttttgatttattccgaataatacttagcaccttgcgttactcagtccatccaacgagcccccgggtgctaggaatcggcccaaaggcaaactatccattggcaaaccaaacggaaagcataggaagatagaactccataactcgataggtacttttgtactcagattatgtcgcaagcaatcaagataaatattatgaaaaatatgatataacatctgtagcccccgactcgctactcaatagagaaccaattgatgtagtgaggcagaggaaaataccatataaagaaaaaaacaatgatgacttagctttgtaatattccccttggtgatggcagaggtgaccaatgtgggaacaaagtcatcaatcaataacaatgaagacaccagtcggcggcgacgaaggcagtcaatggtgaaagcgaagatgcccaccaacggcggcataataggccagccgtctaggcggagacatcagtcggcggcggcgaaggcaagccggtcggtgaagacgtgaacacccatgaacggcggcataataggccagctgtgcaggcgacaataccagttggcggctgcggaggcaggccggcggtagacgcccaccaacagcggcataataggccagccgtgtacgcggagacaccagtcggcggcggcgaaggcaagccggtcggtgaagacgtgaatgcccatgaacgacggcataataggccagccgtgcaggcgaaaacaccagtcggcagctgcggaggcaggccggcggcgaagtcgtaggcgtccaacagcggcggcataatgggctagccgtgcaggcggagacaccagtcagcggcagacgaggcggccggcggtgaagtcgttgttgttatcagcaatggcggtggcgaagacaagccgacagagtggactcgcggccgatcgaccggaaagctgagacgcctcgagtccatgaccagcatcaatcgcctcaatagtgccgcgtaattatatgcgaacaacaatacaaaaatagcaagagattaatctgagattaaaaatcaatatgataaataatgataaaactaggcgtccggcgctagacgagtagttagcatgagtagatataaaaaattgctcaatggaaaatatcacataaagaggaaaaataaaggcacttagcttttttctcagtgtcctccgtatatatgtgttaatgggtggacaggagatcatatcggcagcttgtgacagacatgcaatacatgcatgagtgctgcacttccctgcgcgaaaattgctcctattggttggctcagattccacgtcgactccaatttagattagtaattgaatatcaccaggagatttaacatcatctaaaaaaacgctggcggttgagagttgatccgttgcttggtgatcctggtagattgatatcgccgaacagattaaaccagatgatggactcggcatgtcaaacgatcaagttgacgactgacgtcccgtcggaatttccggcggcggcgatgcaagccaaactccagaagagaagaaccggtccgaagatgaaggtggtgctgacggcagccataggagattgaatctaaaacttgccgtggtagattgttgtaatccctcgattgagtttcccctgactgatttggatcaagtcagagaagaggagcttgaagaagtggtcgacggaaaggaagtgaaaactcccgaagcaaaaacgaagtcggcgactcatgaagttgattccatcgcgctcgttgataggaaactcgacgcaacccctacttggcgcgccaactgtcgaaacatgaattcggcaataataaaagggggtagcgcacgaaacctaaaagtggatggatgcggagacaaggatttagacaggttcaggccctctcaatgagaggtaataccctactcctatttggggatttgaatccgccgggtgtagtattgatctgacgatcaggttgtgtcatgccccctagagggcctcctgcccaccttatataggagggggggcaggattacaagatagaatccttatccaatacggtatcggtttcctaaatctactttacaatcttatcaaaccaggactttaggccgttccgtgatatacaaggaaacgtaatacccaagtcatgatctgttacatattccatatatataagttatcccctataactagtcggataaccatgccgtgtgggtatggggtacccataatctccacaatggccatcaccaaacacaatgacaactatagtccaatacagcattcacaatgagatcgatttgattatgttgttagtttggtcagatgggcaaagcagagcaacagatggcttcatctctgcttcagcttttcctaaaactaacgtactgtagggccatcggtcactcacaactaacaacatgcacaattaacaatactgtgaacgcttcgctggctcgtacaccaatcattgcaaaataatcgtggagttcaaccctataaaaagttttcatacgtgctcagttggatcataggaatatctatcaaaaatcctttggattggtccgaaacataggatttgataggaactctaatatatgttaacttttggaaaaaaaatatttgtgtctatctattttttttgttcttgtgtttttcctgtgctctatccaaacagctattcttgtgttttttcagtccataagatttgagatgttagagcactttaattctatttcctccgtttcacaatgtaagactttctaacaatacccacatttatatagatattaatgaatccagacacatttatatgtgtctggattcattaacatctatataaatgtggataatgctagaaagtcttacattgtgaaacggagatagtatatctttttcctacattttaagaaccatgcattccaaagtagcccataattcacaacaccattggcatgcagtcactattacacaaatcccaataagtgccggttgggaatcggcaataggtggtttcccagccggtaccattttatcggcatctatgctctagggaataggtgatggtttcagaaccaacacctgtagagattataggtgccagttcttaacccacaactagtacctatagcattcaataaaataataaaaaaaaacagctgatggagcatatccaccgaccgccacctcgcccacaccggccttctctaccactgcctccatcaccggatctggaggagaagaggggagggtggacggagaggagggagggccatcgggaaagagaggggccggcgagcctcctccaccgctacagccggctctagaggaaaaggaggaagcgtatccagaggaggagaggaagggaggatgccggtggagaggtgtatgtgagagagagacgaggccgggtgtgggccaggggataagggtggggattggggccggcactcgcttgtttcggcttggctcgggtaacggttttttaaaaaccaacacctttagtttattataggtagtatcagtttttatctagaactaacacctataatataaatataggtcatttcttaaatgaaactcacaccggcatcagtttttaacttttttttctatacttttctttatagagatgagaaacggtaataggtgtcgatttcaaataaaccaacaactatggagtggtaccttttatggtagtgcgtcgaactgagggaactggccgaaactggttagctagagctagctcccaaatactaagttccaatcatagagagcaattccaatcatatagttagttatatgccacctgtgcaattaattaattaatcatggagcccgtggatcgacgacgacgtaacggccggagatggggcagcagaggtagttaaagctacggcgaccgccactgtcgcgctttcgtatatggcgtccacatgattaattaacctgttaattctgcggccagtttttaatatattgcgcttatggggtgcctaactttttcccacacacgcatgattagttcttcttagacaaatcatttagggcgacaattgtagtctttcttagcggatatatagtatgtaaaattaatgatatggaacagagagagggagtaaagaaaaacatggattatagaagggagcgaagaaaaacatgatttgtcaagtatcggcttaaaatcgacttttagcatttattaaataaaatattgttgtttgtgaatgaaaaaagaaaaggaagatacaaaacatttattttggtgcgttagagaccttgttgttttaactattataaggttactgtaaggtactctctctatcccataatataaggcgtgatcaaattaagttggcacgtagtagcaaatctaggatgaaagtagagatggtgctaatgcacatgactaaaaatataacttggtactataaattatatttcctgaaaaatatgaacttaaaaatccatgtttcattttggaaaaacatatatgtccagttcaattagaccctccaatgtgccctaacagatgcaaagcaagagctcctggtagatggcgttctcactggtttggtaattgaattgggcttggcatagcatttagcaattaataaacattggatgacaaatggagcactaatcacaccgtagagctataggcaagttttcttcttctctagtcgctgcaggccccaatatatatactttgattgttccagtgtcttctactagctttgagcttattggaagaacacttggggctgaaagctgaagctgcggcacctcaacaagccccaacagtgaattcgtccagttggcacagtctacacaactaatctttatattctaatttctcatatattataagctttattacaacaaaattaaaaattagaaccatatgaaagtaaatttaaatgtcaatccaatgatataatttttaacaaataaatcttatttcatattttactaacgctttgtttagttcgtgtgccaaaatttttttaagtatacgaacacacatttgaagaataaagcgtagactaataacaaaacaaattacagattcagcctgtaaactgcgagacgaatctattaagtctaattaatccgtcattagaaaatgtttacggtagtaccacattgtcagatcattgcgtaattaggctcaaaagattcgtctcgtgatttacatgcaaactgtacaattggtttgttttcgtccacatttaatgctccatgcatgtgaccaaatatttgatgtgacggaaaagttgaaagtttaaagaaaaaagtttgaatctaaacacggcctaagtgttggtcaaatgttttgaatgttgaatcttaaaatgcgtgcatgctttatattataggatggaaggagtaggatagtttcagcnacgtgattattattaagcccgtgtcaatttatccttataatcttaagattgtggaataaaaaggtcagaatcccctacatttatgaatataaagagtagtttataactagatcgctaattaactagttcaatagtctatcnnaatgagnagggaagagtaaagatccgnatgtagtagatcttcatcattttcncaagttcgtgtgcttcattgtccatcttcgaaactagggagctgttcagattaaagttaaaataaaccttatcaattttttgcattatcaaaattttagcaggatttattatgtatttattaaattttagtaagaaactaaatgaatgcacatatttagtaactctattaaaaaataatatggtttaaatgacatcaatctgaataataattaaccgccaatatatagcaaaatatccctgcaaacattctaactgtttggatatatatagtatatatgtagtatggatacatagagtataatatttctcttttttaataaatagcgttattgacttttgtacatatggttaaccatttttcttattctaaaattttatacaaatgtactataagatataaatcatatttaaaatactttaagtgataaaacaacatacaataaaataagttgtgattacgtaaaccttttaataagatgaatgattaaaacagaggtagtattatacagttttattcggtaagaggagacgaaattttagggtccgttcactttgttgctaaaaaaactttaccaaattttggtaatgctaaaattttggcatagttaccaaaatttgttgctaaaattttggcaggattttctatatagttaccaaaatttgatagcaaactaaatatagccaccttttgataactttaccaaaatttggtaagattgaaaatagcatcaaaatgaacaggcccttggacattatcacagcagtgttatgagtcgtgtttgtgctggtctgctgcagacggcgcacggtttgattattaattggtggtcggcgtcgtacgtggatggcctcacgtccacaagttagctagctagcctagccatgcttctcctttgattatgtgcggcatattcaggacagtttaaaggtcggtgggcacatattcagcctcctttaaattgcaccacgattgaaaagttaaggactagaagaacacatatgaccttaatagaaatatatctatataaaacaaatgattaaaaaatataaaaatgattgtttaaatatagaccacggaaaaaagttagaaaccagggtcagaaagactccagaaaatttttaaagaagctgaagctcttgctaatttttctgcaaaagtttcatactatcattcattccattgaataaaataataatatttaatcctttgttttcaaaggtctttgtaggaatttaggaatttgtgtaagatcgaactatatttttcctataaattagaagggttctcagcggtatagtgaaatacgctacaacaccgaatttgctatatcaagttgacagaaatttagatacaaccatattgctctaaaggcaagctcaatgtatacggtgaagtgtgatattagaagtgtgcccataaatagttactattgttagagcaattctcataacatacaatgttatggttaagatctaactataagatgtggccccactaagatggaaaaacttgcttcaactctagttcatgagatgaatgagagaggaaacaaatattttcttttcgtttgtacgtagtagaccttaagcataagcaccctagttaaagtatttctcataatatatatggctcactttataaatatattgtcttaaggttaactttttgatacattaatttttgtttgccttgagattcgtgcattaacagaaacaactccatctagctgcagtgaatttcaacgaactacacgagtccccataaattccattagcaaattaactcttctttgagcgatgagttaattttgtagagctccttaaaactcattatattcacattatagagagttaaggacctataaaatctccgatacatcacttgaaacaacagtcataagaaacaaaaccttttggtgtggttaattagtactccctccgtttcacaatataagtcattctaacattttccacattcatattgatgtcagtttcacaatgtaagtcattttaacatttcccacattcatattgatgtcaatgaatctagatatctaacttacattgtgaaacggtggaagtagacagtatcagtttttaacaaatcaaacgggccagacaagtgagatgtacttgcgctagatctgagcaagttgatcacaaaaatgaacagctaaaattacatgcagttcttaccttattggtggagcttcacataaagaagtacgtagtactagtatgtggtggcaactgtcgtgagccaccggtggaagaaggaagagaaggaccattctcagtgcaaagctcctcatttgagtggtctcaaatgccacataggctgaaaccataccatcaaaattttttcactcccacaatgcaaattgcttcaagagataccttaaatatgcatgttagtttctagtatgttgaatttcagtcgtgatatgttatcaatatacatccaagtctaacttttacactaaacatcctcagatccgctaagtaaaataaatctctccaaaattccttcaatcctcactccccctcccctcatcggactccgatcgaaccgagttggctgctggcgagcactatggatggcgccatgtccaactccgagaccgataaggtctgatcttcatgtggcgacataagaaaggataagacataatctattataacgaatttaagaaagtgttatttagatttattgaattcttcttgggtcgttagtattttttttttggaactgagtatggctcggctcggctcgtggaagctcgtgaaatgccaggctcggcttggctcggctcggttctccaaccgagctgtacattaggctcggctcggctcgtggtctggctcgtgagctttgcaatagcagcagttgtattgccagtagcagttgtgttgctttgcaatgacttggttattcagataataactctcaagtccctacaaagataattaggtatattgtatgcagccaacatataacaaattgatgggcttttttggttttcggccagaagtctttctattcaaaccgagcctactaagctcgtgagctgctcgcgagctggctcgggctcggctcggttcacaaacgagctaaaacccaggctcgggctcggctcgttcaggattcgagccgagccgagccaggcgagcccgagccgagcttgagccgagttcacgagctcgagctatttgtccagccctagtatcatacatacagatactggtagagtagtattcaatcatagagcggcccgacctgacctctgacgaccagtttgggtccctgctgggagggagggttgagctaggttagacagcagagcgatatcgacgacgacgacagagaattccgagaaagaaggaagatcctggtcactgtcgggcgatcgcgcgacgatcccaggctgcgcggacgtggcgcccgggaacagcctccctccccccctcgtacgtggacgccctcccctccacaactccaacgacggccaccacaacccatactccagcaggtgacaccacccggccgccccttgcacatgcccaatactactagctagctcgtgcatgcatgcaattgcaagagatcgatctcacacttctcaaatttcttttgacgatattgctcacagcaggtacgttacgtgcacacaaggaccagcacacaaaatcgatttttgctgcaccaccaccatgtgcacgtttgtttaacgcacgcagttatatataattaattaatctgatggccggcacgtaaccaggcaacacgtacatacgtagtactccctctgtattttaatgtatgacgccgttgacttttcgactaacgtttgaccattcgttttattcaaaatttttgtgcaaatatgaaaatatttatgccatgcttaaagaacatttgatgacgaatcaagtctactactacttaaaaagtaaaacctgcttccgtcgtccgttgagaaaaaaagagcgacaaaaaaaaacttcactcggaaaaaaaaaggtccgactcatccagtggtaaaaaaaagtgagaggaaaaacaaaaaaaaagaaaaaaaaaacttcgatcgcgaaaaaaaaaggcgtcaaaaagtccgactccccggtggagaaaaaatgccgagaaaaaacaaaaaaaaaagcaaaaaacttctaccgtattttaaaaaaatatatatataaattaaagatgtttttgcatccgtgtatgggtcggtttttaaatccgttcgcttttggaaatacaagtccgtatttgagtcatttttttaagttcgttcacttttaaaaatacagaaggaatcgtataagaaatctctttaaaaaactcgcatgctaatttcagacgatcggactcctacttatatctcatgattttctaaccaaatatatatccaagtgaatttaacgcagtgaatttcatcttaactaaaccatatctataactaatataaatatttggatttttccggttgtcacaagtcggacgaagggcgccttcgtccctcgcggtgcgccttcgcccgcagcccccgaatcccaatccctctcagaatcggatacaagggaaacaattctcaaaatcagcacaaccaaatgcggggattttttgtccgccccccaagaaaagtcccagtcgaaattcatcaagaacacgcatgaaacattccatcaataacacacataacaaaactttcaaccaagaacatatgaatctccaccgacaccattcacagagagagagagaaagagacgacgccgccacctctcccgcccccgtcggaccgcagccgcctccatgccgccggatctggcggaggcgaggtccggcccgccgcccctcccacccccgccgggctgcagccgcctccacaccgccggatctggcggaggcaaggcccgaccggcgttccatgacgtccgccaccaccaccaccgccgcacctccccaccatgcacagagagagagagagaaagaaacgacgccgccgcctctcctgccttcgccggaccacagccgcttccatgccgccagatctggcggaggcgaggtccggcccgccgcccctcccacccccgccgggccgcagccgcctccacgccgccgttgttcggggagagggcgccgccccgtcggttgtgggggagggcgccgccgccgccactcgcgggaagaggggcgccgtcgccgccgctcgggggcgcggaggggagggcggcgatgtgagatgggagggagggaaatgggctagggttttggcggctaaggagagggaggggttttgtttccccgatatcgacgctcggccgtccgatcaaaaccctaaagatcggacgatcggtgtcgtccaggctaaaatcagcccaagagggatcgagagtgaggccatttttccggcccaagcccaggttgtggcctggggaggggagtgcacttgcgcgtgcacaaaaggccgtggaccgaccggcaagggccggaaataagtctattttaggtccctcgggccgaaaaaaatagaataagttcatttttagtgcttattttttcagaagcattacaattataagttattgaatgtgtttatttcaaagcaaacctaaaaggaagtattttctttctttttccaagtaaataattgttaaatgacgtttgtattaataaaattaacaattaagctctgaaaaattcaaatataatttcaaagagcgtaactaatcatggagaatttaaaaaaaaattaaatttaaccatgtcattttatttctcacacttgctttacttgtaaatttatttaattatacacatacctacttaaaaataccaaatatttcagcgaatttgtattttaattaattgcatatttttctaatctgtacgcttcacattgtaacacacaggcacttttgctagaccaaacaacacttttggtcaatatacacactccgtaatcacccggtacaacgcacgggcacttttgctagtcataataaaataaatgataattacataaatttttttttaaataaaacgaatagtcaaatgttggacaaaaagtcaacggcgtcatacatcaaaatgtggaggtagaatgtatacactctctacgtacacgaaacttccaacacgtagtcgccttaactctagttaccctccatccgtacgcaatatccgaagggacgtgatgcaccggcgcgcccggcccggccgccggcgtaacagacttccgacccgagaccgacacgatcgatccaccgaccaacgtggcgacccctcattggtagccacgcccacgacccgcaactatagtacgtacaacctctctacacggcacgtcgacgtgtcgtgtcgcgggccgacccgcaccgcaggggaggggccgccccgcccgactcgatcgatcggtccgtcggggatcccgtcccgcgcctgcatcgccacgtggcatcccgccgccacgggctgctcgccacgtgtgaaccggccccgagcccgtcgcagcgcgacgcgtgtactctgctcctccccacccaccgtgagagctagtgctcgggtataaatagcccaactcgtggatgtcacctctcctcctctcatcgcctcgctcgtctcgtttcgttttttcccaagtacaaaagcagcgcgcgcgcgcggaggcgtacctatatacgtatttgcctcgagcatctacgcgcgtatatacggtggaatatacgcgactcgacagaaggggatacgtatacatatacgacgtcgtctatggcgccggagatggtagcggatgagaaggcgaaggtggaagcgacggggaggatggcgtcgatagagatggagcccaagactctcaccctcgaccagctcaagttcgcaagggtatgtatatatatacatgtatatatacgacgtatatctaccgctagctacatgataccattggatttcgaatgttcttctctctctctttcttttccttttcttttcttttcattccgaattcacacaccgagcgcgcctcatcccataacctggccggcccttgcaatttcaaagcgaatttgcacttccgatcgatgaattaggccttacaaacaccgaattgataaatcatcccttaattaatttgcactgttggagtaacacaattttgctccgcttggaccttcaccaaacttcagattaattcgttgcacacagggtttttgtttttcaatctttcatgtttgtttcatgcatataggagtataacagatacattagccatttaatttcaaacttaccttctgagaagcatatagacatatatatatatatatatacttcgtcaaatgtgaagtgcaacaaaataaattaatttgagatactacacatccatcatttatttgcactattgattggttacgaagaaagcaactaaatcatttttgacacgaatcaatagtgtcaaaaccagctatatattcagagtatatattaagataaattcgttacacttgtggctaaatatcgttggtgggtctctcaccgtcaccggcactgttcctgaacctgttcaattaggccacgcctactaacctgtacttccacttatctactcttttctgttgtggccggtgatgaccttccaaactcaaattaattaaccttaatttctaccgtccacaaaatgcatgcatatataccctggaatcgactaacaccttttttaaaaaatatagctatatatatatatatatatatatatatatatatatatatatatatatatatatcatgcattatttttttaaaaaaagttctggttataaataaactactacttttgcacacaacaattatcggtacatggcattattcaatattcatgtgcatatactcggttatatttagctggagtacgtgctaatgttacatgacgtcgacacggtgcacgcaaggaaaaaaaaagggagggggcaatggcagcggtggtaataatgaggcaacaacgtagccgcttacgtaacggtgcagcgacgccactgttgtgctgtcccatgatgtaacgcgggtcaccgtcacgcaacggaatacactgaagacgtgtactgcctcatgttacccgtctcgcacaacggatgttgtgatagcgacctgcatcttaagccatcttaattacacacttggtagtaatctttcatcttatacagtatattttataaaaaaaataaaaaaaaatcagtcagtgtataagaaatatttatattgtatcatctaataataataaaaatattattcatacaaaacttttaaataaaataaagagtcaaatgttatataaaaaactaaaaattggagtctttcgtgagacgaagggagcatgttcttctacgactatagctagacagctagtagcacctccttgcgtacgtgtacattgcatgtatatgtcaatatgtgtacgtgtacgccaacatatatacatacatctcagtatttattatcccttcccacgtatgtttacctggcttgtacggagcacgtacaacatcagcatgcttacatcacatattcaatttatgtaaagagtagttttgttataccagtaattcataaggg

SEQ ID NO: 28832 - DNA, 11349 bp, Oryza sativa
gggtccaaggactacgttaacccaaataattaatttggaggacttgtttggacgttttgaaacctcaaggactaaactaagcccgaagcgaaacttcagggaccatattagctattctcccattcattaactagtgtagtatagtaaaatactatttcctccgtttcacaatgtaagtcattctagtatttctcatatttatattaatgttaataaatttagatagatatatatatgtttagattcattaacatcaatatgaatatgagaaatgctagaataacttacattgtgaaacggagaggatattaatcctcaattatattcagaaaattaattaatcagaattttttacaggaggcggcgctgtacgtgctgagcacgaagccggcggaggaggccatccggatcttcaccgagggcctcaagccggtgcacctcgccgccggctgcggcggcggcggcaggaagagctccacgatggcggcggactcgtcgtcggacgacgacctcgacatcggatgcttccacgatgactacgccggcaagtcgtactgccgccaccatggcggcggccgtcgccgccgtcgccgttcatcttcggccgtcgagaaagacgtcgccacggcgcccttctagttctagctgcttctagaagaaccctttttaccttttttttttttttttttgctttgtttgataagctggccttgtatgtgtttttataccgaacgggccggccggttttgtgttgagctaaaagcggcaaattttggcgtgtagtagtttgaaggccatagagaggcctcggctagaagaagaggcgtgacggtagtgaactgtcgttgcatgtaaatatcagtagctagctagcacgtacgtattgcactgtacattatgaacgcaaagtttttgtttcctttttgctttccctttcgagagaaagatgaatgtttacaattacacatttacgaaagttgactagatattttccaaggaagtgaagtgacgactactgtactgtgaattattccatctctccttttgtctccttccatgacgagtccagtagtagaatgctggtctgacaaccaactgatagttgaatttgagtgtcaagttgtcacaagaacacgaacaatctcgcaagtgtgcgcacggaatgagaaagcctactaatctaactcgggccttaggtttagcatgaaggctctctttcctgtctgtagctttgatagaccgtttccacaaatctaggtaacggcccaatcgaggtctatttcattttgaataagttcacattcggtccacctttactgtctccaagtttgaaataagtctgtaaccaaaatgatataactaagtccctcaatttacaaaaccgagtcatctgagaatatcctagacagtattaaacctgattttagctgttgtggcaagcttagtcatcgtgacactactgggaaagggacattagctagaaactgaaaaaacttcttttagcctacataaattagaattttgaacgggtgtatgtttcattgatataaattagaattttcatattctattcatacttctatggtcttaatgttatgtgagtggtccggagtatgattgggctagaccaagaacggataatacccaacaggcactgttcattgtcttccttagctcaaggcgaaacaaagaggagggaagatgggcgccggtgctccggcgaccaaatgacggtgaggaatgtagtaggacatgtcccacgatatgactcatccatagatgctgaaggttggcaatgaagaaaaccagaacaagagggacactgggggcaacgaggtggtcccgatagagagagaaatgacaaagacaagctctagtagtgacacgaccggatgagtgcatcaaaacatgttcccggacgagaggattatgttttccttgtacacacggggaaacctgactaatactatttattgtcttccctagttaacataagaaatagaagaggaaggaagatgggtgacggtgctccagtaaccaaacggtagtgagtaaggtagccggacatgtcccacaatgtgactcatccatagatggtagcagttggcaatgaagaaaaccagaacaatgggaacgcagcaagcaacaacatagtcccaatagagagaaatggcaatggtgagctcctgtggtgaacacgacagagtgagtaagtcaaaacgtgttcccgaacgaggaggttatgtttttcttgaatgcgcaagagggagggaacacatgggagagaaggggcgccagtgagatgagatgccaagggagagggggagcgtgtgcagcgagggagagatggaggggggtgctaggagggaaggacggaggtgggagaggaggggcgccagggaaaagaggggctgcgggggagggggagagataggggcgccgagaaggagggagggaggcagaagcggaggctcgggagggacactactacagacttcttatctgtaacggcctttcctatgccaggggcttgcagaccgtcacaacattgtcatctctaacgggtcaaaataaatactgacaaagatatactcgtacaaacattatccatatgcatgtatttcgagctcaccgatgacacctataggtgacgggcttatgtttaggcccgacaaagattatctttgtaatctttgtcacccccctatattgcgctcatcatcgatgacaaccatctgtgacaggctcaatattaggtccgattgagataactaaaagcccatcaccggtgtccgttcgttgggcgttactgatatctattgcacactataaatactccagccgtctaaggaatggttatctcactgttcactattttggtgggaggtgttggaggtgaatttttgtctttttttcaaagaaaacagaaaattcaaaaaagtaatcaaaaaatagtaaacaattcccataaatttagtaatacttatcttacaaaaattattatctaatacttattcacttttgcaacaatggatcgaagttggatgtatggaactgtgcgacgacatagcaaagagtatagaagtggcatttcaaattttataaatgccgcagaggaggacatgaaaagaagaaactgcgattacacgtgttgtccatgtacatattgtagaaatgagattatgcttgatagtggattcgacgtacacactcatctgatacgtcgatgattcatggatgactacacatgttgggtgaagaatggatcggagagcaagaatcagtcgatgatgttgcagctgcagacagaagtggtgcacaaaattagaagatgaagatgagcatgacatgtttgtaccttctccattgggtggtgaaatggttggtgcggatcacgatttgcagtaagacatgttgcgttatgttgaggactgtcacaccctgattttcgtttcaggatttataaattatttaataaattattatcggaatttatattaaatgttcattaatttacaagtgaagttaaatgtgggaaataaaatttcctaaatataaagcatggatggatttaattattattaaattccccatggttaattatactctctggaatattctcggatttttcggagctcaattcctaatttttaatcatacaaagagcatttcagtaattacccacatattaaattaatcattaaatggtctaattataattttgttaagtactttgagtgtccaagtattttcaagatttttcttggaattatttgagcataggaagtatttttaacaattcaaagatcatttcattgattaatttaattggaaaagtaattaaagttcaccttttccttttcgggccgaattaggaaaagtcctctcactctcggcccagtctcctctcagcctgcagccctttttctctctttcccgaagtctgctttgtgtccctcctttaatcagtccttggaagtagaagcccagccgaaagtctagtttgcctccctggcactgttcatcttcaagcttggacagagccgagccgcccgtgctgtgccctgtgcagccaccgcttcctccgttaaattcgccacatccggagctccgtttgcaaaattagttgaggggaaatattcctcttatcctcctctatcctctcccccaagaatcggagcaaaccgttgagtatcttatccgaatcgagctcgttttcgagtttatctccaaaaccgagtttttgatttcccggatcgatttcttgcgggaggagtccgatctcttcaatccaaggctataaataggaccccctagtcctcctctttcgtttgccccctctcccgtggtctcccgtgcctcgtagcgccgccgccacgtgctccgccccgccgtcgtcgccggccgagctccatccgcgtcgtgccgccgcctccgtcgtcgccgccggtcgccgtcaccgccgtaaggtgcgcgggagggtggagaagcccggtcgcctgacccccaaagccgctgatcaccggagccccgtcgccgccgtcgaccgaagccgcgccgccgctagacctcgtcgccggccgtcgtcgttcgtcgtttggttcgagggtgagtaccgttgggttcgtctcgtcgtcctctacgtgtacatgtcctccaaagtcacagccgaccatccaatctccggcgaggtcgccatcttggtccggccattgatgaggtcatcatgacgtcatcatcgtttttctttttcctgtttttctaatagattaaatcttcggaattcataattaaatcatcgtaactcggttttgagtggttcaagttgctaaattcatctaaaatcatgatctacatgttggtttactttttatgtattgtttatttggtttttattagtctttttcttcgttttgcgtgttagcttgtcgttttcgtcgttgcgaaggttcgtgagtgcgtcgggagtgttcagaagattaattgaagaccgattattgcaaggcaagtcacacagatcccaaacaaccctttgagcatgttgaacctgtttaaagctattgatttatttcaacttatgcattgttttcgaatgtcattgggtggtgagcctttcccatttaattatggccgaagatgactttattttcctatgggttataatttgactagcatggaccttatatattggattggttcagctagatgttatttatagttgcttagccgtgcttagaaacattagcacactattgggataacttatgacttactattatttaatgatggcttaataatagttcacgatggtcaatcgtgattggttaattaattactcgccaactaaaacttgataatggtgggttgtgagcacatggttttgagagtcgtgctcatgacaattaaggaccggttcgcgagctactgttgtgaaacatttatcgtgccaaccacaagccagcatgggcaacggctttatcttttgtatagcgtgattcattatagtgcgccagactgagaagtggcgagaagtccacgggggtcgctggggagtccatgccttgtttataagggggtgattatgatccaggaaaggtgcgctgtaatgggttatgttgtgctaggggtattgtcacaactcctttccgaggtaccgtggtggtattgaggcacatggtgacatgatgtggggttgtgtcttgtgggtacagtggtacacctctggccagagtaaaactattcgaatagccgtgcccgcggttatgggcgagttgagcaatgtttttcgtgattagtctcacacctctcacaatatttatagatggtatacctggtaataatttgcttagctcctggtttggagattagatctgtacagccgggtatggttgttcaggatggttgggcctgtgcagcatgggtgtgctgttcagtgttgattaaaatttctgattaattactccactgttttacttctcttaaatctttgctaaatgctgcttttgcaaatgagcctatattatgccatcctttggtatccttgtgcacttgcatacttgctgtgttgtgcacttgcatacttgctgtgtggcttgctgagtatgtcatatgctcaccttgcaataatcattaaacctcagttgaagataaaggatccagaaggagaagacgtttggcttataccccagttgagctgcctgtgggagtggagctgaagccatcgctagaccgttattccgctgctgttttcttttcttttgtaagtgtgtaacgttattattatgatggatttgtatattaaattgtcagtttgtgtacctcggctgattcctggacgaggattttatgcacaaataagttcggaaattactagtgaattttcgggcgtgacaaggacctagcttacaatgagagagattctataaagttcaccaggttggtcagtgactcggagacacctctatacaccggatgaaagtccaaacacaccaaattgtcagctaccgtggatctactgaaactgaaaataagtagtggatggacatacaagagtttcacagattttttaagaatattgaaagccatgcttcctaaggagaacacattgtccgagacgacatatgaagcacaacaggttttatgtcagctggggttagaggtctgtagaatccacacttgtccaaacgatagcataatgtaccacaagcaataggcggacttagatgcttgtcttgtccgcaaggtttcaggacacaagcaaattgtcagttttttctttaacaggaggcggcgctgtacttgctgagcacgaagctgacgaaggaggcctttcttcacagagggcctcaagccggtgcacctcgccgccggcacggcagcgtcaggaagagcttcacggtggctgcggactcgtcaacaacgacgatctcgacatcggctgcttcgacgatgactccggcaaggctggcctactgccgccaccatggcggcggccgtcgctgccatccactactagaaaaagcatttttcccgacgcgggggtctttttttcgcaggcggacatgatccttgaagccaaatgaccgtctataaaaatataaatcggggtgaagttcattgtattttcacaggcggaccacttaagcgacgcctgcggtgctttgatccgcgtgcaaaaattagagatttttagtgttgtttgggtacaggcggaagattttgccgcctgtgaaaatgtgttttgaccgcctgcgaaatccttctctctagtagcggttgccgttcatcttcggccgtcgagaaagacgtcgccacggcgcccttctagctgcttctagctagctaggagctagaacatcttttagcttttccttttctctttttagctttcgttttttttttgtttgataagctgttcttgtatgtttttataccgaactgagcggcaaattttggttgtagtagatgcaaggcctttagagaggccgcggctagaagagacgtgacggtcgaggagtgtacatgtgctaaattagggctgtcaacgagccgagctcgtctgcctagactcgagctcgagccgagcttgagccgagcctataaaatgttcaagctttctgataggctcggctcgagctcgactgccgagcttgatttttaagtaaaacaacatatatttgaaatataatctttaaaaatatataattaatttttagttcatcatattaatataagaggaaaaaaggaataaaataaatatatgatgccaatataagccatataaataatatatttgatctcataatttattaaataacaacaaaaatcatatattactaagctcgttggaagctcgagctcggctcgacaaagctcacgagcttagagagaggctcgggctcggctcgtcaggagctcgagctgagctcgaatcgagcctaggacgagccgagctcgagcagctcgcgagccttgagctttttttgacagccctaatgtgaatatcagcagcgagcgagctagaagtctagaactgtacattaacgcatatagtttttcatttgctgtcccctttggagagattgaataatgtttaaaacttgctacgacgattaattagccagatatttttcaagtgacttaattacctatgatttttcttacattttagtccttttaaaaaatattttctaaatagatccctaaaaatgtactccaaatatacgctcttcttggcaccacttaccctggctctgaggtccagcatgtcggcacgaatgacgctggtgatgagatgttgaacctcggcacaaataaccttggcgtcgagaaaatgatccaatttcaaaataagtctttttttagaaatctatttataaaataaatttttaaaaagagctaaaatgtagaaactataacttaaggcctggttgttacagctccaacttctaaatttaactccaggagtgggtttgaataaagtggtgaactgcttacccaggctccacactctagtcattttgtgagacagctccaccatctccactcccagttttggtggagctgaaactgtttggctgagctcaagctccaggaggggtggagctagagctgaagctgtgccaaacaggcccttggttgcccgtctgaatgattccattcctctcctctaccctccttcaggagtcgtgtacaagtgttgtacccgcgcttgaccgtgttatcaaaagaacaagataatcaattggtcaaattgaagtggaaaaattatacttcgactcccttaactatggtccatgtatgattcataacatttaaccacaaaaccggtatatcgactcttccactattaaaaccgatgcaaactatatccctgggtggttttgcaaacggttttggctgatgtagcgtctacatggtggtattgactcggtcttctttccacgtatcattgatgtgtcgcttatgtgacattttaaaggtaaaaagacaaaaaaaaaggggaccgacatatcatccacacgtaaaataaaagtgggacccacgtgtcatcctcttcctcctttatccttcctctcccctcctccctctcctttttcccccttcctcttcctcttttttcggcctcctcgttccccgtgctcttctttctcggcccaagcgcgtcgccgcccacctgctgcgccgcacctcttcctgcctgaccaccaagctccggagctgcacgcctcatcgtttaatcgcgctgccgccgaaaaccacttcggtcccgacgccgccgcgcagggggttcgacttcctgctgtcatcgtctccgagaccctgccggtgaggtctgccgctgcccttgagaccacgggcctccagccgacatccaagggagcttcttcctcgatgcaggagccgaccgccccagccgccggtgtctgccgcctcctcctgaagccaacgccgccgagcttctcactcgccaccgcctcagccatcaccatggccgttgaggtcaacaccaccggcgtcatctctctctctctcttgtcctcaagccgtcgtggggcaacttcgccgtgcgcaaacagttcggcaccgacgacgtgggaccgacatcggagcgccatcccgacactgaacgcagcgacgagcactgccaagacgcaagaggaggatggaggaagaggaagaagaaggggccgtggaagaggaaggagagagaagaggggagaggaaggaggaggaagaagggaatgaggaagaggatgacatgtggggtccactattttttctgtgtgaatgacatgtcggtcccacgtatttttggattttgttttcactctaaaatgccacataagcgacacattgatgacacgtgggacaaagactggatcaacattgccacgtaggcgccacggcaaccaaaaccgcttccaaaaccactcaaggatatattttgtaccggttttgatagttggaggagtcaatatacccggttttgtggttggaggttatgaatcatactcgggctatagttgagggagtcgaagtatactttttcgaattgaagttctctgttctcacacaggacacgaacaagctggcgaaacagagccacctaaatcgatggcccagcaaaacgagcccaccaatccaacatggacaacaatatttcagtagaataagttcacagtagaataagttcactttttgaccctcaaaagttatagaaatctaatctgtgaccctaaacaacaaaaccggatatcttgacccccaaactcttaaaaccggtccaatttaactccctcggcggtttcggagggcggtttcgctaacgtggcgtctacatggcgatattgaccgagtcattgttccacgtagcgttgacgtggcacttacgtggcagtagaattaaaaaatataagtgggacccattagtcattcacacaaaaagaaatgtgggcccagtcctccttccttcttcctcctccctctctcccttctctctctttctctccccttcttccccttcggccggcgggcgggagggcagcgagagcaagcggcggcgggcggcgaggccggagctgcggcggcaggcgaggtcaggcggtggttggccatctccggcgccgtcaacagcggcgaaggcgaggcgaggcgacgcggatcgaacaccagcgcagctccagcgctttcttcttcctccggcacgcccagcgctacttcggttcgtacgacggcgccgaggagcacaagctcaatagcacctcctcgtcaacctcaacaactttgagtacctcgacctccccaacgcgatcctccaacacaactggtacgagccggacaagctggatctcaagaaagtcgccatcgtcaccgccacactctcgcggccgccaactgaacgaggatgcgtcgtcgccggcatcatcgaacctttcctctccgcccaccgagtcgcattctggcgcatgggggatcaggtgatctcgccacaaccggcgtggccgtggctgctggaagaagtggaggacatcctgcactacaccttcaaccgcaacggactagagtatgaagctttccttgtcctcaccacggaggaagacgtccgtgtgtgcgacccactaacatgcgggtgtcgcggcggcgggcggcggaggcacgggtgtggcgcggcggcctgcgagtggcgtggcggagacgcgggagtggcggcggcgcccgggctaagctccaccgccgcgaagacgaaggagaccacaccacctcccgatgacatgaaatcggtggcggcggccgcacggactcccgacaccaaaatactaggggggtagcacgcgtacccgtgccgtg

SEQ ID NO: 28833 - DNA, 16909 bp, Oryza sativa
cacacctccaccgctcgccgatgtctccaccgctcgccgctgcgggagagagagagggaccggcgaggaaggagaaggaactagagggaggggagagagaagggatacgtgggtcccacaatttctcttctgtgtccatgataaataggtcccacacatactttttaattctaaataccacctaaacgccacgtcaacaccacgtgtagaggagacccggtcaataccgccacgtagacgccacgtcagcaaaaccgccttttaaaaccgccaagggagtcaaattgcaccggttttaagagtttaggggtcaagatatccggttttgtggtttagggtcacggattatattttgatcacttttgagggtcacaaagtgaacttattcctatttcagtgatcttccctggctgtagcttcgatggacttgtactgcactggctgtgttcgattgttgggttgggaaccatccctctgcatgaaaaacggagcggtccattagcgcgtgattaattaagtattagctaattatttttttaaaaatgaattaatttgatttttaagtaacttttgtatagaaatattttgcaaaaaatgcatcgtttagcagtttgaaaagtgtgcgtgcggcaaacgaggaagaggaggttgggaacctgatgtcaagaattcagacctactccctccgtcaaaaaaaaaaacaaacatagaactagtattaggatgtatcacatctagcacttgattggtttttttatggaactaaaaaaactttaatctagaatgaaatgtgactccttctagtacaatgaatctggacaaatagctgtctacggagtagatgctatcttgctgagttgttagctccgctgtctctttttgtgcctggaggtttcagtttagaagttggcccaatctggagtctttttgtgctttcgtgtaagctagcaaattaacccagcgtttctgtgttttttttttctttttggctgtttttacatgttattggctttattaacaaactgggtcgatcagtggatcaatctctgattaaataaaaaagtgcagatgtgctgcgagagttcttttttaatattctttttcaaccaattgacttgttccatgagcagcagccagtgcacagctaatacaaataatggttgcagttttcaatctaggcctgaaggtgccagggtgtgcaatgcataatgcagtctgaaacttcgtatagtatcttcatgctcgtttgtgctatgcaagattcaaaacagactttttttaaaaaaaaatgaggcatatgattttcaattactagaaaaagatgagaagacagtcgttaaatgttcacttgatgctaaaacattaaatgttcagaccacaaacaatcgaagctaagtactcgcacaagcacgggcacatccacgatacaaggaccaaggaagtagctctacaaactgacattaaaaaaaaaaaacagctctaagtagtagtattacaaaactgacataaagtgttacataaccattcaaacaggcacaatactacaacaacgattacaacaaattactagctgtgcagcgtgagcgcgatccacgatggtggtctatggtttctcacaatgtaagatctgttcctcctcacacagctgactaccatccagaatactagaccactagttgttgggacgatgtaacctactacttcagtatttacaatgtttagaaatacacgtacagcccaccaacaccgtggtaatacgcagatgtgatgtgattggtgtcctaaaccaaagaagagaataaaaaatggtacagtctagttatttgagtcgaacaacatgtcctggaaggtaaggctgctaaggcaacttaacatactcgatcaagagtgcaatgctgagcacaatattacaagagaatatcttgcttgtctggcaatcgagaaaagaaattccaaatgttcgatggtgtattcttcttctgaaagcaccaagctttatatagatgaagtgttactgctatgtattatatgagagtaccttgcttgtctggcaatcgacgaaagaaattctcaacgatcgatggtgtattattcttcttccgaaaccttgggtgcctcattatgtaaaatcctgcgattcccacaagaaccttctttggtacaaaatacacaacaatcgataccatgacaatgatgaactgaaagattgcagttgctctaggatccctccaacataacaatgattggatcctctccccctgagttgctacatcacccacaactgtttgaaccctgccggcaacgctcctcagtctatcgtacctcattcttaccaggtcaatactacaacttgattcgacactatcaaactcctcatcaatctcatctggatgtacactgcctaaacaagatactttatgatcaaaaaaaggaggcttccttggtctgaaccggtaattccacaaagctactaagacaaaataaatgatcaccatcgagagtactagcttatggaagcacagagccaggacaaagatgacacaagaaatcaaggcaacggcaggattcttccatgaggtcacgctctgaaacaaatgaatgaatggggaagcaacctgcatgagtcgaaaaaagttcactttgcttttcctcatactccagcagctggtgcctccggtggcgttgcacatgtatgcaacaatctcactccttaggggcggctccacccggctgaatcgaagggccatcacctcagctacctctgaacgaaacttatcttcttccattactgtcagggggtgttcatagtgcatcttgggcagagtggaccgtgcgtacatgcctaataggctgataaaagattctgatgacaacttcacagctatctgcagctcaccggctttcttgaacccacggcgattcagaatgataagagggtaggagtgtgcatatactcgatcagtctcaaggcaagataaatgaatctgtaccttgccaatctctcgatgggctttacgcgtgtgtgggaaatggtcaaaaacacccgcagtcagtacggtcgcaatgtcatagacgctccacgtatgctgttcattgaatacatgttcagggccatcgaggattgtgcgggtccgtacccacttatcaccatactttgcaacacaatacggattcactgttgatttgcccattctaagtgggaggccggtagcgcgcaatatcccaagatgaaccctaccaactgggggtctccagagtttcctgtcagcgggtctagtgtcatccatatagcctttagaatcatgcacgatacgatatctaccatccagcatgttctttaggcaaattcgcatgcggctactgttgtcattgccatcatccacagaactgtcgaactgtggcttatcagggtttttaagatcaaaccacttgctgggcatgacatcaaagtggtcgtgttcatcgcctccttttactatagaagacaatggtacagtctgttggccgatgacaacctcatctttaccgggatttgcaacaatcacatgtagctcaaggtcatcctcaaagaatggctctgcagcaacaaataaaaggtcctctttccattcatagctaccactggttgtcctttgctttccaacttccaagtgccctagtcctctgaacctgtttccctaaccttgccctgcaaaacacccctgtgtctgtgcctgtgttgcagccggccatgtcctcctgttcatcgtctcctactgtaacaccctggacctcaactactgtgacccgcaagcaccataggtttgggttctcatacactttgggtatataccctgataaacctacatgacgatatgcttcatcagcctgtgaccctatccaaatcgcgagcagcaagctggcctgtgctaattttgtcccgtcctggtcgaggagtgggtaccatgttggttccagtgggacatcatccagagacctttttggaatgttcttgagatccaagtgtagcttccctacaaagtcatctctgaccagatccttatcgttgactacgatatccacagtggggctgggaatcttgtcatgctggaaggagaaagcaaaagtctcgttccactctgggttcttgttcctcttaaagcatctggtgacacccctgttgtaagcaccaaatttgacctcgacatagggatcaaggctgccattggcatccatgtccggcagcttgcgagcctttattacacgcacaaagagaagctgcattcgctcaaacaacctgccaggctcgaaatttgggttgatctccatcagatcaaaaccggcagtctccaggacaaccggatcatcatgttgatctttgccataaccataatttgtttgaaacaagtagttgtaaatgccatttaacccattgccctcagtttgatgagtatgacgatcctcagtttcaagcagaatcctatcaacagcatcagtaaggaacaacttaagtagcacttttgcattgacgccctctgtattatccaatgtatattgcatcggatctacgttagctgaatggcggtgaaaatatttttcaggtagcaagaccttgccaagcaatgacttggagttgctcatctgatcgaagcagtagacagcagcttcaagaatgaggttaccagaaggatcctctcgctgtctcatatcaaaagagaacctctcattccatacagcaacattttccttgatggtcgtactcttactttgactgttgaaatgaagctccacggaatagttggtctgggaggtattgctgcttgagggtatatcagcgcttataacctccacaaccagataggtagtcgccatagaccctgtagtgtgtcgacacaatcagcctgcatacgtgagaacatttacaaattctttcttgcaatcatttatgaaaccagctcaaatgagttactgtttgcattaattgcaaaagatagcagcatatacaataatcatctagtaagaattatctggatcaagagcaagttaaaccatctcgcttgatattgtagtagtattgaatttttggggacatctatttcaatgacaaactattcgtattagatcaacactcgagaactcatcgcgtttcaatctttttcctaggagtgaaaaaaaattcttgtttttacgagtagggatcacttagtatttgtaaaaaaaaaaaacaacaacaaatccccaggtccgagataccggaagttcagaaaaacttgaccgaagtttcaaattccaatatgaatctgaccaaaactatgttgaaaaaacagtagagttgagtaaagaacccgttccaccagtttggtttggcccgtcgcttcggccgcccttcttccatccccgctgtagtccgtcgagccagggcggtcttgccggcgggcggcggcggcggtgcccgactaaggcaccgagcaaccggcgctacgccagatcttgggctgatccgtcgagttcctggcctcatgcgagtgaagccgcctttgggcgcagattcacagcaccgaggtaccggagctccctgatttgccgccatacagcgccgaccggagccgactcgcgcactccgatgagaggtttttgttaaggggaatggtcaatcagagaacgctgtgttttcaattgattttgtgttggtcgaggggagatcagcaatcgactctggcctaggagttctatcgccatggacgacgagaaaaagaggttcgtgccttttccttttcttttcttttctttttttcaagaaccaatgtgatggctccgcagagattgcgcacttagcaatattatattttttcttctcgtactagaaaaaaaaaatgtccgcattgcaatggaagccaatttaatttgtagatatgcgtaggtgaataaataattataatccaccgcttcgtttattatgtgcttattcgaattacagactttttgtgtgcaaatattttatatacatgttcttagcgactcaaaagcaaatgttgtaaaataaagtacaataaaaaaaaccaaaatgtcaaattcaagttataattttaaatttgcttatagcaataagcctaagccaagcaatgagacattcaaacacgagctcgatttatcgtttagctttatctcaagtcgggcaggaattgaaaacggacaaaatcaacaacttcgattatcctttattttggttggcatgctctttttgaaagtaaaaaatgattcttatgaattattgtaatgatatccctagtagtgcgtatgtgttgacgggtggtaccgtgactacggtattttacatggtatggggatcgttggtactagggtatatgcaagattgaggtaaaaaagatagagacaaggatttttatataggttcgggcaccttatctgacgggtaatagccttacttctgttgggcgaagccggtgttgctcttattcatcataatcacatcagtacaatatttggaataacctatcgagctgtcatcgacttggcggcatagataatcaactcgtagacgacggtagggtagtcttcctcctcgaatataaactcgtcgagatcagagatgacactagatcccttccttgtcacctagaagggaacaacgttgatattctatacaatccaactgtcggggttaatctcatctctgagtcatttgcattcgcttacctgggcgataaagctataactccaacaaacaaattcttcaagcactcgaatgaaaatatcattgaaggatttgggattgtgcaagacgtacctctctgctttgaagacagggaggcagtcttggattttcatgtttttgaaatcaaagattttgacatcctaatcggacttccaattgagcagcttctcataaatacgccccgattggacagcctcaagataactttttgagggaacgaattctcagtttcattcttgcgggcaatgttcaccttgaccgactctctcccatagaatgagtatgcggaggaggttacggcagttccccctaacaagtctcccaagacccttctggaaaatgaagtcctcgacttcatcaaagaggaagcggagctcggtgcgactctcgaactcccaatcatggaactgccacctcgaactccgcttgagcttaaacctctacctgaaggcctacactatgctttcttgcacaatgacaaagaagcccatgtcatcataagtgacaagctttatgaagatgagactcaacgtcttctttctgtgttagagaagcattgcgctgttcttggctattccctccaggatctcagagggattaaccccatactttgcactcatcgtatccctattgagcacgagagtactccctccagggaacctcaacgacggcttaataatgtgttgagagaagttgtaaagaaagatgtcctaaaactcctgcatgccgggattatttattctgttccatacagtgagtgggttagcccagtccaagttatgccgaaaaagagaggactgacggacgttgctaatgctcaaaatgaacttatcccgcaacgaaccgtaaccggatggaggatgtgcatagactacaggaagcttcacaaggcaacaaaaaaggatcattttcccctaccctccattgacgaaatgttggaacggctggcaaatcgttcctttttctgtttccttgttgggtattccgggtgtcatcaaattcccattcacccggaggaccaaatgtaacaccctgaaaattcgaccaacaaaatcaaaactctaagaatacggattttcaaaatctttttaaataaattgcatcatgccgattttattcgcatatttcattggattttgatttcggagttcgttgatcgcgaataaagaataattaattaggaataaaacctaaaattaaactggcaaaataaataattaaaatataatttaaaataaagattaggtgaggttggtaataaataaaaatattatcgcgaccatattagtatcaattaaatttaagtgcgatggaataagaattaactttaattaaattcaagtaaattatataaaaataaaatatgggtaatgttaatctagggcgaatcttttggttagagcaacacaaatattgagtaaacttgatttgtgcaaaagttagaatttatagggcgagatttaaatagaaaatagattaaattagggttaataaggatctagcactattcattgcctacaaggtgcttgatgtggtcctagcctagctagcctcaagccccgcgccgccgacgccgtgtcgtcgccgtcaccgcacgctgtcccattgatggctgccatcgcgcgccgtcgccatcgccgttgccgcgccgcgcgccatcccgttgcgccgtcgcgtcgccatgccgccgtcccgtcgcctcacgccgcgcgctcgccgcctcgcgccccgcgccgttgccgcgccgcgtcgccgtcgcgtcgcctgtcgccgtacgccgagccccgcgccgcgccgcccacccgtcgcgtcaccgctaccgcctgccgcgccgcgcgcccatcgccgtagccgcctcgagccccacgcgccgcgccgtcgcgtcgccattagggccggccacctctcctcgcgccctataaatcccctccccggtcaccatttcaccccacaccaccccacctcctcttcctccattttcccctctttcctctccaccgcgccgccgccttcatgccgccgcgccgccaccctcggtgctgccgcgccgcgccgagtgccgcgccgtgcgtcgcctgccttgcgccgccgtcgctaccgccgccgtcggtaagccgccgcccctccccttgttcggtcgccgccgccgccccgggtaggcagtgagccgagagagagagaggaagggagaagccgggagggagagaaaaagaaagaaagaagagagatgaaaagaaagaaagaaaagaaaaaaaagaatagaaaagaagaaaagtaaaaataaatagaaaattagggagagattaaggaggtttagaaaattaaaataattggggttagttgtaggtttcttttagttgtagaattgcaaaattttatataattatagaatattttggtaatctctataagtaatcaattcgcggtagaaatttagatttatttaagagctaaataattatgttgaattcttaggaatgtacttctaaatcacaaaaagacttaggatgaatgaacttaaaattggaatgaagtggttttgcaaactttgtagtcgatatagaaagatcgattcgcattcgacttttatttgagtttatttggatttcatttgaattctaattgagttcaaataaattcttcgcacgtacttttagaccctgagggagttgcggatccgagcgaggatcaagacccgcagaactacgagcaaggcaagtcatcactattctttgaacatgttgatcccaattgcgaaattattttgtttacaaataaaattgcatgcaatgatgaacatcctacttgtgattatgccatgccttgattattgtttaccccttatgccttcgtaaccatgtttacgtatgagtccctagttaattatgacaactgcttagaaatgctattctagaatcatgcatactcatatttatcaaatgctatatgcttgggcaattacctttgggaaggtaattgagatgcggcatgtggagacatgagcgccacattaccatgatgttgatgatatgatttgtgaaaggagaaataaaattaaacaactgttttcgactggggcggacggaggatttgggtggtgtccggaaaaggctagtgccgtccccggtcaattaaggaccaagccatgaagttaagcatgaaacgacccccgtacaaccgcacttcttgtatgggtatagacctagcggagtagatagctgagcggaggcagtatccatgcatagtggtttcttgatgtatgaggcaggggctctacggtggggcagccattggtaggaccgcgaggcgggtgtctacagtggtgtcgccatcggtaggactgccatgtgaaaatctaaacataattatatcttaatgcatgtgtgagtcttcccttcccgggtgcgccagaactcctctcactgctagaaaccgtgtatgcctagagtgcatgaggatgtatggttcatggagcgggtactgccaatgcgaggtctcatgtgttggggcgaagctcatgtgttgggcagtcgcggagtgcgggtaaagtgtacatccactgcagtgtgagtaaaccaaatctattcgaatagccgtgctcgcggttattgagcaccgggacgtgtattacacttggctagactctaaattcttaacttgtgtgggatgggttattgcatgatgattttatgctgttgcagccacttcctgagaggcgggaaggtggacgtcctcagaaaaccatgacgactcagtggcgggaagctatccttgggatcacaatggatggtggacagaaccgtcgttgtttaatgtgaacactggtactaaaatttgatcagtctatgctaggtcttaggcttgtgaaaagaattacaaaacttgctttgcgcaaaagaaccatagccatcctttgaatacccctatcatgtgcattgttgctgtggtggcttgctgagtacggttggtactcacccttgcaatatacaaacttaatcagaggccggagatgaagctccggaggatccctacgcttactactaggagggtgatggagacgatggcgctcagtaggtcttagttacggtcgttgcctgtggcaatggcgtgccgctgccttaactccgctgccttatctacttctgcttttggaatgtattccggaccgctcggtccgatgatctaagactatgcctgtgggcttatgatataataattcgcactagactctcatgtatgtgcgtttggtatttcagctatgaactcgtgcgtaccagactacttgatccagggaaatggtactgtttacacaggcgagtgaatgccttggaggttgccagtccagggatgacatgtacgataagctgccagcgatggtgccggattcccaagccagggatgtgcacaaggacatcttggtcgaaggcagaaggctctgcgaaatacttggaaagattccagagacggtgaacaagtggaagttgctttccgacctctgggtagagctgctcctgtccgtggcgccgtcggacaacgcggccagtcatgtccagatgctagcaaacggaggcgagctcatcacccacctctgggcaccgttgacgcatgccggagtcatcgagaagaggaccggaactgaaaacagtgctttccctgtctaatgtgtactgctcgtatcgtatcagctcattattcttttttgttagagttgtgcgtcgaaaatgtgtacaaggttggttatagtttagtacttggagttataccgagtgttaaaaatagagtaagagtctgactatgtcctaagaatctcttttaaatagagggatggacctattgtaacggcatggcgatttagtatagcaagagggaatggttgtccacagtgtcaggccatgagtcgttgtaactctgatacgctgttgtcagggttacggataagacatacctcctatcctacgacttatggaatacacggatatggtatgccttcacgtatacggatcattctcatatacgctgttggaatccatcacaaattatggaaaatatatctccacgagccaagtgatttccaaagtcctactcggaagggatagaagtccgagatagagtttttgttatatcgtacaagatccgatgtcttcgagttttacttggggattaaggtgatccacggtataaaagggaccccagggagaggtgcaaggcatcgaatatcatcaccaacacacccaccatagtttacgaagccggagtgcacggaaccaagtcgctaggagatctcatcggacacgtcgactacgatctcgatggtattgttagttccgtctacttctattgtaatctgtggatttcgtcatcaatcccatataaactgggctagggctattacttgacaaggggcctgaaccagtataatctttgtcttctgtttgcttgatgtcgtattacgtagatcctcattccaacgtaccctaatatccaaatcatctggtctacgagcatcactcgtcgacagtggcgtgccaggtagggagacttggtgctcaaagttctccaatatgacttcaagccctcctgacagcagtgcctagaccggcgtcgatccaggagctcctacctcgacatcgctggtgtggactcaagttggatctattgtcttttcggtctacaccgtctcgccaatctcgactagcccaatcaccatcgagaacgagaaaggtacggctacgactccgagaaacgacgccccgccggcaattcctcccacgcaagtagagaacataacattaacggccccaacacctagaaggaatcctcaagcggccgaattatgccctctgcacaagagaccagagccgacaaggatacccacccagaaaccaagatcttggtgtccagtccataagacatcaaagcatactctggaggattgcccggtgatactccatgtgaaggctgaactctatgcctactgggagtgtggaattcaacgtacttcacctacgggtgccacctactgcccgatccacaagtcgagatcacacgatctcacaagctgcaagatcttccttaggaccttcaagccaccgcatcatcgcgaccaacaaccacgagttcaagctcagtgtgttgccaaggagcgagatacagcggcgacttcagaccggttcgtgggctatgttggcaccaaccccaatgaaccatctatgctacacctgctggaagattacggatcctcttcagactcaccacgagatgtgaaagtggtcaataccgccgagacaagttcatccgcggtagcgggaacgcctgctcagcaattgcgaaacctcgacgcgatattgagataaagtcattttgatctggtgacaaacctagacgttgatcaatgggcagcacgattgcgagaaaccatggccaacctcaatagcgcagtcgcaaacgctgcagttgaactcgcaccgtgtgatccgccccgaggagacggtgaatcagttaacgagaacgcggaagtggaaaaccccactggagaacatccttcccgtgaccgatcacctcgggtagcccgagatcctactccaccacgtcgcgagaaccgtgatcttcatgaacgcctggacgaccggcggagggacagatgaaatcggaacgacaatgaccgtcatcggcgccgttctccctctcggtgaggagagaacacccctcattgatgacatcaccaccgcttcccttcacgccgaggaaggaatgatgatcgaggaggccgccctaacaaagaccgagatcggctggtccacagtgaccgtcgggatgacgacaacaacaatcgtcgtgacgctggcgacaacaatcagcgagaccagggggccgatggccgagtttaggacgacgtccgagatcaaaggttagacggcaacaataggcaagatcgcaactcccattctcccgcatctggtggagatcgagggtgcaatcaccgttcaagaagccgagctcctgaaccaagcgacccttcatcctcatcttcgttgtcttgttcctcggacagacctcctcgacgatgtcacaaccacgggccacctttcgtcccaggaggtgggtgccgagcattcacgcccacacttcgagatatacgatggcccgaaaaattccgaccaggagtgatcgagaaatatgatggaagcacagacccagaagaatttctacaagtctactacacaattctctacgctgctggtgcagacgacaacgcactggcaaattacttacctgctgcgctaaagggatctgctcgttcatggttagtccacctcccaccccgctcaatctcttcatgggaagacttgtggcagcagttcgtcgctaacttccatggaacatataagcgccacgcaatcgaggatgacctacacaccctaacacagaacccaggtgaatcattgagggactacatccggcgcttcaataagtgcaggaatacgatccccgaaatcactgacgcttctgtcattcgtgcgttcaagtcaggcatccgagatcgatacaccacgtaggaactggcgacacggcgaatcacgtctgctcgaaagctgttcgaaattatcgatagatgcgctcacgcagacgacgcgctaagatgaaaggagggatagagcaaggtgggtgttgagaagaagtcaaccaacagagacacaccagagtcgagcaagaagagaagtcgcaagagtgggaagtgcaaaccttcgggagaggtcctcgctgctgagcaggtggaaccacctaggtgcccaaacctctagaacgacgactcacgcaaataatggtgctctatacacaagactaacaatcacgccatggaagattgttacgtcttcaaaaaggagctcgcgcaacagctggcaatcgaaaggggaaagcgagtacgtgttgtcgagacggccgaagaagcggccaccctcgactccgactccaaattcccagaatacaacctacatgtctcgcacatcttcggcgattctacatcgtacacctcaaaaagggagtacaaaaagatagaacgcgaagtctgctctatgtcgcagggggctactgccaagatgatatggtcccaacacaagatcaagttctcaaaggcggaccaccccaagattgcaactacacctggtagatatccgatcgtggtcgagcccactattcggaatataaaggtagcacgggttctcatcgacggcgagagttcaattaacctgctcttcgctagtaccttagatgccatgaggataccacgaagtgagctaacgcccacagatcagtccttccatggaatcactccagaatcgtcatcaaagccgttgggtaaaatcacattacccgtcacctttggacaggacaacaacttctgaatagagtagatcatctttgatgtcgcagaatttgacactgcgtacaaagccatcattgggagaaccacactcgtgaagttcatggcagcgtcccattacgcttatcaagtgctcaaaatgcttggaccaaaagggacaatcactattcagggaaacgccaagttaacggcacaatgtgacaagcggagcctcgacatggtcgagcatactcccagcccacccgccacaattgagcatcccaaaaaggtgagcaagcccaacaagacgccgaagctagacggttatcgtcgtagagagggaaagagtacaatacctggtgtactaggtcagcgaggccctccacgatgcaaaaactagatacccacagatccaaaaactgctttatgctgtgatcataacatctagaaagatacgccactacttccaagcccacaaggtcactgtcgtctcttcgtttcctttgggagaagttgtcaaaaacaaagacgttgtgtcacgcccagaaattcccgaatagaattccaagcagaatgtgcattaaaatccccgtccaggaccagccggggtacacaaacgacaaagttgccatacagatccatgtcttacaaacattataaaagtcttacataaatgcagcggaaaaacaaaagataactggagctaagccttgacttgatctgcagcgggaacaccactcacaggcatcctcgacggcacggacgaagcctactcctcagagaaaccaccatctgacgcatactcaaactctggggtttggggaaaatagagcaagactgagtactacccactgtactcagcaagtcattttggaataggggtatgatgcagggaattatcaagggatagctataatggttcgtttgcataaagcgggcatttacaaacagaagttgaaagcagtaaaatagttgtaataattaatcaatattaatcatccactgtccaacgctataccccgttgcaacaggcccaaccatccacctatactattcaattccattagactagtctagggtgagtctaatcacggtgaatctggttgaccgcccataatcgcgggcacggctattcgaatagttttactctgatcagatgtgtacaaatgtacccacaagacacagccccacgacacgtttccgtgtgccgacatgccaccacgacatactggaaagaggccgtgacaggacccttcgcataaccccctctaaccaagcacaccacacctcagatttcacccccactccttgcaaggcagcgggcagtcccttctcgtgcctaggtgaatccggaagccgcataggctgtcgcagggcccatccaaactccatcatgcccacccttgcctggatgcgtcggctagaggaaagctacactataagcccagccgttgcccacgctggcttgtggtaagtacgaggaattcttctagggtttcccgcgaaccggtccttaatggtcctgggcgcgaccatcaaaaccatgcatccacggcccaccatttaatattaattaattaaccaacaccggagtggtgagcattaaccaacatcaatcctagaatctgatatctatgcatttaatgtagttccccattgtgtgctagttgaactaagcaaagctaagcattccctagtccaatctctagtcatgttatatcccaagctaacaaaggaacatggtacaagatagcatggctatgacagtaggtaaacatcccatggtgatattataaaacaatgcagtatttgaagaaaaacaatggagcatt

SEQ ID NO: 28834 - DNA, 18038 bp, Oryza sativa
ggccatggcggtgctcaccggtgaccggcccgaagttgggttccggcggcgggatccaacgaaaaaggggtgaccggggtggcccgcacgacggcgaacgcgacggcgttgtcggcgcggctcggcgtgtcggctactgacgaccggaacggtggcgtcgtcgtcaaaaagaagggcgatggcgctagggcgttagagggctcgggagggctcgacgagatggggaaaaagagagaaggggtggcggtggtgcttaaatagaggagggggagcccggacgtggccggtagaggcgggaatcgccggccgacgtggggaggtggaggaggagagagaggtgggattcgaaatttcgaatcccggccgtctcgggcgcgggcgcgtgcgacagggagggggagtaggtgcggaagacacggcgcatgcgctggcgtggctgacgtggcccggagaaggcgggaacgtgggcgcggcggtggttgtggagcgcgtcggcgccggctggaggaaggggatgggcccgataggtgggccccacctatcagcgaccccgggggagaggagggaggcggccggctcggctgggcctcgacctgtcggccggctcggctgggcgtcggcctgtcggccggcccagcggaaagaagggggggaaagagagaatgggccggcggcccaattgaaagaaaaagagaaaagaaaaaggaaaaagaaggaaaatggattttcctgggattaaatattgcttgtgctcaattttaatcggttaaaattatttctagagttatgagaattccactaaaaatcttgttagcgtttttcgacatgtagaactcaagaaaaattccacatgccaaatccgattattatttgcattaatttattagggttttctcttgctcttacaccggtattttctctggtggattataaattcaatttaggcttgggaaagaacttcagggtgtgacaaacctacccccctttaacggaatctcgaccccgagattcggaggagctggtgaagaggtgcggatgggcggcctttagctcatcttccctttcccaggttgcttattcatctgagtgatggctccactgaaccctgcagaacctggtgaccttattcctagtcctcctttcactggtctcaaggatacgaactggcttctccacgtaggtcagatcttcttggatgtcaatgtgctccgaatcggcttgttcttcgagtacccttagacacttctttaactgggacacgtggaacacgtcatggataccgatcatgttggatggaagttctagctgataagccacttctcctcttcgttccaagattttgtatggtcccacgaagcgtggtgccaacttaccttttgtctggaaacggtgtactccccggagcggagtaacacggagatacatgtaatcccctgcttcaaaagtgagttcccttcggcggttgtccgcatagctcttctgtcgagactgggcaattctcaacctctctctgacggttctaactttctcttctgcttccgttaacacctctgttccgaacagttgacgttcgcctgtttgattccagaagagaggtgtgcgacacttccggccatacaacgcttcgaacggtgccatagactggcctgatagctgttgttgtacgagaattccgcataaggcaggcttttatcccatgctccaccaaaatcaagcgcacaagcccgtagcatatcctctaagatctggttgaccctctcggtctggccatctgtctgtggatggtaggctgtgctaaaattcaaacgggtccccaattcttcctgcagcttctaccaaaattttgaggtgaactgactccctcgatcagatacaatcttcttgggtaccccatgcagacacatgatccttgtcaggtacagctctgccaatttcttccccgtatatgtggtatgcactggaatgaaatgagcaactttagtgagtcgatccacgactacctagattgaatcgtggccagatgatgtccagggcagtcctgttataaagtccattccaatctcctcccatttccattccgggatctgaagaggctggagtaaacctgctggcctttggtgctctgccttcactcgttggcaaaagtcgcagagtgcgacgaattcagctatttcccttctcatgctgacctaccagaacttttctttgaggtcttggtacattttggtgctgcctggatgaatggagtactgagtctgatgagcctcggtgagtatcaaatcctttagttccttatcgtccggtacacataatctttctccaaaccagattgtgccgtgttcatcttcgtgaaaatcctgggcttttccgaccctcatgttctttttcagctctgctatttcaggatcatttacttgagctgctctgacttgatccacgagtgtaggtcgtgcctcgaggacagccacgtacccgtattctacaagccccaagttgaggtgttcaagctcctgctgcaattctttacacatgccctcggtgcatagggcattgcagtagctcttcctgcttaatgcatctgccaccacattggctttacccggatggtaatgaatgctcatgtcataatctttgattaactccaaccatcttcgttgtcggagatttagatccagttgggtgaagatatacttcagactcttgtgatccgtatatacttcgcaacggttgccaatcagatagtgcctccagatcttcaaagcatgtaccaccgctgccaattccaggtcatgagttggatagttcccttcatgtggacgcaactgccgcgaggcataagcgaccactctgccctcttgcattagaacacatccaagcccgtggcgggacgcgtcgtagtagacttggaagtctttagtctggtcgggcagaatcagaactggggcggttactaatttctttttgagcttctcaaaactctggtcacactcagctgtccatttaaatttctcatttttcttaagcaactgagtcatgggtctggcgatcctagagaaattttcaatgaaccgacggtaataacccgcgagtccaagaaaacttctaatctgtgacacggtcttaggtggggtccacttggtaactgactccacattcgacggatcgattgccacgcactgagctgtaatgacgtgacccaagaatttgacttccaatagccaaaagtcgcatttactgaacttggcatataactggtgttcctgcaacttctcgagtaccagatggagatgtcgttcatgttcttcttccgatttggaatagataagaatgtcgtcgatgaataccaccacaaacttatccagaaattccatgaacactttgttcatcaggttcatgaagaatgcgggtgcattggtaagtctaaaagacatcaccgtgcactcgtacaacccatatcgagtggtgaaggctgtcttgggaatatcctcttcccggattctcaactggtgatagcctgatcgcaggtcgattttagaaaacactttagccccttttagttggtcgaacaaatcatcaatccgcggcaaaggatatttgttcttgattgtgacctcattgagtgcgcgataatcgacgcacattcttttcgtcttatccttcttctccacaaaaatgaccggagcaccccaaggtaaagtacttggtcgaatgtaccctttctgcagctgctcatcaacctgcttcttgacctgtgctagcttgttggttgccattctgtacggtttcttgtaaattggggcagttcctggtgccaaatcaatccggaattcaagttctctcttgggtggcatggtagtgaggtcttcaaggaacacttcgggatactcgcagactatggggatatcctccaatttctgcaaacccttctgctcggtggtcacagggttttccacttcaatctggtttaaggagattctctgctttggtgagactggtgacatgtacaccacggtctctcccttctcattggtcaaggtgactgtgcgattcgcacaatcaatgactcccttgaacttggtcagccaatccatcccaagaatgacatctaagtctttggattcgagaaggatgaggttggctagaaatggtgatatttgaatttctattagcactgaagggctataactgaccgaggttgaactatttcctggggtatgaaccctcattggtgtactaagcttttcttttcttaacccatgcatccccacaaatttctttgaaatgaaagaatgcgttgcaccagaatcaaaaagtactgtagcagggactgagttgacagaaaacgtacccagtacaacctctggtgctgctcgcgcctcctctgcggacgcgtggttgtcacgagcctggacaaaccttggcccgacacgccttggcttcgggcatttgtcagcaaagtggccaagctcgccacagttgaagcaggaccctggctttgttccagtctccttcttggcttgggcggatggagctgactgtgctggtgttattggtgggcgcggagctgctctgcggttgggctgacctccatggtggttctggctgccactggcgccctggtggaagctgctcgagttgaaagggcggtgctggcggacgatcatggtggtaggtccactttgctgtctgggagtgaagcgcggtcgcgggtggcttccttggttggaccggaattgcgctgcctttctcttcctgtccattttgttgcactgatcctcctgatggattgctttgtcaaccagcttctcaaaatcggcgtagcctccagagattaactggttggtcagctcgtcatctaggcctgctaggaatttctcctgcttctcggcgtcagtgcggacatcctccgatgcatatcgcgctagccgattgaactcatggagatactcagtcactgtcctgttgccctggtggagtgcctggaactcccttttcttctgtgccacaaccccgtctggcacctgcgccttcctgaagttgcgacagaactccgcccaagtgacttccgtgcctggcgggcgggtagccatgtgattgtcccaccaagctgacgcgggaccctggagctggtgtgtggcgaaggcgaccttctcctgatcattgcactgcaggagatttagcttcttctcaatggcatggagccagtcattcgcctccatggggttggtggtgctagagaaggtgggtggcctgacgtgtagaaactccggcagtttggactgagggggagggggaccaaactattgctgttgctgctcggcttgctactgcatcctctggtgcatctgctggtgctggtgctgcatctgttgcatcatggctgccatcatctgagtctgatgagccattacttgggccagagtcggattctcggggagcagtggcggaccattgccggagtcgctgttgggatgcacaccatcaatgcgttcttcgccgttgctgccctcgcctgctgtacggctaccattcctggtgtagaccatctggaggaagagcggacggaggggggggggaaagaagagaaacaggtgctcaggaactaagctttattatataggaatttaaactgcaattgttctgatctgaattaaaatacttaaaacagcaggcaaatccttattatgacagccatatcataggcacatgatattgaccatcgactgacccccaagcgaacagacctaaacacacaaactagcagacaaaaactaagcagtcgataaactaagggaaagcgagcctaatactcggaacggctcctgcggtcggtggagtcgagggcgtcctcctgctcgtcaccacgtccctctgagcggctcctggagtttggcagatacatctcgccgctgcccggctccgagccactggaactgctgctgctgtggtcgcggctgccactgggagtagcaggcaaccaacccccgttgccactggctggacccctggcggctaatgctggagcgaaggagagagcggacgcgggagctgacactgggacaggagctgggactggagctggagctgcaggagctgcgggaactgcgggcggaggtgggttcctgggcgcaagctgaatgcgcacgggtgccgtcgtcgacttgcggggcgtgttgcggattcttcaactgagcattctccttctttaggcgtgcgatctcatccttcttcaggcgtgcgatctcatccttcagagctatgatcctcacgagcttcccgtcattcaaggccctggatgccttgcgcagatccgagtgcatcctgtccattcccctcatcacggcacacatatgaccaaaggtggtgtcgttctcgccggctgtcgaacggaaggtgctgacgtcgtcgccacttgcttgacgagggtgaaaccggtacgccgtgttgcagaagatgtagttgtggcgctcccgtaatctggccatcatcaggtatgctgcctcctgacaggcgtgatctgctgtgcctccggatgcctcaaccaccatgttagcgaggcaggtatgcacatagccatgaacctccaggcgaacacggtgagggaactcgccactgagcggtggaacagtcgaatactctggcgcattggggtagcccaccaccagtgtcatgcgagccaactctgccacaaagtcatccatgccttctccgcgatggttgggtgggtgatcggccatctagagaagacaaaggggtaggatcaatgcatgctcaaatccaatttaaatgaaagagtaaaagactcaattaaaataagcgaataagagtggaattttatgcatagatcatttttgcatgaaggcgaataaataagacgaacttacatagcgataaaataatgagaaaattagatacatactaataataataagagcataaataccttgcaacccatattcctgagttaggacctaatgcattcctcccatcaaatcccgactgactgtcgaataaatcccaagtaattttactaaaagcctagactgacctggtttggcaaatcccacttaaacgggcgaccaaaattttcccttgcaccacaagaacagatcccaattttcctagaactaatccaattgcaaagaacatatgcaatgaaaaggattcagagggctcttaggtttttccatttggcttgtcctacggcccagaaattcccgaatagaattccaagcagaatatgcattaaaatccccgtccaggaccggccgaggtacacaaacgacaaagttgccatacagatccacgtcttacaaacattataacagtcttacataaatgcagtggaaaaacaaaagataactagagctaagccttgacttgatctgcaacgggaacaccactccacaggcatcctcgacggcacggatgaagcctactcctcggagaaatcaccatctgacgcatactcaaactctggggtttggggaaaatagagcaagactgagtactacccactgtactcagcaagtcataccggaataggggtatgatgcagggaattatcaagggatagctataatggttcgtttgcataaagcgggcatttataaacagaagttgaaagcagtaaaacagttgtaataattaatcaatattaatcatccactgtccaaatagttgaccacccataaccgcgggcacagctattcaaatagttttactctgatcagaggtgtacaactgtacccacaagacatagccccatgacacgtttccgtgcgccgacatgccaccacgacataccggaaagaggccgtgataggacccttcgcataaccccctctaaccaagcacaccacacctcaggtttcacccccactccttgcaaggcagcgggcagtcccctctcgtgcctaggtgaatccggaagccgcataggctgtcgcagggcccatccaaactccatcatgcccacccttgcctggatgcgtcggctagaggaaagctacactataagcccagccgttgcccacgctggcttgtggtaagtacgaggaattcttctagggtttcccgcgaaccggtccttaatggtcctgggcgcgaccatcaaaaccatgcatccacggcccaccatttaatattaattaattaaccaacaccggagtggtgagcattaaccaacatcaatcctagaatctgatatctatgcatttaatgtagttccccattgtgtgctagttgaactaagcaaagctaagcattccctagtccaatctctagtcatgttatatcccaagctaacaaaggaacatggtacaagatagcatggctatgacagtaggtaaacatcccatggtgatattataaaacaatgcagtatttgaagaaaaacaatggagcatttgcaatataggatcaacatgttcaagtgacaagcatgacttgccttgctctgcagctgaaggaacttcggcgactatttcaaggtacaccagagcgtcgggagagccgaaatctaagcgacatacaaagcaaacaatacaaacaagctataagactactgaaacagagaacaaaaccatttttaatggattctacacatttttcttgatttactgagacatgaatgggcttaaacggagctcggatgaattagatatgaattttagaagattcactgtgtttttactataaacagaaaaatccttaattgaattattgcgcaataaataaatcccgggagagagagggggcggcgccgacatgcgggccccacatggcagtgactcgaggagggcggtccgcggtggaccgagtccacgaaccgggaaaggacgacgcaccacgtggctctgacgtggcgccgacgcagcggccacgcggcagccacgtgggcggccgtacggacgaccccgatctacccaagggtagattggacggcgggtgtggctcgcggccggcgtgcgcgggcacggctcaagccggcccggcggccatggcgcgcggcggctagcggcgcgcatgcggcggcggcgcgagacggcgaccggccggcggcggagggcgacggcatcgcggcgacgcgggcggcgaagcggcggccaagcggctaagcggcggcgtggcggctagcggcgcgggagagagaaagaggaaggggaggagggacctcaccgacgacgaccgacgacggcgagcaacggagggcggcggcgacggtgggacgatctctggaaccacctagcgaacacggtggaaggggttagagagggagagggaattggaagagggcgaggacgctggccgaaggcggcggccatggcggtgctcaccggcaaacggcacggagtgggtttcggcggcgggatccaatggaagaggggtggacggggtggcccgcacgacggcgaacgcgacggcgtcgtcggccggctcggcgcggcggctagcggcgaccggagcggtggcggcggcggcgaagaggagggcgacggcgctagggcgttagagggctcgagagggctcggcgagatggggaaaaagagagaggggtggcggtggtgcttaaatagaggagggggagcccggacgtggccggtagaggcgggaatcgccggccgacgtggggaggtggaggaggagagagaggcgggattcgcatttcgaatcccagccgtctcaggcgcgggcgcgggcgaaagggagggggagtgggtgcgggagacgtggcgcatgcgcgggcgtggccgacatggcctggaggaggcgggaacgtgggcgcggcggcggttgcggtgcgcgacggcgccggctggaggaaggggacgggcccgacaggtgggccccacctattggcgaccccgggggagaagagggaggcggccggctcggctgggcctcggcctgtcggccggcccagcggaaagaaggggggaagagagaatgggccggcggcccagttgaaagaaaaagagaaaagaaaaaggaaaaagaaggaaaatggattttcctgggattaaatattgcttgtgctcaattttaattggttaaaattatttctagagctttgagaattccgctaaaattcttgttagcgtatttcgacatgtaaaactcaagaaaaattccacatgccaaatccgattattatttgcattaatttattagggttttctcttgctcttacaccgatattttctctggtggattataaattcaatttaggcttgggaaagaatttcagggtgtgacacgttgtcagccgcattgccaaatgggtagtcgagttaagccaatttgatgtccactttgtgcacagaatagccatcaagtcacaagtcttagcggattttgtagccgattggactatcccagatgacacaccgaccagtcaaacagacaacgaaacttggacaatggcattcaacagtgcactcaacagccaaggagctggaaccggatttatcctgacatctcttacaggagatcagttcaagcacgcaattcacctcaatttccgggcaacaaataacacggccgaatacaaagcgctactcgtagagataaaagcagctgctgcgcttggctcaaagcaactaatcatgaaaggggattccgagctagtcgtgaaccaagtacacaaagactacaagtgctccaacccagagttagccaaatatctcgtcgaagttagaaagctgtaacatagattcgacgggatcgaggttcgacatatctactgaaaagacaacatcgaaccagacgaccttgcacggcgcgcttccagacgagaaccactcgaccccggaacctttttagacatccttacaaagccttctgtcaaggacatgcacaacgaaagcaccacagccaacaccgacaacaggccgggggctacaaaggtcgcatatgtcgtcgcaaacatagagacaacagacaactagcgcatcccgcttatcaagttcctagagtcagatgagctactggatgacgacacggaggtagagaaactatcctgttaggccaagatatattgtttgatcggtaacgacctatacaaaaaggccccgaatggcatcatcctcaagtgtgtatcattcgacgacggaaacgctctccttctcgacatccacgaaggcatttgtgaatcgcacgccggtggatgcaccttggttggaaaggactttagacaaggtttttttggccaacggccctcaaagacgcctgtgatatagtgcaacgatgcgaagcctgccagttcttcagcaaacacactaagttgccagcacaagcgcttcagactattcctctgacatggctgttctcatgctgggggcacgatatcctcaggccatcccacgaggacagacggctatagattcctgtttgttgcaatcgacaaattcactaagtggattgaagtagagccaacaaatcaaagccgacaatgccataaaattcatcaaggggatattctgcagatatggattgcctcaccgcatcctcacagacaatggctcccaattcaccaacggtgattttcaagattactatattgaactgggagtcaaaatatgctttgcctcagtatcccatcctcagagcaatggacaagtcaaacaagctaatggaatcatactccaggggatcaaaactcacgtgtatgataggctcatggcctacgacacaaagtgggctgaagaactccaatcggtcctatggtttgtacgaaccacaccgacttcgtccaacaaagagacacctttctttctcgtgtacgtatcagaagccatgctccccacagagctacaacatcaaagtacacgagttcggaaatactctgacgaagagcaagtggaaaggcgaagcgacgatgtgaatctactcgaggagcatcgcgaacgagttgccatccgagcagccttgtatcagtaggccttacgccgatatcacgagaagcgcatcagagctcgtacacttgccatcggcgattacgtcctccgacgagttcaaaaccaggcagggcggaacaaactctcgcctaagtgggaaggaccgtacacggtggtacaagtcttatgaccaggtgtgttcaagattgcagatggcgatggctgcgaactatccaactcttggtacattgaccaactacgaaaattctatgtatagaatcaatgtatccaagtctgtaagcatcccttacaaaacatcatatcagtaaaggtacctaaaggtattttgagttcttttatgaacaaaacatttctaacagtgttctacccagagatcccttaccacgataatatctcatgttgaaatcaaacctaacgaccctttacgccattctaacaagcctctgagaaacctacgagaatttcgactggggacgaccagagcagataaggtcttgtcagaatttaagagctgaacgaccatgtaaaacctggtcatataagagtgctcaatggttgcgtattaactaagccatgtaatcggaaattgacttttccaacttcacgactaggggctaggtaaatcgcagtttcaactaggcaagtttcgggtcgctaagccttctcccccgagaacgattttcttcgaggacaagattgggggctagggagagttcccagctcgatagcaggcaagaaacggcttgtacagagagtagtactcatacacacaataccttgcttacacgcttagtagatagagttcaatcctgtttacagagcttaaataaaaatatccatagagtacaaatctttttctaggtgtttcttttacaagagttgaaatctaccatgacggccattgccagttgttgatgcgaaaaacacacactggcctggaaaatatgcttaactcctgtgcaggtccaaaatcttgcctttaggttcgtgagcgtgccagttgatttgatcctgcaatcaacaagaataaagacaagaaaaaccgtggttaaatccataaacgatagccgatcggctagttgccgatgacatatcatttatcttcgtgctgatgtcatgtttgaatcgatcggcaataatgaataaataagataaaactaaatctactcgatcggctgtagatattaacaacatacaatttttactttgatatatacttaaactaagtgattggaatagatcgttcgccatgccgagacagtataaatcacttaagtcgaaatatatattagagcaaagattatatagatgtttacaacatagccgatcagatagatctagcacgtatcggctaatactccgatactactttatactaagatatcgaaacaagcaagatatattaaataatgaacctaatataacttcaatgaaacaagatcttaatataaagggtagatttagcgtaacaaataagcatacgagacgtaaaatagctaaaccaggtaagatcggttgaaactccgatgctatctctattgatgattataaaacaggctagatatcacaatttcagatagaacttaatagatcgaactcaaccgatgcagcattaagcataaagataactgtaagatctaaacaagatgatgaaaaccttttagagatggtagatacacgatataatctagatcaatgacgaaatctaactctatcggctactccctatcaaaagaaaccagccgatgacaagttatatagcgcaactaacaaagattataaagtatatgtgataactcgacgaattacatagacaagattagagtttcataaagatggaagcactaatcccgagaacacaaaccgtcatggcaagtttacctctagttgaagatcgaatcgatgcagctcaacccgaaagcaagaactcgtcgaaatagaacgaaagtaaaagggtggcgatacgccgaaagtgttattgaacatgtgttttttgattacatgggttcgggtcatattaatacccaagatacaaaatatgtccttgccggacacgactcttatctctaacaaactctaagataccataagtctttgcagcagacttttgcccaaacatatctctatggaaattacataagttatcataattaatagatacaattgtctatctgagagctttatgtccattgtggcaattctcatgaagcacgttgatcgatcctagaaacagctttgaaaccaactccatcagaatccgctgtgccggctccatcggctgtaccggctccatcggctgtatcaaccatcccctaaccgatccaacatagccgatgccttcacagctgatgcacactctattcttcaacatctctttgccgaatccgcttcgattccaatgtcggacctggttcatatcttaccaaatttggtcgttaacaccagttcatggacgcaaagatcttctcagccaaaggagcaagggaacacgccagctgatcgagttcattcgccgacaaccgcgaagggtgaaacccttcacgcaggaactcgaggttcatctgcaagcaatgatctcggatgcaggcaagcacgtggtccccggcatatcggctggcgtggcgacactcctccttcaggtagttgttgatctgctggccaatgtctcctcaagctgggcacacgcgctcttcatccaagataggtagcccgccgtggtctcctcgggctctgtgcgatcaatcttcagctggcggcagacctcggccactgcactgcagcaactcttgaggtatgaattcaaccagacttcgcgatctcggagcgcttctacagcttgacccttctttaccaccaccatggaccattcgaactctgccacctcaaatttcgtttccgacaaaggactcgacgatctcgctcagcaatcatgctcttgaggtctggaaaaggcaagggtttaaggaaattctcccatgaggacatatgtctggagaatgcgaaaaacctaaggcaacccacttgagttctcttggcggagcgaaacacgcgcccaagcccgatgggtcagagatgacattcgtgttgtctaacacgacaatgtccccgacaacgtcagaagcaggtgcctcgctcagcaaggccaaatcggttgtcacgatatcagggcgtccgccttgctggacgtcctcggcatcaaaacatctacgaagaaaaaggacgctacgaattaacttaccatgacatcaaaagggatgactattctaccgtggacaaaacaaacccaaagtgtttatgcaaaagacacaaggatacaagaaaggaaattactcctcaaatagaggggggacaatttccccgagatccgccacgtccgacatctcgtcctcacacgtggcatcggctcccccttcgacagtatctctttcagatcagcgtcaggaagggcgagcttcacacacgcgagcacctgacaagcacccgtgtggatcccgttggagatctcctccgagactttggcggcgtgtttggaggggatcacttccatcgcctttgccagcttggacagggatgacatcacggaggtctcgtcggggtactccgggatggtagacttgacaccacacatgagagcaagctggtggaggctggtgaagctcttccggagcgactcgcggatggagaggatgtgatcctacatgtcattcatccgctgctccaagccttgtcactgcatctcgttgttggccatgatttccctcatcttctaaaggtcatcgcgggcaacatcgagttccgactctagctgggccacccgcccatccgacgctgtagcacgggcggctatgtggtccatctcggcggccacctcctgagaagccgtttcgaggaggcgccagccttcggtcatcatttgtgaccaggtcaatggccccgtcggagtaggaggcggcggtgcagccacgggcatgacggcggacgggatggattcggcgacaacagctgcggtgtccacgcaatgagaagcggcagcgggagtcacgctggtcgcgacctcatccccgctctgtgcagagatcgctgaggccgtcccgccgacatcagaaatacactcaaaagaccaatcaacatgacaacaaaaggaggtccaggattccacttacctgctagcggctctctttattatcctcctcttcggaggaggagggagacggcccgtatcctgagtaagatggaaaatcaagatctcacccccattgccctgcaaggataaataaggtagcaagatagggatggaatggcctacctcggagccgctggatttctgacgagatccggggccgccgatcgtacgagcccaacctttcctcttgagcccgctgccttcagcgctacaggtccagaggcgacggcagcgacttcctccacgactttctccttgagagaggaggaagtctaatgatcgacaagggggcctatgacatccgtcaaaggtagaacctgcgggagttgaagtcacttcgtctcccaacaaaatgaaaaggcgaaaggcgttcggttcactcacattgatggcgtccaccttgtcggccgctgacttgtagcagaggggagtgggcagttcatcggttgccgagacggggctgatcagcacgtctgttgacggtcgttatcgatcagtttcgatcatcaatattaccaaaatagaggagaactagttatgcttgcaatgcatatccttgttataataataatattccactagtattaggtatattgaccttttgcagggaataaccataaagtggaggagaatcaacatcaacccagacgataaatcaatcgaacgatgtcgagaatcagacttatgcatgaatgggccaaaaactcagaattgacacgatcaacgtccctcacccgctgcatcacgacatcggcggaaagatctgaaacgcaaggaaaaaggtgaagatgggtcaaaccgagaacacgagatagctattaaagagaagacgaagactgcaacacgagaacaagtaccccgcgacgagatccgtgtcacgtccaaatccccctcgaaatcgaacgcggggtgggcgcgggcctggagtgactggatgcgccgggcaatgaagtctcgagcgacatcatactcagtcaacccttgttctcgcaggccaccgatgacattaaggaaggcctcaagtgaaggggtcaatagaggtttggaggtccagcactcctgacgctttggttggtcctcaggcacgacaagaaccggatcgagttcttcaagctcaagatagaaccacttcgatcgccatttggtccgggatgtatggcattgaaagggtatgtacctcgctttcataccgtcatgtaagcgaaacccacaacatcccgagaccctgccagtttccatccagtggagttcataaaagaatcggaaaaggtccaagaagggcactaccccaatgtaggcctcacaaagatgagcgaagatgctcaggaaagcaatggaactggggttgagatgtagaagcgtgaggccgtagaaattcaggatcagcaaaagaaattccgaaggaggaggcaaaaaaccacaatggatgaaatcctctaccactaccatacgacctagggcaggggagcgatcagcacctcttttctctcttgccatggtctgtttggaagggagggctcagtcggtgtgaagcttcttctagctagctgcgtcggaggaagacttgccgaggtccgccattggaagaggatcaccggaggaagatgaagaaacttagggcttttgggagacgaagggttcgaggttgctagaagactggaggattttttggaaaacagacttgaaatggatcccaaaacccctttaaataggcgcactacctaacggttcgcattccaaggaaggagagagattgccgccgaaaaatcctaaggcccgttaagggcggttgttcagacttcaatttaaattcatattcaaaccgttggactccctctagcgttgttgacgactacctgtctcctcggttttgcgccgagatcgactaagtacgacaaggcgctggcaggagaagttgcgagcgacaacgtgaattc

SEQ ID NO: 28835 - DNA, 10690 bp, Oryza sativa
cttaacccatgaaatcatttcttttttgtttctttcttttccctggtttcttttgtttttttctcccttccatggcattatccggtatggctggttgcgttgtgtaaacaaattcttattcttcaaatataatgacgtgcaatccttttgtgcgttcggaaaaaacccatggaatctaacttattgtattcatagttataattaccatattcaagtcattaccagaggatgaaaggtgctcatcagagaataggaggtacatgaacttccatgtatatccacgttcgtgaattcggcttgactttttttttggtttgttggaaccatgccaccctatatttgtaaaatttgagatatgctacccgtatctcaatgacatgtaggacccacatgagtcaataacatgtgggtcagggtggcatattcacaaattttgtaaattttgtgtggcatggttcaaattgtccccttttttttaaggattacaggtgactaaaatctagcaatatcctctgcactggttactctgggagtagttagtttcacttattattattttttcgaataagagtttcacttattaattaggccccggcatttggtaatgaaactaattattaatcacgcggagttttttgcttcaccgtttaaataattggatgtcgatctcaagaatctgatagagctagcacatgatgatgtatatactacccccgttttttaataaatgacgtcgttgattttttctcacatgtttgactattcatcttatttaaaaaattgacgtaattataatttattttgttatgagttgttttatcactcatattactttaagtgtgatttatatcttatacatctatataaaatctttgaataaaatgaatggtcaaacatgtgataaaaagtcaacggcgtcatctattaaaaaatggagggagtatatcgatgccgacaaggcgagatggatcaggttttccaaatgttcagatttgtgagccccagcaattaatcatgcatatatatgcatttggtttcatacgatacacacgttgtcaaacacatggatgaccctgctccggaacgcaatagcaaaagaaaaaaaaagtctcatttctttctttattaatgctttgaagttgttgcgtattagcctagatatatatgtaattaagttgtcataattttattgtgcacccagatggcaggactaatacgcaacgaaagagaagttgcaggagttaaaggcaacttcttttttgcggggggaaagaaatatattactcactcataaagttctcgcttaataaatgtgagataagattacaactctctcccaaccaaaatccagcaagaaaatcagctctagccgtatttgcaagatgatggctaatgcaattctggctacgacatattttcttaatagaaatcaccctttcacccacaagcagatgcctcacttcatgaatgatgttggctagaacagaaaaatctctaccggtaccctgcagaagctggaccactgaggcacaatctgtttccacctgaatcggaagcaaagtccaatggatcgccagcttaagcccttcaacacaggcacgcagctctgattctagcgggttgttgcatctttcaaggggtttgcaagaagtgaagatgatatcaccagcgctattcctgaggatcattccaagaccccccttaccggagctagcgtcaaaggatccatccacatttaatttcatccagccatcttttggtctctcccagcatggttggtgattgttaagcactcgatatttaggccgttctttcagaggtacagtcctcacgacatgcttttcttttatcaggtcagctagaggagcttgcagtttctggatcagtgaatcgacatagctctgcataaatctctgtgacgtctccgtcggcggggctgacttgccatgtattagctcattcctcacgtaccagttgcgccacagagtcatcaagaacatggcctgttcatattctggaattttttcaaggcaatcaaacagccaaaaccttcctaaaacagaggcctttatatctactgaaacacttcccgatttatgcatacatgaccaaagctggctagcttgaatgcacctgcagagagcatgagcatcgtcttcattttccctgtcgcagatttggcacatatcagattgttccaattttctcttctttttatttaccatggtcgccaggcagttggaggccaccctccaagcaaagattttgaccttttgaggaaccttgcatttccaaatcatctcccatgctttgttaatattatttgtcccagagctagaactttcttttatattcactaactgagctgccaatctgtaagcgcttcgaactgagaacataccgttcttattagggtgccaggcaatgaagtcttcctccgatcttgaagaaatgcagatgttcagtataacctctgcatccaaattatggaaatactgatggattttcggcacatcccaggatccatcttctgtaattaggtcagacacccactttagtctgcagtttgctttcccagtgattggtcttcttgagtgatctcttggcagccatggatcccgccagatccgaattgaatttccattacccactctccaaataatgcccttttttaacaaatctaggccatactcaatgcttctccatgctggggacgagttactcccaaaggaagtgtcaatcagggaaccatgggggaaatattttgctttaagaactctagcacacaggctatctgggtatgttatcaacctccatgcttgccgggccagaagtgcctggttgaaaagccgatagtctctgaaaccaaggccacccaagctttttggtttcgttaacgaatcccaggctttccaatgcatttttctctggccgttcatggaatcccaccaaaagttatttgttagtttcgttagatcatcaataacagattcaggtaatttaaaaatccccatcacatatactgggatggcttgaatcacagccttgatcaacacttcttttccacccgtggagagatggttctcaccccattggatcactcttttccaaatcttagcttgcagactctgaaaacgtcctttgtgcatccgtccctccggggtaggaaatcccagatatctatcttcaaacctgtctctttccacttgtaaaatttctgatatagcctcactgacagccggggtcgaggctcctcccatgaggatagaacatttggctgggttaattaattgtccagtgcccatggcataggatgagagcacttcttttaccacttccgcctctctttggtgtgctttaaagaataagagggtatcatcagcaaagagtaagtgggaaattccaggggcagctctgcagactttaaaaggggtcaaagaattctgggccaccttttccttcagcagcaatgacagtccatctgccacgaacaaaaataggaagggcgagagaggatctccttgccttaaacctctagttggagcgaatgattgaagtagggttccattgaattttaccatgtatctcaccgaggtaacacacttcataatccagttaacccatcggcgagcaaaacccaacttattcattgccatctccaagaaacgccaatccaccctgtcgtaggcttttgatagatccagtttatatgcacaagctgcgtggtttgccttcttgttcttttgcatagcatggaaacattcaaaggctaagagagcgttgtcagttatcattcttccctgcacaaaggcactttgttccacagaaacaagatcatctaggatcggtctcaatctgttaaccaggcatttggataccactttgtagacaacattacataagcttatcggccgaaagtctcgcaaatctactggttgttccttcttagggataagaacaatggccgtatcattgaccccttcaggcatcagtccagtttggaagaaacggcgaactgcaccgattatatcagctttaattgtgccccagttgcgctgatagaacctggctggaaagccatctggaccaggtgatttcaggggcccaatttggaaaattgcctgagaaatttcatcctccgtaaaatcctcacaaagcttctcattcatgatatccgtaaccttttcctggataagacgagtaacggtttcaggattaagatttggatcagcagtgtacacatcctgaaaatattcagttgccatgctctccaacttattgtcgaactgtgaacagttccatttgcatcccgtagtttggagattttattcttctttgctctccatactgcctggctatgaaaaaatttcgtatttcgatccccatcctttagccaattaactctggaccgctgcagccacagcatttcctctctgtacaacagctcgttcatatggtctgtcgcattgcgaattaccgttctgtcggcgtttgattctataagttccgccaattttttccgagccttctccagttctcttcctacatttttcactttggctctgctccaagatcgcagcgctgtcatgacctttgccagggctttgttgatgtcttcgagatcagccttttctcccgcaactacccaggcttcctcaattacctgggtagcttctggttccctctcccacacaatctcataatggaggcatttctgacgaagttggtggggatctttcactaccaggttcagcaaaattgggcagtgatcagaacatggggagacaagatgcacaacctgagcggtagagtatatatctctccatttatcatctgccactattcgatcaagcctaactttaacattcctccatccctccctcttattatcataagtgtgtgatacacctttaaatcccagatcatgtaattcacaatcttgcaggacatcacggaaatcctgcatttggggttcaccccgtggggttcttgagaagtgttcaaactgccacatagtttcattaaaatcaccaatgacggcccagggcaaggacgaagattggtggattgttctcagcaacgaccacattcgatgtctattctcaacacggggttcaccatacacaaaagtaacatgccactgtggttcctctggggacaattgcacatacgcatcaatatatcttttattaatatctttgacatcgactaaaacagactcatcccaatacaaggcaagaccaccactcataccttcactgctaacaccagtaaaacccctaagacccagtctccctcttaagcgactcatcttctccacactttgtctagtttcacatagaaaaaccagtcgggaactcgcctcctttgataaggcacacagatctcgaactgacgcagggttccccatcccacggcagttccaggctaggcaactcatttctcctggcgagaccctctcataggtcccgccagtttaccagcagcccctgggctggttgcttccatgtcttccacgccaatgtttgcctccactcccttcttgagcctcttcattgcccgtgttgagcttgccgtttcctccgctcctctctggccatactccaaaacagcctgctggacaatgcctgagctctttgttgtcggcaaagctttcctctttgttgggcttccaaattcttcagtagagccatctccaaaggaaacttgctgtacattcaggtctctaattgctgggatcatctccattgaaggtattgagctggtttccttactaaccaaatccttgcccttcttctgtccaaggcttgacacctccgagacgtgcagcatatttgtctggtcagcaagttgactatctattgagtcttcaccttttccttctctaatatcaaaaccatcaaaagcatccacccttgtgggttgatcttcatatctcttagcatcctgtctaatacccgctgacgaagaactcacacttcctgggcccctgaaagacaattttctctgaacaccttgagaatgaactgcttttactttacccacttttctctcaaagggttttaagggcgaacaacggagttcagcagaaaatactaaaggctcattctcatttgtcagtctcttttcgcattctttatctgagtgtccgataaacccacagaagaaacaaaagtgtgggactctttcatatcgaaggtgaaatctgcgagtctcctctttgccttgcacctttatcttaatagctagcattcttcttagggggcgattgactgggagatccacccgtatacggaagaaatcatgcttattgcatccatcctcctggacatccacttcgcgaactttgcccatcttactgccatagagttcacctcttgctctgttcatcataactaggggaaggtcatagatcctgacccaaatagggactgtatccaagttcaccatggaagggtttaacaagccattaaactccgccaccaataaagcatctcctctgtgcaaccatggacctccttgcagcacgaaattatagtccccttctgcattaaaagacacaatgaagaggttatcctttagggacttgtaactcatctccgcccgcaaacgccatgctcttctcatatcctcaaacagagccgactgattaggaaacttgagcgagtagaacctcgctaggatcgtccattgaccggccttctgaacttcgttctcttcgatttcaatttcaaccgcatcctcctcctcatcgacaacctctccttcagtgaaaactgtagggccttgactgctcaggttattacttgccaacccaccatcatgatttccagacgatggcagcactcttgaacctgttgcctgatcatgtatcccatccacgctttgattcagaactagtacagcttggagttcagattccaacctgctccctgggggcaacgacgacgcaccggaaggcttcgggtgggcaactatcgcattgatagtcccttgatcacccccaccctcggcagccgccatgaccttaagcacaagggctagatgaccgaaccctagattgaaacctgcactagatatctgtgacccgagagatatttttgattttatcccttccttgtacctgaatttataccccagcagctccgagtccttttctttcacggttgatcgccaaaacagatccacatcaatgatatctttggtgtgacccctgtagaacttgccgtaccagaatttgacaacaggcgtaattctaccaaacttcatatccgccctcctcctcggattaggattccattgtcccatgataagcctccatcctgcccgatgtcgaaaagcattaggccagatccaaccagaaccagcacgattaacctgatcaccaacccaattacagatcgcagacgtgacctccgcagactttctgagcagatcggagagaacctccatccagatcctcctttcatgggaggagaaggctgccgcaacccagtcgcctgggtgccgcccagaccctaactcacgccaaaacatgtttgtacaagttaaaggcaacttgaaaacaatataggagtatatgaccaccaatcaaacttaaatcactgaaatatcgcttacctttcatacattcatcagttgtctggataagagtggataaaaagaaaacctaataaatgttaatgtgatgaatttgatgacaatgaccccgagttattttttcaaaacacggaagatgctcacatacattgatgcacatacacgcgcaccacctataaccataccggagagactgtcatttctcaatattgacaaatttattaccacagatagcaacaataaaatttaaaaaataattaatcgtaaatacgagcacgtgcatcagatataaaacttaataaaaacttagattgatagagttacagttttttttaaccccgcagtgtatacttgtattaaaggagaggaagccactgtatagtagccttgaggctaagagttaccgttctagtcaggggcggatccagcgtggggcggcggggtctcgagcctccactactactgatgtaaagactatgagagcccccacaaagaccccactaaaattttttaccatatataactttatctaggtttggtttagacctcattgcctatttctttattgatcccgccactgattctagttcatgacaccataagttattcgatgttgatccggccactgattctagttcatgacagcataagttatggatcacatcgataaaaacatatgccggtttagttctcaaccactgtactaattctttagctggtttcaaacaaaataggacaagcatataaagatgcgatggaatttgaaaacatagattgccaagtgccatatctctactgttttgccagtttgtccacgagccaaaagaaggctccaatgagaattcccccgtacatgccggggtggcgccacatgacaatgactgacaggctggccccacgtcctacctggctggccccacccctgctctttctctttctcttcttccctttcgtcttcgtcttcgtcgtcgtcgactcgtcgtggccgccggcaactcacgcccaccgcgcgcgcgcgcgaattaatacaaacacattaacacacacagagagagaaaattggcgcgcctcgcgctgtgcgccttcgaattttggaggcgacgcgcgggaggacggaatcggccggggattcgctgcgtcgccgcgcgagagcgagaggaggaggaggaggaggaagccgggatgggggtgtcggacaacacggtggggctttcgctggcggtggcgtccagcgccttcatcggcgccagcttcatcctcaagaagatcggactcatccgcgccggcaagggcggcgtccgcgcaggtcatctctctctttgctttgctgcctcattctcaggtcaaccgttgtttgcttcttgggattggtcgccgcctagctcaattggtcgcacggcatctcgcttagtttgacgacgcccgcatctcaatcccttctctggggaataatcgaacactttggtggatcttgattcgtatgcagcaacacctggaattatggattacgcagagcatttttgcaattggatcccatcctgtcctgatgattagggtggtttttttgtttgacaaatcgttgcttacctgcgccgccgcgattgggtggcggctgctgttgctccgcttctagatcttgacgaggctgcggttggttagtccaagtcgtaagcctgctcgtgcgtgcaaatcagcatcgcggtcgtcgccattgtcgctgtcttctagatgcaaacggaaactcttgctgtttcgtcttggaagaccttgtcaattcaaatgcttttgggtcggatctctaaaatttgaacccagatatcttgactttcagatgccgtgctccctatttatccccctgcgttcaattaccatggttggcattttggcaatgtaaaagcaaatgtttttttttactgtttcatctccgttgccaatctaaacatggattctttttctttttctttttttttacttactctgatgactctttgtgggtaattgccctcccatttcatcttacctgcttcttttctaacacattacaggtggtggaggatacacttatcttttggaacctctatggtgggctggaatgatgacaagtatgctcactctacacagcatttacagttagcttaattaaacttgacaatgcagctgaatgtcatctctgttgattgcacaagtgttgcttggggagatagcaaacttcgttgcttatacctttgcaccagccgtacttgtgactccccttggggcactaagcataatcgtaaggtgatttttttcaaaccaaagccttaagttcagtagtcagcactatctttgattctcctatatatggttgacatacattttgttttttttctccaatttggacagttcatttttagcacatttcgtgctgaaggaacggcttgagaagctaggtgttcttggttgtgtatcatgcattgtcggttcagttattgttgttatacatgctcctcaagaacatatgcctaattctgtagaggaaatctggaacttagccattcaaccaggttagtcactgacacacatttctgcaacactgtataggtcacagctatataactaacatgctttctctgaacatattgtggtttcaacacctccaggatttctaacatatgcggtagcaaccttagtagtcgtggcagcactagttctcttctttgaacctcgatatggtcagacaaatatcatgatatatctgggcatctgctcttctatgggatcactaacagtaagtgtgttttgctattggatgcacaatctagtggtaggcatatgtggttaacgaaccattggtattctgtaggtcgttagcatcaaagccattggtgttgctataaagcttacgctggatggaatgaaccaggttgcttatccacacacatggctttttgttatcattgcaatcatctgtgtggtttctcagataaattacctcaataaggtaacacattttcctggctaccaattacttggtgcaagtatgttttgctcgattgcttcctcatgatctatttttcagtttttgaaaatctttgaaaaataaatttgtttt

SEQ ID NO: 28836 - DNA, 11023 bp, Oryza sativa
  unsure (1)..(11023): unsure at all n locations
tctgacgataaacgccacttctgatctccccttactgaccgaggaaataagcttcactgctacagaacaatctacctccacaacgatgggtagcagagtccattgaagagccatattaatcccttctttgcaagctagaagctccgcctcaaaaggaccactgcaatgatcaagaaaaccgcaggcagagaaaattacttctccttggctattcctcagcactgcaccaatacaccccttaccggagctggcatcaaacgacccatctacgttgagcttcatccatccctgatttggtttctcccatctcagaatcgctggggttgaagcagatggatccttcattttcggcattctgctatactggacgatatgcttccctttaattaaatntatcgattggcactgtctaacttncagtaaggacgagatataactntcaaggaatctcttagacactccaacagggggaggattttaccatgtgtgatctcgttacgaacataccaaatacgccacaacaccatcaggaacatagcatgttcttcccgcggaactatcttcaactgatctagtatccagtctgctcctgtacagtttccgacaatgcctttggttccttccctactacttgcatagcatcccacagcttttttgcttgcggacatcgacagagagcatgtgcaacgtcctctgcctccaccccgcagataccgcaggtgccagaagcttcaagcttcctcttattcttgttttccatagttgcaaggctattggttgcagctctccaggtgaaaaccttgactttttgcggtacattgcatttccaaaccaaattccatgccttggatatttcagcttcagaggaccccgacccattgtcaatagctgctagctgaagagcgagtttgtaagccgatctcaccgagaaaatacccaacttatccggatgccaggctaagaagtcttcctctgctcttgccgagggtcggattgtcaagatcaactcagcatccactggccagaagatcctcttaaccacctgttcatcccatgtaccatccactcccattaaatctgcaacccatttggttctacaattacctctcacagcaataggtcttcgcgagtgattcctcggcagccacggatcacgccagattctgattgagtgaccattacccaccctccatataacgcctttctttagcaactcaagaccatactctattgctcgccatctgggtgaagcatttcccccaaaggcagttgtcaattaaggaaccagaagggtagtatttagccctcaacacccgagcacagagactttccggcctgtcaatcagccgccatgcttgtctagccaagagagcttggttaaacaatctaaagtctctaaaacccagaccaccgttttgcttaggttttaccagctggtcctaggatcgccaatatgttttcctcttgcctctatcagcaccccaccagaaactacgagaaattttattaagatcctcacaaacagaattagaaagcttaaacaagcccataacatacaccggtatggcttggatgactgcttttagcataatttcctttcccccacttgataggaaattctctccccacatgatgattcttttccaaatcttctcttgtaaactttggaatttacctttactcattctttcctctggcgttggaaaacccagatatttatcctcaaagcttttattcccaagctgtaagcaattcctgatcgcagtttgggtatctgctgggcaagactcaccaaacagtatagagcacttcagtgggttaattaactgcccagtccctgcagcatattggccaagaactgacttgattgtctctgcctgctcgacttctgctttgaagaataaaagcatgtcatcagcgaataacagatgtgatatccctggtgcagatcagcacactttaaccggagttaaattcccctgatttaccttctcatccagcaataacaagagcccatccgcaacaaacaaaaacagaaaaagcgataacggatcttcctgacgtaagccacgagttggagcgaatgtatcgaggagggttccattgaatttaacaacgaatctcaccgttgttatacacttcataatccacttaacccatcagtgagcgaaacccaccttgtacatggcttgctccaaaaagacccagtccacactatcataagccttcaagagatcaagcttataagcgcaagctgccttgttctggtgtttgttcttctggataaagtgaaaacactcgaaagcaaggagtgcgttatccgttatcagtcttcctggcacgaaggcactttgattaaccgagatcaactcatccaaaatcgaccgaagtctgtttaccaagcatttagagacgattttatatagaacgttgcataagctgatagggcgaaagtctttcagctccacaggctgatcaatttttgggatcaacacaatagcagtttcatttgccccttctggcatgattcctgaatgaaaaaattccttcactgccgccaccacatcagacttgatagtagcccagttcctttggtagaatctcactgggaatccgtcaggcccaggggccttcaatgggccaatctggaagagggcatcggctatctcttcatctgtaaattccttgcataagttctcattcatcgctgcagtaaccttcttctgaaacaactgggacacacttgcctgatcgagatttgggtctgctttgtaaatctccttgaagtaatcagtagccaacttttccatagttgttgccgtattatgaatagtaccatcactagccctgagcctagagatcctattcttttttgccctccacaccgctttactatgaaagaactttgtgttgcgatccccctctttcaaccaactaatccttgatctttgcagccaaagcatctcctctctatacaacagttcattcatgcggtctaaggcctgacggatctctctactgtcagcatttcattccattaacattgccagatgtttccttgccttttctagctctctaccaatgttcttaaacttcaccttactccaagactgaagagcccccataacccttttcaaagctttgctaatatcccccagatgcaacatctcatctgactctactcaagcatccttaactatgtcctggactgctggttcacgttcccaacatatctcatagtgcaggcatttagcacggcactgtctatcactcccggttgtaaacttaactaggatgggagaatgatcagaacatggcgaagtcagatggaccacctgtgcattggtaaaaatatccctccaactttcatctgccaaagctctatccagccgaacctttacattggctgaaccttgtcgcttattatcatacgtatgaggtacccctgaaaaacccaagtctaccagctgacaagtctgtaacacatctctaaacgcctgcatttgggcattactccttttcctaacagaagtatgctcaaattgccatagagcttcattaaaatcccctacgacaagccacggcagagaggaagtctgtttaagagcatttagatgagcctacatcctgcatcgattttccactcgtggttcaccgtacacaaaagtcacatgccacaaaggaccatccgaggacagacgcacatacgcatcaataaatctttcattaatagaaattatttccatgtggatagattcatgccaaaacaaagcaagacccccgctcatcccctcatagttaacccccacaaaacccttgaggcccaatcttgatcgcagacgtttaactctatcgaccttttgtcttgtctcactgagaaacacgatatgggaacccgcctccttaaccaaggcgcaaaggtcatgaactgacgcagcgttcccgataccgcgacagttccaagccatgcaattcattgctcctgacgggacccgaccatcggtcccgtcagttgaccagcggccccagggctggttgcctccttctccttcccggttactaccccttcagtcttcctggctctcttcagtgcccgtgaagaaacgcccgattcaaacacagatttgctgctttcttccaccatttgttgatattccagcagagcttgcatgactctccctgacttctttgttgcaccctgtgtttgaggttccctcctgtcctctccactgcaatcttcagacaattcatcaccgtaggaagcttgctgacttatagtcttaatagccggtatcatctcacaagaaggtaatgaagttgtatcttccacaccatccaaccgaatctcaggtccacgtttatggcttgctccctctcttcctgggagagaaaccttctgtacttctgtctcccccaccttcattttctctgcatagcccgccaactgttcatcaatctgtgtgtccccttccttctttgcagactcaaaaccatcatgagcgtccactcttggtggaaccaagtcctccccctgatctccttgtttctgtcgtgaggacaatgaacttgcactccctgcccccctgaagaacaggttacgcaccacccctgaagatgatggtactttcaccttactcaccttcctctcaaagggttttagaggggagcatcttaactctgccgaaaacttgaagggctggtcattgttgactcctttcctattgcactccttgtcagagtgtcccagatatccacatatgaaacaaaaatgcggcaccctttcataccaaagatcaaaacgctttgtgacctctttgccctgtgctaacatctttatagccaacttcgactttaacggacgcttgacagataagtccacacgaatcctaaagaaatcatgtttgttccgcccatcgtcacccacatccacctcccgaacttgtcccaatttgctgccgtataattcacctcttgctttcatcatcagtactaaaggtaggtcatagattctaacccaaatagggactgtctccagtggaacttcagatggcctcgacagaccatcaaacctagcaaccaatagagcatcacctctatgtatccatggaccacctttcaagacaaactcataatctccttcagcactgaaagttatgatgaacatattatcccataaggatttataactcatgtcagcccgcaatctccatgctctcctcatatcatcaaacaaagccgcctgatttggcacccgcagagagtagaatctagcaaggattgtccactgtcctgcctcctgtacttccccttcttcaagaatcacttcaactacatcttcctcctcctcattcatctctccttcagtaaacttctctggcctcaaagtattatctcctgagcccgtgtccatcttcaaagcctgtgacgaaacctgctcctcatggccgtcctccacaggaaacaatgcccttgaatccggtgccgcactcatcggaccagccatggtgctatctgccggcttcgggtgggcaatcgtttcaccaacgatccctaaatcacccccaccggcgacaatagacatgggtcctttcagttgcggagagaggaatagccctaatttgcatattagattggcaaggaccttttgatctttgaatcttacctttggccgtcctatttcctcatatatgtagtgattctcaacagagtccataatctgcatcattaccaccccaggaaaccgactcggatcacacttcctcaattccaatcattcccaaagatgaaagattgcagatacttcccaaaacaaccgagaaatcaactgaccatccaacttgatcaagaactcaccacatattccgtacgcaggcagaaaccctgcagacctccttagcagatcggagataaactccatccaaatccatctcacagcacaggagatagccgccgccccgcgatcgcctgggcgtcgcccaaaccctagctccgtcatttccggcaatcacatttactataaaagctcttgtttgaccatgttaacttgtaaaattaagttaatcgtgctatctaattaaaaatggtctcatcaatggcatgcagaatcgcagaataatcgtggaaggatataaaaggagggggcatcatggccacgtcggtttgtcgtcggagaccggagctgacttgtacatataccggctggactagtcaatccaatgactctgaccaatcgacgatggatattgggatgggatcggcatcggacggcccggatcacgcggcacaagggctagtccttttcacatgcactaattaatcatctgtagtacagtattactcctgcttcttaatcaatttcacactctaattgacacgcacgcacatggccatcgttgatcatcgatgctatgaaaagaatatactccctccatcatccataaaagttagaaatatctcactttgagtttttctaaataagttattattatttatagtctttatacattcaagacttaaatgaaaaaataaattaaatgtttgattagtatctaagaagtcatctaaatactcattggttgcatgcttgcattcacttcttaattttgtaacatctaaaatgatttaatttcttcttgttcttggtgacaaaaataataggtgtaacttttgtgaatggagggagtataatcgacatggatgcaatgatgtatgcatgagatggtgataaatatgatgatgccaacacatccacaagactccactaattagaccgcttgaccagcgctgatttgcataaaaccagcacagataacgtccacccaccaccgtacttctgaatataagatatcctatatatcaatatttgttatattagaatatgtcacatactattacaaagttgattttttagacggagggagtgcgtgtctcacaagtcacaagtacaactccataaagaaaaaaccaatcttatctatatgtgttcaaggattgacactaataataccccatcagtgtcggcagtattaatcggcattgattaatgaggagactatcagtgttggtcttactgtatccacgatactttagacgggaaacctatttttggtacggccctaaagtgattagagagactagtgttgattttacagtgtccataatactttagatgggaaatctatcttgatacaacatgtttagttgtgtttaatagttttagcatgcaataatatgtgtcgtctttgctggttaataatcttaaccgggactaaaaagacctctgcaacacctacctagctataaggctcctcccatgagttatcatatcattgctaaaattctagtgtcgattgggaacccgacaatgagagcaagtttaatagtatagccaaatactagctccaattcatttatagccaatctaatagctcattcatacaatagtacactattaatatctggtcccatctgtcatacacacagcgtcttggagtctgtgctacagtctatagcccgctgctcttctctctcctcatttatctacttaaaatatgtttacagctggctttatagcctgctattatacctgctctggtagccctttgtagataatagtgcaacagtaaacacatgaatttcgtatttgtatacaccaatgggagaattgcaacagtatagtacatacaaacaactactacatgcaaggaatatttctccttttccttttcaaaatatcgagatcagtctaccagctgtgtatgaccactacatatggggaaaaaaataaaccgaaaagaaacaacctctgcagtgtgcaatgttgaattctacgacgatgctgctgccagagtgtggttgtcgttgggatgtgacacgacaatttatatttgcaagctagcagctggatgtacgagtagtcaacacattattacggttgcaatccttgaccggattaaataaacagacttaacttaacttcttgagatgattcacctaatgacctaattaagaacatcgtccctgtgcccacctagacctagctagttataatctctgttcgtttaaacttccgtttccgtgcgactaatgacactgaccgagctggttcaaatatatattcacttgtcatgatcgatttctaatatgtgctgaataatataatggcttctaaggcaatgtttctttcagcttgagattattataatccagattattgggagtaagctgaaagaaacatacaacttattaaagtagcttattataatctggagcacagcttattataatctaataagctcatttaggtgagctttttccagattattgggtgaaaaattacccaccatgccacccactccctctttagacttgcaaacccaataatttaggctctaataatgtaggaaagaaacaattaaccgcttattctactacagattataacaatctagcttatagtaatctgactcagtaatctagattataataatcctaagctgaaataaacagagcctaatactggttggtaagcacaaacgctttgattgcaattagttactcctatacgtgcttaccagctacttcatccgtatcaatttactgttctactccctctgtcatatgatatagcaaccaataactgaatggaacgcctccctccgtcttataatatagcgtagtcacatccggttttaggttgttgtattttgggacggagggtataataaatttcacactaaattaagaacaaaaatcataataaaaagaacatgacatactactctgcagtatatactctcttcggcataaagaaaaaaaaggtaaggatttaaaaatttctatagctttcattaatatggggagaaaaatttatgaggaagagtaaaccagaagaatgagagagtactgttgggttgatggttaaaataatacttcctccgtttcacaatgtgagtcattttagtatttttcacattatatatatttatatagatttattaacatcaagatgatttctaaaaaaaacattaagatgaatatggaaaatgctaaaatgacttacattgtgaaacagggaaagtaataacaatgataatatcatagtattaatgagattttagaaagctaaaccgatagtatatactttacgcatctgacaagcatatgcagtcctatttatagtaggagaacaatgacttttgtttgtgatcaaaggacacgtgcggtttttccattgacggtacctgcattaaggtcaaaattaagcgtgtttcggttttgaagaagccaaatccaattttcaactatgcacacataactaccatttcgttcggagactaaacccagcaatttagcatacgtggtctaatcctaccatcgacaataataatataaattaataataacagaggaaaaacattcagcaacagtattactcacagcaagactttttaatcttgctgtatctgtaacagtacacccttcatccaaaaaaaaaataatttcaacaacaaatctaaatatagactatgtgtagatttataataaaaaaattgattcttttaattttgaatggaaggagtatgcagtagtagtaaaaatatctcctagagaatttttattctatgagaacaaattatatattaagctcttttttttgccctatgaacacacgcacgcaaaccctacccctatgagcatcttcaaagactgggcccgactgggccggcaaattctggagagattgacgaagtaaccctaccccctatgagcatcttcaaagactaggctggactgggccggcaaattctggagagattgacgaagttaccacaggcgcctagctgttgacgggtacgtcgcctaccactgaaagcacaacgccgataaatcctggaaaattcgctcccatggggagtcgaacccaggaccttaggtgctactgaggctcttgtaaccactaggctacaggccgatattaagcttttgaaacaaaaaaattggttactattaatattttgaagtttctaaatgatggtcaagaaattaatcgacttaatttaccctattcattttcatattacaagttgttttgatttttctaatcaagtttgtaaaaaaaaagtaacatctaaaacatcatattaacttcatcaaatctaacattaaatatacattttgataatatgtctatgtttattttaattaaaaatattactatatttttaaaattttggttaaatccaaagaagttcaacatcaacttataatataaaacaaaaacagtagtagtaagtagatactttctccttaaaaaaaatccaacctaagataggatatgatatatcctattacaacgaatttgatattttaggttagacttttttttactgaaggagtaaatctgatatatgaccattttggattgatgccaaaatgtgccctgccaatttattggtaccttcaatagtaatagtataggtttggattgaagccaaattgtttggctattcctatgatcaatttggcactaatctagagtcttcttctctgtatcatcaacatttggcaacatattagtagcaatccaaacatgtataataaatctctaccttacaaaaaaaaattggtaataccaaaacatgccaagaatttggtagatactctctccgtctcataaaaacgaatctaggaccggatgtgacatattctagtactacgaatctggatatgatatgttacatccggtactaggttggttttttatgggacggaggaagtaaggtagagaacaaaagagccccataatttttagcgcagtggtaaactggggagtggattttcacccctcgaggggatatcctcttgttgtttgcacatcactcaaatggttatgaaaaaatttgaaagaaattgagaagatgtattaacatgtgatatatcactccacaaacatgcaacttctacatctcgcaaaaaaaaataaattcgtttgttttttcgttgcgagatgtagaagttaaat

SEQ ID NO: 28837 - DNA, 32273 bp, Oryza sativa
attttttccataacaaagatacatgtaaacaacgagatgatgaaaatagtttctccggtaaactgtggtggagaagtggagaaccgaataggccttgcaaagagagagggggaggcgcctggcgtacgtgagcgtggcgtgggcgcgggagagagaacaagtcaaaggatgcgaacgcaacaagacgagcaccagcagcatggtcaggacgacacaacacaactagtctcctcgactactcgtctctcggtcttccttccctccccctcttcctcctcttgctcttcccttccaattccaatcccgcgcgccgatccgatccattcccaccaccaccaccgtcgtctccctcactccaacctccgccacctgcgaaacctaagcttgctgctccgccgacgaggctgatacgtgctgagatactactagtagcacctgtacgtctaagctagagctatggggtgcgtgtgctccaggcggtttcgggacgacgccgcgccgcgctcggtgcagccgctcgccgccgcctacgaggcgcgccggggtcgctacggccctggcgacttcgactccggcgagctcgccatcccgccgcccaagctactcacctcccacaaggtactctactactactaccaccgtaattttctatgcatcatgtgctgcatgtgttggaattttcgagctccatcgatccatcgagatgtgcttcagctcaactctccgccctgcttgcctgcaacttccatcggacagctgcatgtgctgctctctacttcgcgatttgtttctgcttagttaggtagccagccggtgagaattctccacgacttgatgcaccaaacacgcgttgccgcaaacggagcgctttgtttgggttcgaaatctcaatccgccttccacgtccaattcctcaaaatcacaagttgggggtattattgatttgatgttattttttgctgcgtttcttctctcgccgccgtgttcagaaattcagagaagccgtcaaactgagcatcactgtgaagctttaattgagctgcctttcgctgtcaaggcttccatggggacttcatctgaagctgctctctcgtatttcagtctccgctttgattaactcaaatcaaactagattggcagtggtctgaggatgcagaatttcacaaaccgtggggaatctgcactgcatctttgcatgaattctttaagcggatcaggggaaagagagggacacaccaatacatacagcaagtgaaaaccaacagcttacacacacaaaaattcatcaagtccgtgtaggatgcagcagagtcaatcttggcggcccttggtttatcatattgtaagcactattgtcctataggaggaggattccgtccttttgctcagataagtgaagaactgccgtgcttatttaacgttcacgttgctgtcagcctgagtctacttcttggactggtcaagccagcgacccaaccatgagcttctgcttttgttccttcctgctgaccacttttccatgccaaccatggagtttgggaaattacatccttcacttttcttcttgcaaagacatgagtgatctgcttagcttctacttggaagaaaacactaaatgtgcaggagctaataagtgagacaaagtacagactgtataactggaaagaagctgactttgtttatgtactctcagcatgttactagtgttataattcaggcacccagtgattcggcagtcatcctggagatggaaaaagatatagacagatggttactaaagtatcgggttaagaaatacaccaatgcgcagcctactttgatctggccaatgcgcatcaggggtgatcgtctatatatcatcagaaaaatgaaaggaggccatctcccccaaagtgaaaggactacggaatagccttagaggagtgacctccccattttgtttcatttcacccgtttcattcattgagtctatgttttcatcgaaaagcttgcacttcaaattggcttgtttcataattttgcaataagattgacaggaaaagcactgctagttcaaataaatataccttctttcttaggttctttgttacgacgaaacatctgatattattcttcttagaggggataatacgtttctctcgctcttccttttgctttgtttgtgctataactagttgtctttctattggaaattgaaggcagcaaaagcggagactatatcattagaagataagagtagtcttttcctttcatattaactctgacatactaagttgtgacaggtaccagaaacaggtacacttttaggaagagccagcattgctgctgtcgaggtgttagataccctcgggagtagcatgacaaatttaaatcatggcagtggatttctctctgggggaacaaatcgaggcaatagagtctgtattttagcatttgaagtcgcaaacacaatagctaaagcttccaatttgtggagatcttgctccgacacgagtataaaggaattgaaggaagaaatattgcgttcagatggagtgcaaatattggtctcctcaaattccagtgaactattgtatattgcttatgttgacaaaaggtatgattggttcaagaaggaagttgtcctatcgttcctttttttttttgttgttaatgcgattggctgacatggatttgatggaattctacagggatgaacttgacatcttttcaagagaagtaattcgatttggtaacctgtgtaaagacccaacatggcataacttaggacgctatttcaacaagtaagaatctgagaagtatgcttttcatttaagatgctatttacaatcatatcagcacttcctgtacttaacactatgctgttgctgtgaattctgatgtgcagattaacgacagattttgcgcctcaggatcattcaaaagagcatatggaaactactatccagcaattgatcaatttggctcaaaatacttctgtatgtatcacttgataatttctgtattttgccgtatgtaattgataatacttataatttttatggagtcaagatgtaggattcattaatttattattattattctcccttcaaattattgaacggttaaactgctgtaggaatcaggattcaagaatttttcattaggccttaatatcttatcatgaaggactaagtctcgttgcataacatagaaccacagttttgaggtgctggttcgaaggatatgctgatgggcttgttttgtaattgcaggaactctatcatgaattgcatgcgctggacaggtttgagcaggattttcaaagaaaatttcatgaagaagagtcagtgccagcagccagacgtggtacagttatactgatgtcatttttaagaaaatatattgttgatagatgctagaatttaagcaagagggttttccattagctcaccttaattagtgacgtgctgtagattgctctttaaaatacttaaaatggacagacgtatcatgtaacctattcggtcacgaagtggttttccttgggtgtcttcttttttatgtttgcttctttcacacaatgttgttcaaagtatagaaaatggtgatgcttattggtttcaatcttcttgttcttggcagagagtgttatgatcttgcatagtgaactaaagcgccagagaaagcttgtgaaaactctcaagaagaagtctttggggtctcgaactttagagaccgtatttcttaagccacattttgctctgttgcttgattacttcataccaccagattgcatttattggaatatggcccattgtctaacaatcgcaaattgatgaatactctgctcataatatccacacatttttattttgaagaatgcttacactgaattctgtcattggctatccagattgtggagaagcttgttgatattgtcgtatttttacataagcaaattcgggattcattcagtgaagctggtaggtgatactcaactggatggtttgcagtagcttaaaatttgtgcgacgatatgctaacacctctctaattaaaaaagtttctgtaggtgctgaccttttcaattcagagcaagctcaaaacaaaagactaggttcctgcggtctagccttacattatgcgaacataatcaatcaaattgaaaatattgtaagttgttttgacttttgatgatccatacccatgtttttcatcccttctggatgtaccactttcaccgtctacacgtttgctatatctgatcttaagactcagtgctctcataatctactgtgtctgctggatatgccccacttccatagctcacatgcttgctatatataatcttaatattcagcatttgcataaagttttgattatgttgatgaatcattcatttattcattttccttaagttaactacaacagtcagttgtaatgaatattttatgtttggtcagtataaagtatctattagtttcttagctactgagtactagttccaacaccatagtgcataggttgtattaccaaagtctagatgtttaatccttaatctccactacagctgatacttgattgattatagagtcaaagttctcaaaacaatgtgtaattatgcaggtttctagaccactctctcttcctcctagtgctagggacaatctgtatcatggtctgccagtaacagtgaagtcagctctcagatcgcgattgcaatcagttaatgcccaagaagaggtttgtgttctctgcagccctgtggtggtaaaacggttcatttcctatattctttatgcacatggaagcagtagtagtatttagatatgactagctcaacactaataagatcttgttacatgctagtttccataagcatattttgctcctgaaaaaggtgaaagtaaaatagtccatgtagattgaaatcttaatatgataataattctgtatatatcatgttaacaaagttgaggactttatatttccagttgtctccaaagcccgcaaactgataaatgtatgctgttttcattatgtgcagcgtactgtagctcaaattaaagctgaaatgcagaaaactcttcgctggattctaccgattgctgaaaatacaataaggtgggcggaacttgttgcaaagtcctactgacttctgagcttagggttattttctccctaaaattcattcctttgtgttttcatacttttaccagagcacatcaaggttttggatgggtcggcgaatgggcaaaccttgggttagtatcaaatcgtgatttgcttatcatataccttggaatttccattgataatataacatgagataaaatagtaacaagtattgctccttgcaacataacctaacatactgctattttctagttgcgaaatgaacaagaaatcaggctcccagctcagtatcacccgtgtccagactcttcattacgccgataaggcaaagacggagcaatacatgctcgatctggtggtgctgctccaccatttagttgtccaggtgaagaacagaggctatgggagcaagtcctcaaagcacgaccagtcccgatcccgcaagggaatggatcttcaacctgaatccaagctcaacacatctccagtgaacaacgccacatatccgagcccgttgtcggagtccgaacgcgagacgctggaccacctgagcttcaagaggacgggctacggtaggagcaagagctgcgagcctccacccaatagagggaagaaggcacatcgaacctgggattcatgccggagccatggcagctcgccggcgagggaattcggtaggaactcagcttcagagcttgacaagacgatggacctggatgtaatagatgggttagatagactgacttcttaccacccaacatcccccacattttgttaggtatatgctgcacaaaaataggtattcttttggtgttcctacggttgattgatcgtatatatatcttgtaaatgtgtgtgatctacctatatattctcttacatgtacatatatacatagcttagtagtacagccctgagtttgagtggaaatatagcaagatcacaagtgatgctctatgcctcgttcccatctctccttttgccttacaatttgtgcaatgtaaaggggaagtttcagcacaaaattctacatcatagtgttacttttttttttgaacgactcgcatgagacggtgcgaagttctattgatagagcaggaaaaaattacaagattacaaccgtggagggttgtaaccaggaacaagaaaaagaaaaccatcacccacacaccgacagcgccaacacacaagtccggaagaagactatcaccggaccggccgccgctagaccaacaaaaggaacacagacgagatcgcccccgaggggatgccaaaacgacgtcttcaagaagagaagcgacggaaaaaccgccgccgccgtccgtcggggctcaaaggagccaagactgggcttacgcccagcaagcacccttgaggggtgagacagcacgacaacgccctcaggagggggaacatcgatgtcggtccggtcaaggccgggctaggttttcacccgctgctcaccacctgcgaatccacgactgacgctccgatgctccaccaccgctcaagctctgccgacatgtgggacccctgcaccggcggcccccacccgctagccttcgtgcgtcgaagaccgcgccacacccaccggcagctcctcctcgcaccgaggtcgcctcctccaccgccggccgcgcctctcgcgccaagccggcctcctccaccggacgcgcctctcgcgccagtccggcctccctccatcggccgcgcctctcgcgccaagccggcctccatctccgccgcccgcgccgagccggcctccgctgccatcggctgcgcctctctaagccaagccgatctccgacccctcctatagtgttacttatcaaactcctgtttgggggagcttcttgttagggttctctctaggatcacctaggtttagatctagtcgggtagtactcttgggtggatgaacaacattatagagatgaaacgagagggtttagagaccgaccggttgaggtgttggaggatgaagaggtgccggacatcatcgttgttgtcgcgtgctagacgtgggcggcagcaacggtgtgctcgatggtgatggcggtcgtggcagtggcggtcgtagtcgatgacgagacgtggtacagcggtgagacttcccgtcactggctacgccccctctcgatcggttagggtttgcgggtggagatggcggcggcagcgaacctcgtgtcgtgtcgccccggcctccatccctctttatatggcgcaggatgacgggggcccaccagccattgggctgggcgcccccgatcagggcgcaggtgaaggccaccttgagccgttgggttagggagggagatccatctaacacttctggcagctgcagcttctcatagaatctccagttaccagaagctcccccaaacagtccagctttttacccagattcttagaatatgtagttgtagaatctggaaaatgaactagaagccaaaagctaggttttccaacttcttcagattctcaccagctagcttctcaacaattgtttctcaggatattaagctccaccaaacaggccgaactttgtagcagctggcctcccatcgtttatcttttagattactccaactaaaatttaaattaaacttagttttaagttgattctaagggttttttttaatcttagtttattttttacagtgacttttagatcgataaaaacaaacataaaagttttactcataaactattttcagttgtttcgtataaatcttttttacggcttaataatagctgtagagcaaacaaaagagaaacgatgaagcagacaactgagaagaggtcttggccacaaattgcagccgggtccaacaagtttatccagcaagattatctttctccagtctctcagcaatcttatccagatgcagatatagcagcagcatttctcgcacaagctcattccggcgatgtccatgtccaccacccacctgtacgcggcgagagagacccgaccaccgcctcctccgccgctcgccgtcgccgtcgccgtcgccgtcgacccgcccgccgaattaattaatacggccacagcccacaggtttagtaccccgtttggatttctcctttccaagagaccaatatgccaaagccgtaagatgaatagtgtcctagagttgttctagaggaaaaggataattgacagcaacttttctccaacctggcccttgtcgattgatccccatgctgtatatgatgatgatgatacatctatgtcaattgggttctagaatgaaaatattgtatgtgaatcttgtcggtgcagatgccagccttctagaatctaagatacactaatgggattgtacaaggtcaggcatgtgcatgcatagtgcataaccccagacagctctaaacaagttataatacattaacatgcagcatatcctataggggttctatatttctctaaataagataatagcagtacatctgttctaaaatatacaagtaacttttagctatgaattttttaatggaggtatagctatgcaagcatatataaacaagaaaaatggtccctatgtccaaatagaaaaaaatgtaaaattaatctagaaaaaatgtcatgtctttgtcatcacaagcataactttcaaccgattagtgggcgaaaagcactggatccagataaccacaaagaagaagaaaatcaccctcccccaaaatcattccaaaaacatcaccttctccagcaatgatctgatccaccacagcacattggcctctcatgagatcagctggcctctgcgaaaattactgggaaaaactatgaggctacgatcctgaccgtcgatttcggatcggacggatggatcaccatggataccattcaccgtggaagaaggaaggttggtctccaccatggcgccaaactgtgaaagcaacagccatggagaaggagaaaaggacatgcacatactactctctgactcagcaaacaatcacataatcctctaagaaaataaaaaaaatgatttcttctagagataagatcaagaactcaacgtccaagtggcaccactaaaattcctcaccccctaaactccctataaataattcacctttcttttcttttctgatctcatcgactcgacgacgacgacgcattccgaattattcaagaaattcaagaagtgaacagaggaggaaaggaaacatggcttcgtttgcatccacggcggcgccttggggatgcgtcgccggagctcggcgtggcggcggcggcggcgggcggtgtggggtgcgcgcgtccgcggcgctggcggtggcggcgccggcggcgaggacgcactacgaggtgctcggggtcggggcgggcgcgagcaggggggagatcaaggcggcgtaccggcgtctggcgagggaggtgcacccggacgccggcgccacgggggacgaggacttcatacggctccacgccgcgtacgccacgctcgccgaccccgacgagcgcgcgcggtacgaccgcgccatggccggcccggcggcgtcggcgttccggcgggcgcccgcgtcgtcgttccggcggcggacgtgggagacggaccagtgctggtagggcagaagcacaactccggtgctccctgccctactgcgccgcgctctccgccgccggagctccgtcgggcacggcggtttgccggcgagtgacgtgggattctgtcggccgtcggatccatcatagaaggcccagatcgaagaggaaaagaggaagcggagcgagatatttgcagaggagccctccatttaccatctattgtcaacaaggtcctcccgcgaccatctcggccgttcgatcgacttgtgcggcgcagattgagccaaaaagagaggcgcagtgcggatgttttcctatgggaccctcaagtattcggtattatcaagcatacccccatcccgccgccggcggcggcggcggcggagcaaagtgttgccgcgccggcgagtactgcggtgatcgccggcgtttcgtggggataacaccgctaatgcatggttcttctcctgcaatcctgtgtatatgctgtaacacgaagagaggcaattttagagaactcttttgtgtgctgattagcttgtttatataataggttttagctctgtctctctcaactgtaaatgatcaagaaactattgtttcttctctttccttttcaaatcatcatcgttgagtactaatttgaagaacactcgaatgtgtatctttggtgattcaagttttttaatttttgcagttacctgaataagcatttctagtttttgcatcacttctagtgtcagagacaggatacgctgtccattctgcactctgaataagataaaatatagacatgacctagtttccaaaaaattaaaaaaaacatgacttgaactgaactgctgaagaagaagcagtatacgcctactacttaacagagtgaccagattataaaaagggattttgttcacttgaaatcatctttaggatcaaaagaattgtgtaaagaacacctgcaaattgcgattaactgggaggacaatttttcctgtgaaccataagatgggataaatgcatcccaatacaaccattttgtgatgattctgctagtgctatccacagatgatgtctgttagcacagaacagaaggcgatgcagtctcgggcttgtttgggaggcctacaattcggcccaccaggattcaggccttagcatgaatttctttcatgacaccaaattgaaatctcttgcaccaaatttttcggtttcattcgccagcagtagccgttgccatgccaagatacaggacagcatcacaacgcatcatcgcagcaagtcagaaacagccaatcacatgatgccacgtgcatatagatcgatcgggttcagagtttcttttttaattcagaccatatgcatgctattattctgagttctgaacaatattattctgcagtacaacaaacatgatagtacttgaaatcatcttgaattatataagcccagttgtttatagctactgtatatacactatacagctagctactatacagatataggtgaggtctgatgaacggctcacctcacatatacagatcataagttttttttgacgcaacagatcataagtcaaaacagaatagcattgacatctccatctctgacagagcacaactactgctcgcgtataaacgatcgagtatacaacaatttttgctgctcacctactcgcaactaaacctttcttgtactatctgtttaatgtcttaacctctctgattctctgattgattctgcaacgcatcacacgcatgttgactctttaatttctttatacaacaacttgtaggtttctcggaaggacccatccattcatttgacgaactattttccttagaaaaatgatataaaatagtgaagcccagtagaagctagcttggttatctagctgatcatgacatgaacaatcaaaatttttgcatttgatttgttcactatctcctctctgtctcttctcatccatgggagcacttctccattttctctccctactactcttcctctccttgctccaaggtaagcttagctcaaaaacaaaatcatcaagcatatgcacatttgtaatttaattcagtggacgacgcagctatctgtttttaagcttaattgttcacatgatttgcttgtaatttctctaattcagtgctcgaaatgttgtttgattaagcaagaaatcactgatcaagatgaactcaattgtgatcaatatattaccaggagcacaggctgcgacgttcaccataagcaaccggtgcggctacacggtgtggccgggcatcctctccaacgccggcgtcgcgccgccgtccaccaccggcttcgccctctccccgggccagacgctcgccgtctccgtcgccgccgcctggtccggccgcatctggggccgcacgctctgcggccaggactcctccggcaagttcacctgcgccaccggcgactgcggctcgggcgccgtcgagtgctccggccgcggagccgccccgccggccacgctggcggagttcactctcgccggcggcagcggcggcggcggcggcgatgacttctacgacgtcagcctcgtggacgggtacaacctgccgatgcttgtggcgccgtcgacgccgccgccggcgagcggcggcgcggcgagtaataacgggagcagctgccaggtgacggggtgcgtgatggacctgaacaagtcgtgcccggcggagctgcaggtggtggcggcgtcggcggcgaggagagcggtggcggcgtgcaagagcgcgtgcgaggcgttcgggacggcggagtactgctgcagcggcgcgcacgggtcgccggcgacgtgcgcggcgacggcgtactcgaggttcttcaagggcgcgtgcccgcgagcctacagctacgcgtacgacgacgcgacgtcgacgttcacctgcgcggccgccggcggcggctacgacgtcgtcttctgccccggcatgtccaggtaaattgatcacaaaatatttctgcacgcacgtcttggcatgcatgcatgcgtgctttttttttttcaatttcacattggccctatacaatggcacgtcgtgtacatgtgcatgccatttggcatagcctagacggtccacaccctctatcataatggcactaccactacagacactgacgtgtaagataatagtagggtgagacccatatatcagtgttgtcattggcagtgatattatggtagaggatcctcaccaagcttttgaccagattgacttcggcgtctcgtttctaggcttgtttctttttctttcttttcgattacacggaaatcgtatacgtgcacgcaccacttctatgaatgcgccatctaacacgtacatgagattagaggtgggagacctctcggttctgactctaataactataaaattgatgtctttatccactgataaaaatttgctggctatattttttgtctgcttttctaattttaatcaaagaaacacgctttgggtattagaaaaaaattgttcgtctgtgtcttcggttagttggcattggtaataagttttagtttctgtgactccacaggaactcgaatgacaaatcacaacctgaaaatgatcagatatttaatcaagccttgattaactttttctcgagattacataatttggatgacatagacgcctagggtcgtgacaaaaattttaaaccaaataaggttcaatcgggacattgcgtccatcttaaccgtgttgttcctgattggttttgcagcacaagttgctgatataattttttagttcaatcattttggtgcatcgatcacttgaacgtgacagccagtgctggcatgcaccacgcatcacttgaacaagtttagtatgaacaaaacagagtgtctctctctgtctctgtgggaaagaaaacttgggcgtcgtctgcagaattggctagtttatatatcgtttttggctacaagaatggcgccaaattttttttttctgtttacaattaatttttagaaagtttctgtttacaattatggttaattaatataaaactaagtacatttttatttgctaatgttgcgatgattgcaacctgatgcagcctaaaatctggtggaaatcctgaggcagtaggcttgccacctacctactcaacaatggcgttcactggaaatgcagagagcttgacgatgagcaggaattcgcttgtgatcctcctgatgatcatcagctcagtgatatcgacgctatcttggtgatgtcaattcaaacattgtatttgcgtgatgtatcccattcatgattatagatttagcagcatatttttgccagtttttcttggaggaaaacttcattctttcagagcaggcagcaggttcatccactgctaaaactataatgcacaatgcttcaagattcgcaaatatataaaacatactgtttctgaaaatgcggatccagatcaaactatttctgaaaatgttcacaaatttcaaaaactaaagcaaattacattgtaaaatactgggcgagcttcttcttcttgacctgtacttgtttaccgaagcacgctgacgtccggcgtgcccactttctgatcttcttgtcttcagcaatgtcggaaaaatcacagtgatcatcatcagccaatattgtgtggggttcaatggacataaactccagggcaacggcattctcaaggatgaaatagaccagctcctcctgaggacggtaacaccgaaacccgctcatgtagaccgtcttgaggtgatcatggcggctcaagcgatagtcctcccttgctaccttggtcttgcgaacccgacatttgtacttcttgtaataatacatctgcataattgtaaactctaagcacaaaaacatgaaagctctagctgtttaatctatgcatcacacgaaaaatactacctaacagtatctaacgcatcaaaagccacacatttaccaaaagaatttccatttagttggattcttgtttttatccctctaacaaacaatgaaagcttgatctaattcccactggttctagtgcaatgaaggaaaagaacgacagaaaaacacaattcaattttgtttttcttcaaacattgattattataggtttaaaaaacatttagtatatcatagatagattgaatgcaattgaaaccgcgctaaaaattttaacaggtgtacataatctcaaatgaaaatgagtgaaggcaaaggaattatagcgcacttaatatgactgggtaaaatggatcaatactcacatgccattctagcacctccagtagaggagtgaattccaagtagtgcgccaattgaacaactcccttacaagtattcggagcactagttaagacatatacctcacacttcagatgcctcaaatgcataaacatgttgcgtggttgtcgaaactagatttcgacaataataaaagggggtggctatcaagcttggaaagtgtatgggtttggagacaaaggatttatacaggttcaggccttcttataaaagaagtaataccctactcctgtccggggatgaatccgccgagtgtattattgattgtatgattcgggaaaaatcagcatatgcccctagaggcgcccggaccccccttatatcttggaaggagtccggattacaaaagataatctatattcctaacggaatatgaagataaaggtaaaatacagtcgtaaccgactaagtctcagggtgtttccttgatacacaagttaagaaacaaacccgagatacagataagatattctatctacattaggtatcctgtacccagttcgaataccatcgccgtgtagatatgggatacccataatctccacagtagcccccgagtcctttgcagtcgaccatcgtaaccctctcaaagatgataatccgagtacttcaaactcttcaagccaaaatctgccgagtggactgtaaagggcgaaaagataaagaatatggtgcatcgaatagatgcacctaattaggtgtagcccccaactatgtgattagttaacaaactaaacatatagttgaaagacaaaataataacactattgtgcattacatgacaaaagcgtacgcggcgcctaaataggcatgctagccgactgctttttagccacaataaaagaaatccgagtggtttacactctaaaaggttcacgaatgaactcacttgacaggcatccgaataaaaaaactctaaagattacccatcaagtaccataaagattatggtaataaataagtcaaatagcctaggccatgactatttaccatgaaaactggcatataacacgccaaggaaatgactataataaaaacaagtcattcctagttaacccaaacagcttttgtagcctaaaaaagcttgcaaaaacagcataacgcctttctgtcggacacctttttaacttgcattgcaataattccaaagaattatatgaccgcataaaaaggatttcatcagcattgggcaacactgttgtgtgcataatattgccaaagcaaaatatgcctaagtccctaaggaacacaatgggccacgctgttaaaagtattgggctgaagtattgttcaggcctaggcccattagcacctccgatacccttaactgaaaaatccgatatccaagcggcgcttcgtcttccccgccggaactctcgccattttccccactccctgctacagtgcaaagctgcgccggcgaactagggttcacaactccggccaaatccacctccgaaaagtgcatcaaaatccttctcgtgatccaccgcctcaatccctcacctctcccaagccatccctcgaatcaaatcagcacatttgagtgaaaccgatggcggaagagagagaaagcttcgaaggccaatgggcgtcgtccgacgtaacggaggaggatcttaaggagatggtggcgcacggcgttctccctgccaaggagatcatcgggtggcgaccagcgcacggtgaggctttcccgtctccggatactcatgagattgtggtcttctcgcatttcttctacggcggctttgctcttccgacctcaaaatttttccgcgggatcttgaatttctatggaatcagcttgcatcacctaaacccgaattccatagtgcatatcgccaatttcgtccatgcttgtgaagcctttttggggatcaaacctcactttgccctattccgccggatcttcttcctcaagccccaaccaaacaagaacaaaccgtgtgtagtcgggggggcaggattccaactaaggggaactctgagccaaaaatatttctcgatgcccttcaagacttcgaacaaaggatggcatgcaaactggttctatgttcagaatcccgagcctgctcttcccgggtactcttgtcttcctccagtgtaccaagatacttggaactctcttccaatcggagatgaagcagtacaagccttggagttgttggatcgtatgttaaatcttaaagaacaaggcttacagggagagcaaatcactcggcacttcatcaaatgccgactggcgccaatcaaggaaagatcccgcacagcattcgagttcgacggcaaacatgatcccaaccgtgaagaaccagattccctggatttcaaaatcatgaaggagaggatgtataaaatcttctcaaatgcaattgtagtcagctactctcatcaattgccagttgtgccatataatgcattcaatccgcctccacaggtatacatcggaaaccctcaaaccgtgatcagaacataattttatcttcatgctgagttgactaactatggaagcatcttgttcagggatatgcattgatgaagtcagatccaccagtcactcagcgccggtctcctcgccaacacaccgcgcagggaggtggagggccaacgatcagaccagatccgcaacctcagacctccaaattgactggtcaaacaggtcctcgcaagagaaagctggtactcgatgatgatgaaggcgacgatgataaatctggggataagggcttgcctaataaacccccaaagcgcaccatgcccaggaaaaaattggctggccgtgcaatgccaaagatcagaacatcttccaggtattagatctctcggtatgatttccgcttcggcatgttttccgatgaagataatgccaaatactgaaagaacactctgcaggaaaccatctgatatagatccatctggaaaagaccccgatcctgccatgacagagcaaaatatatccaaggaccccgagccgactgctgaaaaccagccgaccgctgaaagccagccgactggcgcccatgcttcgggcgatagggccaatccgagtgacctgccgccgactggaaaccagtcggcaacaactgaaacggcaacaactcaagagcccccgactggaaaccagtcggacgcaggccctgatcaagagatccccgaggtagaagcgcagacgacgacttcgcaaggaccagaagctggtaacgactcgatagctgggtcttcaggtaaagaacaaagaccacctcacgctcagctaggtacatcttcaggttagttgtcttctcgaacaatggtgatttaaataacctcagtatatccgtctaatgtcttggaaacacatcaggaccatcaggtgatgacggagaagaaatccctcgtataaaggcgaccgacgactctcgtcctcctatcttgatcaaatggtgggacgagaactcacaagccgccggcatagtcataaaccgtcaaaaagaagatgaagaagtgtgccagctgaagaaagcgctcggagaagccactcgtattgtaaatgtaagtcttccgagtgacggccttcggtaactttgttttctttttagcaggactgaaccatgatccatcatgcagagaatccatcttcgcaatgaggccaagactacaactttggaaaagctggttcctcatttgggaactctagaagcagttagggaccagctgcatgagaccaaggagtgcgccaaaaagacagagaaagagttaagggaccgaatcgcccagctccaggatgcaaacttcgaactaagtggttcatcaaaaggtaatcatccagatctgttccattgatttatgctgtcataattgcatcctcaatcatctggatttcaaacagcgcaagccgccaggatggaacagatggcgaagcaaattgaagccctgagagagacaagacagaactggctgcgcaaagggactcggccttgaagaaagtcgaaggtaacgccagctaacaatctgagcttctctccttataacgcaacagatgctcatcataaatgtgttttgcagatcgcaagatcaaatctcaagctcagtttgacgtcctggttggtaagatcaagaggcttgaaggagcaagggataacgtcgccaatgccgctgcaccaattatccaagctatgttcttcaataatggtggtccgagtgcactcgacgcaaccgaaatatttgacaagctgagtgttgctccggaagtatatttcaagaatatcaagaaagctggaagtatgggagctggcatggccttggcgatgacaaaatccttgtacccgagaattgaagtcgacaccattgatggatttgcagacgggacaagtgaagaagctgcccttgatcttatcagcagtgcgcaaaatgcggctgataaaattgcgagtgatgttgtagagcaatttcgcaatgacgacctccaaccgagtaatgaagactctgatgatgaaaggactgattctgactgagtttgaatgtaatacatggaggctcaatttgtacaatactggtgtatttatgctgtgcttgatgattcttgcgaagtttttgatttcttaaaagtttttgctaagctttgttgagcctaaaacccaaaggagctattaaaaactttcagtcctcgcaaactaagtagaaaaaccaaacaaggcaatgataaaccaagtaagcaaactgaattgataaaaaatcacactccattattatgatgatagcccccgactgacaacttcaaggagaaaacttgatgtttgacagtcaaaatagggaaatacaatgagaaagttaagcgtagaaacgacgaagatgttcaatgttccaagagttgtcgacgagagtgccgtcttcgcgcttgagtcgatatgaacctggccgggtaacttcagagataataaatggcccttcccatagaggagataacttgtgccgatctcgtgtggtttgaattttccgtaaaaccaggtcgccgactagaaaggcacgagatcgaacattgcgattatgataacgtcgcaacccttgtaagtaccgagctgactgaatcaaagctgcttcgcggacctcttccagtcggtgcaagtcgtccactcggtcttcttcatatcgttcttcacggaaattacggaagcgcaaagattcgaactcgacttcactcggcaacattgcttctgccccatagacaaggaaaaaaggtgactggcctgtggcccgactgggcgtggtacgcaaagaccaaagtactgatggtaactgtgacacccatttgccggcatagggtttaagccggtcaaaaacacgagctttaatcccttgaagtatcatgccgttggccctctccacctgtccattgctcattgggtgtgctactgaggcatagcaaatcttgattccaaaatcttcacaaaagtctttgaaaactccgccggtgaattgtgtgccattatcagtgattatccgattgggcactccaaatctatgcacaatgttgatgaagaagtctcgagcattatctgctgtaatcgtgacaacaggcttagcttcgatccacttggaaaatttgtcaatggccacgaagaggtgcgtgtaaccgccgactgcctttttaaacgggccaaccatgtcgagcccccaaaccgcaaacggccaagacagcgggatagtttgcaactcttgagctggtaagtgaatttgtctggcgaaaaattggcaaccttcacatgtgcgcacaattctgtcggcgtcagacactgcagtaggccagaaaaaaccctgccggtaagctttgccgacaatggtgcgcgcagcagcatggtttccgcatatcccagaatgtatgtctttcagcaattgtctcccttcctctaaagatacgcagcgttgcagaattcctgaagggcttttcttgtataattcagcttcatgcataacataaagtttgctccgccttgaaatccgctcggcttcatctttatcttgagggagctcttgagaagttaaaaatcgtatgaagggctctcgccagtcggcttcaaccgtagcgacatcatgagtgcccgcaacttgagtggtatctttgtgaggtaccgtcggcgtataaaggtgttcgacgaaaacatcagagggcgccgcctcacgcttggatccaaagttggcaagtctgtcggcggcttcattgttgtgtcgaagaacgtgactgagctcgagtccatcgaacttgtcttccaacttgcgtacctcttgtcgatatgccatcatattgtcatcaaggcaggaccactctttcataacttggttgacaaccagctgcgaatcgcctcgaactattagacgctttatccctagggaaattgcaatccgtagcccatgaaggagcgcctcatactcggcgacgttgtgagacgccgaaaaatgtatccaaagcacataacttagtctttctccagtcggggaaattaaaaccactccagctccagtgcccgaaagtctttttgacccgtcaaaatgcatggtccagtgctctattttctccacgggggtatcctcttggcactcggtccactcggcaacaaaatcagctaacgcttgagacttgattgaagtgcggggcttgaatgatatgtccaaagacatcaactccaaagcccacttagcaatccgcccatttgcttcgcgattgtgcagaacatcgccgagtggaaatgatgtgaccaccgttaccgagtgaccttgaaagtaatgagacagcttcctggtagtaattaaaataccatataacagcttctgaacctgagggtacctcgttttggaatcggtcaggacctcgctgacgaagtagattggtcgctgaactttctggacatggccttcttcctcacgctcgacgaccaagactgtgctcacaacctggggggtggctgatacatacagcaacaacggctcctgcgggtgtggtgaagctaagaccggtggcttggtgaggagttgtttgaaatcttcgaaggccttctgtgcttcgggtccccactggaagttatctgttttcttcagcagcttaaagaagggcatcccccgctcgccaagtcttgaaacaaatcggctgagcgccgccatgcatccagtcagcttctgaacatctttctgggtacttggcggtttcatgttgaggatagcagtaactttctccgggttggcctggatgcccctacgagacaccataaaaccaagcagcttccctgacggtactccgaaggtgcacttttcagggtttaatttcatcctgaaagcgcggatgctcgcgaaggtttcttctagatccaaaattaaatcatccttttgcttggtcttgacgactacatcatccacataggcttcaacgttgcggccgatctgtgttgaaaagcatctctggatcatgcgttgataagttgctcctgcgttttttaatccgaacggcatggtgacgtagcagtatgccccaaagggcgtgatgaatgaagtcttcaagcagtcggattccttcagtcggatctgatgataccccgagtagcaatccaaaaaactgagaagctcacagccggcggtcgagtcgactacctggtcaatgcgaggcaacccaaaaggatctttgggacaaaacttgttgaggtcggtataatcgacacacatgcgccattgccctgttttcttccgaactagaaccgggtttgccagccagtcaggatgaaggacttctttgatgaagcctgctgctaacagcttggttaattcctccttgatcgcgtccttcctgtcttgtgcgaatcggcggagtcgttgtttgataggcttggcatcttctttgacatgtaaggagtgctcaatcacctctctgggaataccgggcatatccgaaggtttccacgcaaagatatctttattattttgaagaaaggtgatgagcgcgctttcctatttacaatctaactcggcgcctattacagcagttttagtaggatcagaaggatctaagggaatctttttagtctcggcttcggcttccccactttttgaaatcttggcagcgggcacttctccttcgctcaccgtggttgcagccagtcggatttcctctcgggcagacactatctcgcgggtttgggccatgtcgcaactctccttgtcgcatgtgacagcttgcttgatgtcgctccgtagggttaggactcctcggggaccaggcatcttcatcatcatgtacgtgtagtgcgggacggccatgaacttggctaacgccgggcgtccgagtatggcatggtatgctgtctcgaaatcggcaacttcaaagctgatattctctgtgcggaagttttcccgagtgccaaaagtgaccggaagagtgatctggccgagtggagttgcggataatcctggaattactccatgaaaaggcgcattgcttgattttaactcggagcgagggatctgcatatcatccaaagtcttggcgaagaggatattgagcgcactgccgccatcaatgagggttctgcgaagcttgacgttgcggactactgggtctagtaccagggggtaccgccccgggtggaccactcggtcaggatgatccgagcggtcaaacttgattgcaatctctgaccatcgaagatattggggcgtgtcgggctgaacagcgttgatctcccgttcagtcaacttctgcttccgtttagactcataagccatggggccgccgaaaatatggttgagctctttgcggtggtcttgaaatccagccggggtgtcgccgtcgtccttcttccttgacgtgctttgttcctcgtcggagttcttccgagtagacttggtgtactgctccgcgaactgcttgtagatgaagcactctttggccacgtggttggagtttggatgatgcgggcattgggagttcataatcttgtcgaaggtgttgacgcgcgaacgctgtcgagaagagtgagcggcggttgcaacaagttcctcaggcttacgcttgcggtccttatgattgttacttccacctcctcccgtagccggcgtatttttcggcttccaactgggacccgactgcttcgatgcggtgacggcgtcttcggctttggcgtactcgttggctttttcaaacatgagcttgactgttctgggaggtttgcgcccaaatttgccgaccaattcttcgtggcgaatccctttggtgaatgcggcgatgatgacgtcgtcggtgatgtcggagatcttgttacgttgttcagaaaatcgccggatgtaatctcgaagggattctccggacttctgaatgacgttgtaaagatcatattgcgtgccgggacgctcgaaggtgccttggaagttggcgatgaagtggtcgcgtagttcggcccaagatccaattgtaccacggggcaatccatggagccaagatcgggcggaatccgctaaagccactggtaaatagttcgccatggccttgttgtcacctcctgctgcgcggattgcgagaccgtagacggtaagccacgattctgggttagtggtaccgtcgtacttctctattccagtcggtttgaagccggctggccaatccactcgacgcaggtcgtcggtgaaggctgctaccccatcaaggtcgtcgtcgtagcggtctggcgagtggtgacggcctcgagctgctcggcgctgcatgattgtgtcgcgaagatcgatggggcggcgacgaggcggtgaacgtggccgttctactcggcgctccccacggtagtcgggaggcgagtgcgcggaccgctcgtcgtgacccctgctcctgcgattggatcctgcgccggtgatgctgaggcttggatgacggtagtcctgagatcggaagtgtggaactcggctaccagtcggcgtgtggacgctttcggagttaactggaaccgaggccgcaatcatggtcttggtctggttcaggatgttgacgacatgatcagattggttgtgctcgttttccttgaggagggtgtcgaggagggtgatcgcggcaaccgcattctgctgaggggtacggaaaaccggtatcccttcaacatcttgctggccgatgagatcacgcgctcggcgcccagcttccaaggttcgctgccgtcggtcttcagcctccttcgcgttccgctcatgctcctgctgctcccggcgtagtcgctcttgctcttgtgcttggcgctcctgctccagtcggcggcgctcggtctcgcaacgtgcttcggcttcccgggcttggcgctgctcctccgtttcattgtcggccataaagacgccgaagaaaagaggagtgtagttgtcttctaggcttccgtcgaagtcgtcaagatccacgtcgtcgtagtagcgagaaccgaactcatcgtattccacgatttcggtgggacgtgagtcgacggtgggagagctgtagtagccatccagttggtccgttgaaaccgtgccgagtggttggaggatgacgccgacttccctgaagctaggcgaaatcggtgttaagaccgacttccgcctaggcctacgggatggagacggcgtggtggtggagacggctgccgaatcgtcagggagctgcatcaagatcgatgggtaaggctcatcgtcttgatctggcgttgttggagtagatgcgatctcggccgagtggtttgaagccgactcgatcgagatggtcttgaagcaactttctgccgcgtttgggaatccaaacggaactggaagtcgattctctcccgactggtctgattccgagtcaaggagagaaatcttgccgaagttgttggtgacgaagtcgaggctgccgaaccgaaacgtctgcccgggtgggaagacgaggtcgtcgatgccggtgacggaacccattgcactgatcggcgaaaagcttgacgctacccctacctggcgcgccaactgtcgaaactagatttcgacaataataaaagggggtggctatcaagcttggaaagtgtatgggtttggagacaaaggatttatacaggttcaggccttcttataaaagaagtaataccctactcctgtccggggatgaatccgccgagtgtattattgattgtatgattcgggaaaaatcagcatatgcccctagaggcgcccggaccccccttatatcttggaaggagtccggattacaaaagataatctatattcctaacggaatatgaagataaaggtaaaatacagtcgtaaccgactaagtctcagggtgtttccttgatacacaagttaagaaacaaacccgagatacagataagatattctatctacattaggtatcctgtacccagttcgaataccatcgccgtgtagatatgggatacccataatctccacagtggtcttgtcaatgtatgaacctgaaagacaaccaaacaaatggtaaggcagtctaccaagcaagcaaacaaatatacaaaaaggcaaaccaaaagatgaattccttggaacaaagggacaaacctgtcctaggtcatagtcgtacatatgtaaatccaagctaagctccttgacaggtaaagcacttggaagcacagtgaacacatggtcaagttgattaagttcaagaaatacgattgttgccttcactgattttgggcaaccatgaagcatgattgagattgcctcccctctatacccaaaacgcgtaagacaggaaacatgaaattcaatcatctgcacctccgtaccccaaatccgcagatgttgaagcttgtcaagttggcatggtattaccaaatcacccacgccagtgcacacactgatatccaagtcctcaagaagagaacatcgtgacagcaagtctggaagatcccccactatttttacatactgcagcgcgagccttttgagcatggtaaaaccagaaatatttggatgtacctctattaatacaacagctaggaacaaagactcaagagcagggtcatgcttagcatccaaagcatcaagtgagaagtggtaaacatcttctagcagatgtttccgtgttggccatctgtttctgtgccgagattgtaggttaacatctataacctttgccatcgatatgtttgaattcatccttgttgaggtcacagttgatgctgaacttatttaaccctattcccttgtggcgtcggacaacatgatttactgtcttagagaagtaccatcggtcaattttgagagtaccctcatcagtaggctcctgcttggtgccatcaaagcacagattagggtggcatgtccagagcattctccagtttcttgacacaaggctcgctctagccgcatctctgagtggcataaaagatactataagctgctgaatatcctgtcattacaagagaaaacaaacgaaggcatgctcaatcaatttgtaggtgctttgattctataataatagaactcatccgtgcaataaggcccaatgtttcatctatgtgaaaaatcacacaggcaggcaaggcatggcaggtgttgatagatgataggggaaaaaatgaacttttttttttaccccggatagagagaagtcagggaaatttagagttttttttgggaatacgcaagatgcgcatctttgtattaagagaaataaagagtatttacacgaacccaaacaagaaaataagagggggacgggaagataggagaaggacccaaagatcttaagcctattctcacgccagcatatggaaacgacctaaaccaagacctaaatgattagcaccggtagcaccgcatgtgtcaaccgccagagagttgcttccgccgccatagctcgggctatctctgaccagggcctttgctgagagttgaaaaccctattgtttctctctttccagattgtccatgcagttagagttgcaattgtgtcaaatccccttctgctagccgctcccactttaaggcgggagttgcaaagccagagataaaaggagtcttcattcagggggagacactgcggtagaccaatgctggaaaggacagcccatcaaagttggcgagactctgggcaagcgaccaagatgtgatcaatagtctcttcatgttgatcacaaaggacacatctatccgggtgaggcaaccccctagaacgcaggcggtccgccgtctagtagcgcctttttgtgaccaaccaggcaaagaaccggcatctcggggagggggggcgaaggtcttccagatgggttcggattggaaaggaaccctacctagaaagagtgcccggtatgccgaacgcgaagagtagactcccgatgcttcccacttccaaataaaagagtcggggtggtcagagagccgcacagaggacctcaggatgctccagagctgaaggtactcaagaatagcctgcaaacccagcgcccctgtgcagtctctaatccatctcctgtcttgaagggcctcggcgaccgtcctgcgacggcgaaaacgtgccgggacagccgcccaaacagccggagcaatgcagcgaatggaggaaccctctagccaaatgtcttcccaaaaaagaatggactccccattgcccacccaacgcagactgttgaagccgtcgcaaagtttcgctcgttcaaggaaaccgggatgttgaggccgtgccatggcttatccggcgaagtgcgctgcaaccagacccatctcgatcttaaggcgatgcccatgcgatccaaatccggtacccccaacccgccgtagcattttggagcacaaacaccaccccatgcgacccgacacttgccaccatgggtactgactttgccggcccaaagaaaacccctccttatcttgtcaattcctttaattacccacttgggtgcatcaagggcaatcagcaaatagattggaatcgagcttaagaccgaattgaccatggtgatgcgaccggttggagacataagatcatattgctagtgcgggagccagcgagcgatcttgtcgacaaacggctgcaggtcctccttcttgaggcggaagatggaaagaggcaggccgaggtatgtgcaaggaaacgaagctagcggacatggaagcgccgattgaatcaaggagaggtcatcatccgagcacctgatcggaagcgccgaacatttgttgaagttcgtgtggagaccggaagcttcgccaaagatgcgcggcactgttgtggcggcctccaaatcggcaaccgtcggcctgacgaaagcgaccacgtcatcagcatagagggagacccagtgagggatccccagcggctggaggagccccaactcttctaccttaacaaagagggagctcagagaatccatggcgaggatgaagatcataggggagataggatccccctgacggacaccacgcctgtgccagatcgtctcccccggcgccccaatttagagttttacctcagggaggtcttgtatctggaaagatggcggcggcctgagtgagtcgctgacactgcggtggtgctccaacctcctcaccttggtggtcgtcggatactccattccatacgctgcagggggagcgagggagacgcaggttagcagtagcagtagaggagagacggggaagggagaaacctggacagagtgtaacaacaacttaacaagggatagggtttatcatattttgaacccgactcgaatcgatcgggaaggatagagattcgatcggcaatcaagaaatccatctagtagcatctttgttacctgcggagaggcttcaatgcgctaccagcgagaagaaaccggcgcatgtccgccatgaatgatggcaagctagtagagtagatagatgggacggacaggtcggaaggagatggagctgacaagtgggtcccacatgtcggtgacccgagcatagaggtaggccgctcaggttcgcgatggctcgataggcatcctgtcttactataaagttatcccccactaactccttaagcttaacatgcaaagatgccacatcatcatccactgacaagatgccacatcatcattcactaattaacaagatgccacatcatcatccactaacaatcatcacatttaaacatcatgcaaacatgctatatcttcatagtttttataatttaaaagcttttcaaatataaacatattaaattatcatccaacataattcacataatgttttaatgtatatctttattatattttatgatatcctatatacttatataagtcatcctcacttagttagtgcttaaatgattaatctatggtccaaattatctctctcctttttttctctaattaagtcatatcacatcaattatttttagcctttagatgattaatctgcggtccaaactatctccctacttttcttcttccataaagtcataccaccttactttttacgaatgaattaccattctatatactatttaaatttaaattatcataaaccacattaatttacttaatctgatgttatctagctatcttacacgttattttttttattgttatcatactgaattctcgcagcaatgcgcggggtttcacctagtattttgaagggttgaaccctagtttgaagctgtcagaaaacaaagtgcccaaaacacacacgcataaaaggaagtaggcttcaggcaatatctaagggcaagtacaacggttcagcgagacccgtcgacatgcactgtttttttgcgaaaacccccccgcacggcgctcgcttcggcccatccgtcgtctcgttcgtcgacgaggccagcgcgtgcttccaggcgaagcgacggcgatgaagcccattgtacaacccaatccgggtaggctcgagaggcgcgggatcagctgcacgggatcagctctctcgcgcgcggaacaggttcgcgccttcctcgcccgcaaaatctctctcgcgcgtgttgaaatagccccccctgcgttccccatccaaccctatttcgatttggccaccatgtcgcggcaggcacggaaggaggcggcggcggcggcgcaagatatgctgaagttggatgcggctcagatgcgcaagccagctgcatcgcaatctcgaaagggtgcggcggcgccgatgcggaaggcccagggaggagctcgggcggcgtcgatggtgccggagcagagcagttcagggttggcggcgcgtgtgccagagcaccggagttcgagatatggcgcggctagtccaccaccaagctccttcaccgacggcagctgcttcttcaacggcagtgccggcggcttcttcggcaacgccggccaaagccctagtggtcaaccatggagttcttaatcttcagatcctgcaacatggtactatctctgaactttgcttctgtgatgagctcaatgatgggaatcatatggctaggaattaattttagatgttatttgcacttccctcgcttatacaagatttgggatacactgtcatgagtttcagtattgtggttgatgcaaagattgattgcactggtgcagatttctttgatagtttaataaagctatgtaactagtttttatccactgtataacatcaaagaggatgaagcactgaaacaaacattagttcctacttttacacataacattagtccctagttgctttcattgctcatatatatgtgtaaaatatggcaggggaaacaatgcaacacctcttggaggcttcataaacttgatccagcctaacttgtctcaacaatttaattttgttggagaccaaaatcagtcagaagatgattactcgactcctatttcagctagggacaatacatatgttaatgttgacagtggtgatgagacacctaggactgagaaaagaatcttttggactcaagaagaagatgttaggatggtgagtctcactgtaaattcactgtgtttatagtttttttacttaccataacagtccaagtgataatatatgctaattaacatttacagatgagctcttggctgctcaattcaacggactcaaccgttggtgctgataggaagaatgaacaatattggactgatgttgaggctacttacaatgagactacaccaagtcataggagaagaaatgccaagcaaatcaaggaccgctttcataaggtaaataagtggactgaccttttccatagtgcttggttgaaggctagaatgatttatacaagtggctataatgatcaaatgtggattgagaaggcccatgtattctatataaaagacaatgagaaactcaatctaggtccttttgtgttgatggaagtatgg

SEQ ID NO: 28838 - DNA, 1609 bp, Oryza sativa
  unsure (1)..(1609): unsure at all n locations
caaagaatatgaactagtctctgttttgctatgttttggaatccaggagcacatcaattgctaattggaagtagtctctgttttgctatgttctgtttctgggattgttttttttttggctattgtgaactgttttttgtgaactgaaacgtgtcaatggaatgtgaactgatgggtcattgcaatgtgaactgatatgatgtgaaatggaatgtgaaatgataaggcaatgccgtgtatgcatttgtatataaaatcaactgctctgtgacttgtatgcatcacaattgtggcgatggaggcctctggtgcctctggtggcgagcatcctggtggcgacgatgaggggtctggtggcgagttcttcgcctctggtggagatggaggcgatgaagatactgtccttgaagaaatcgatccagcggaagtatatacacttgaagattttctcgccgaagatgaaataatggaatcatttcgaaggaagattggcgataaattgaaggccaaaatcgaaggatcttcttctggtccacctcgtcgtcgccagcgtcaaagtggacctagaaggtacatacctaggccaagagaaaagggacatgaagatttagttgctaattatttttcagcaaatcctatctatactgatgagcagtttcggaggaggtttcggatgaataagcctttgtttcttcgaattgtcaatgccctgtctaactgggatcaattttttacccaaagagttgatgcaacaggtcgagatagccactcacctctccaaaagtgcaccgctgctattcgaatgctaggatatggcacaccagcggacgcactagatgaggtactcaagattgcagcgagcacttctttggaatgtttgggaaaatttgccgtaggaataatngaaatgtttggtagcgagtacttgcgttcttcgacaagtgatgaactagaaaaaattttacaagagaatgaagcttcggggcttccagggcatgataggaagtattgattgtatgcattgcaaatgaagaattgtcaaaaaggttggcaagaaatgtttatcaaaggtttcaaaaggtaaacctacaatgatccttgaacgggtagcatctcggggcccttcgtatatggcatgctttttttgccaacgccgggtctcaaaatgatatccagttgttaaccaagtcaccattgttcattcatgcgattaaaggagaagccccccgagtgagttatactgtaaatggaacgcagtatgacacggggtattatcttgccgatggaatatatcccgagtgggctgccttcgtgaagacaataagaaaacctcaaacggagaaacataaattatatgcacaacgacaagaaggggccagaaaggatgtcgagtgtgcatttggcgtgttgcaatcccgttttgatattgtcaaccgtccagcacggttgtggaaaaggaatgatgttgttaatataatgcaagcttgcgttatcctccataatatgatagtggaagatgaaaaggatttggttaaaatcccattggatttgaatgaaaatccaagtgcaaccattgtcctaccaccggaagtgcaaacaaatgacaatc

SEQ ID NO: 28839 - DNA, 1095 bp, Oryza sativa
acctgtgattttaccctcattcatactacatagcaatttttaggttaaaagcggaggagtgtggaggtttatcaacgatatagaggatggtaaaactaaggtacatcagaaataatatgtaccattacacgtattgaaacatagtacagtgacctcggtgcagggttatggtccattagattcatgattcctgagtcaaaaatctttggcatatagacctatgcaatcttgaatgggtaaatctaacactaagcctaacaattccagaaatcaacctacttatttttgagggagtaaatagacatgagtagaaataccacagtacaacaatgcgatgaatgtgtaatattaaaaaccataaggagaaaccatagaatacattcttttcaaaaaaaaaaaacatagaatgcatgacataagatactgtaaaaaaatgaggcctctcggtaacacacctcgtagttctttttggttagcctctcaaggaacggtgatttctctaattgttccttgctgcttccggtaatgtaaaagatgtccttctgccctggcttcatccttgaaatgtactcatcaagagaggcaagtttgccttccgacttggtactgaaacagataaaaactcagttctattatccctcgcatatataactacagcaattagtggacattagaatagaagacaaacctttcaaatctcagaagctttgcaagacggttcctgttagttgcgtcttcaatgatgcccaacttgactgattttccaaactcattccagaacttggcatactggccctttttctcctccattgcacttttttcttcatctgagtacagaagattatgtgagaattacatcataaataacagtatatgacctgtgatccacagagaacttgttacctgtcttatctttgttgctgtactcatcaggatcttcctcagcaagttttctaatcatgtcaagagctttgcggattagtttcttcttgatggtcttcaggctgctatgttgttggagcatttctcgtgatacattgagaggcaatgtgtccgagtcgacgagaccctacagataatagcttataggtttag

SEQ ID NO: 28840 - DNA, 1772 bp, Oryza sativa
aggtcacccccagtctgcatcttttccacaaaagctgcaaaaatttcaaggaattggtatcactcaagtttaagttaaatggcacttggtaaaattctctttacaaacaaatagataatactaaagttttagcaagagaatacacataactttaagagaaatcagtacaaaggagtaatacctgaagttccagatttggcaatggtcccaaggttcttaatgagatcttccttggtcataccaatacccctatcccgaatggagagaatcttcttctccttatccagcttaatctacacgtgcccacagcagatgccatgaagtcaatttccaaaacaagatataccacacaaaaaagactatcagctacgaagtttaatatacctggatttcaagcttagcagtgtcaccttcgcccaaaacctccttatcagtgagagccaggaacctaatcttgtccaaagcctacacataaaaaaaaagcacacattaaattcctagcatctactaataaccttaagggctcatttggattggaggcttttcccgggaatttcataggaatactgttcacatgggattttttcctatcctatcgttcggatcataaaaagtggttatgggaaaactgtaggaaaaaatcctttgctgctgattccacaggaaaaacggaggaaaattccatccactccaatctcttgtttcattccctttgacagaatcaagccaatcaagcaataaaacagccactagataataagcaagacagacgggataagcaagatagcggtagataataaatacagtatacagattactcctcgattactttttatttcctttcctgtaaaccgaatgctctcaacttttatattcctgcgtttttcaatcctatgttttcaacgtgatttcctttcatattcctacgtttttcctatcctgtgtttttccttttcctgtgttctgaataggccctaaaaagggagtcaaaatgcaatacaactacatacatcagaagcattggagatgagctccctcaggaaaatgtccttgttgctgtagagtgagttgatgatgatgtccatgagtctggacacctcagcctggaactcaaatttctccgctgagctcctgagggtcttcctcgagattgactcagcctccctgcacacattccatattgctcatacagatatcaacaacacaataagatggaaacgatcagcattgatcagaagatcgtgcacacctctgaacaacctcagagtccgtggacaggccatggggaacaccaccaatcttctcctctaccttcggcggatcaactaactcatcagtgctgtcatcagcattgacttggagcttcttagctgcagtacaggaagggtcagaaccgaataataatttgaatcatgtgttgacttgcggtagagcaatgtgtgtgaattagacttgagaagcctttaaaaatcactaagatcagtaagttgggggcgctagatcaacaacaatcagcactagatttacactgaactgacttgatacagatgtattattactctcaggactaaaccctatttaaaccccgcatataatgagccctattgcggacaaaattacggtgcgcaatagcagattacggatctagaactagctaaatctcgaaatcgcaataaaccctaccattacaacagatcgaagtggccgcgaacccaacaagcgagatctaaaacaaaaatcagactagaatcaccaccagagatcgcacaaag

SEQ ID NO: 28841 - DNA, 2574 bp, Oryza sativa
aaactccacaaaaacaggttgacatatatcatggaatagcttgccactacctaaaaagctaaaagcacttcctgtcgtatatgaataatggttgaagtgacaatcacattatcagaattagctcttcatagaaatgaagaacgtgaaaagggattctccatattctccaaaagttagtggtgctaacattatgcttctatgaacaatgatctctcctaacaacagaactggaggtagtattgcatggacctattttcgtgggtatcaggctaaaaaaccatgaatcaggcacacactggtaaagtaaatgtctagaagatgtacgtcctgattccaaattatcatttctggagaatatactatgcaatcaacaaagcatgcaggtagcatcttgaatgcttaggtaataggtacaatatcaatgatgtagaggaagcatatggtgtttgtacgaagtgttttttttataaatcattaatttgatgaagcataagcgcacaagtaacacattgctacttgcttagcagcagaacaaaatcaacatgtttctttcaccagaaaaatatgctatacagtgcataggctattgattattgatttttttatcagtcagatatatagtgcattcaaagaggtcatagatatccagcaaaaagaacatgagttaagcattctatcactgtctcgacaagatgaaacaaccaccccacccaccccctcccctttccccaagaaaaaaaacaaaacatttcagtccagatcagctgtcatttcactacatcaaaataccaatacaagataatagactgcagcggatgaactaaacttcagaataatggctctggagcatggttattaaggcgctaaaggaaacctaaggaaccctcatcatgccttatgccttaaggtcacgccttacgcagtgaaaaaaaaaaggaaataaaggactttttcataataattgcagagtccaggactaaaatggaaggctttttcatgacatttacatattccaaggactaaaatggaagatggcaacagatattttatctacccatcccaatccccaatcccgtcgtcacctgtttctccgccgcttgctcgcctccgctcccttgccccggctgccgcctctatcccctccatccactctctcttcccttgctgctgccgctccttgtcattgctcgtgctggatctgggcaacgccagcagttggggacgacggcaacggtgatatcctagtcagatctttttgttcctcccccttcccctcccttcccctgctgcctccgctcttcatgactacggattattgctgccgccgcttctctaggatgggtttatcacttgtttttgccctttctcctctagctttctcgtaaggcggagtggacgccttacaccctggcagcgccttactgccttagggatgccgtaataaccatgctctggagcatgaaattttatcctacgttgactcttcttacaagcatttagtttgtaaatcaaggaaaagagaactaaccaagctagtcataatcttttttagaaggccatagataacagaagattatgaggttgccatactgaatagcagtagctggtagccaaattagtgttttagacagatatagctagtctacatctatactaggatttaaccatgctgaaacgaaggcaaaaggtagcagctagcatttagtatgttagatatatatagttagaagcagtacatgaaatttgcaaaaacagaaaggaaacataactgaccttcatttcttttcagaatttggcatacagccgacaggcatcgtacccatagccccacagactgggagctttgcagatccagattttgcaccttggcattggatactggcaatatcacaggcaccttgccccaacacctgaccactcacagcgccatcctcgcccattgttctcacctgcatccctggactgcaatacatctggtcggcacatcgaaagtcacaggagttcataacctgggcaccaccaagataacttccctgatcaacactagaaaccaaatcgatgttcttcactggcctctgataaggaaaagccccaatctccccttcaatccttcctctaatatcaacgagcaggcaccgcagcctggatacctctgcctcgagcgtggcatggttctggagcttcttcatgagctgctggtttagagccctcaaatgaacaacctcctcctccagcgaggcagtgtgagctttcttcttctccctgtacttcctcacagcggcacggttacccgacggccgcttcttggaggcattgttctccgtcggggactcggcggtctcggcagcatccgacggagtgtcggatggggcggagacgatcttggtgtggacatggacgcaagtgttggtgtgtgagaggtcatgcacaggcgggttgcaagtgtgggtgtgggtgcatgcatggtgctccgtattcttgaggatgtcgtcgaaataactgtccatggagcaactgccgtcggggtcaacaacaacgaccggcgggcaaaagaatgtgttccggttggagaaa

SEQ ID NO: 28842 - DNA, 32539 bp, Oryza sativa
  unsure (1)..(32539): unsure at all n locations
ccgcctgcaaatgggcggcgagggggggcatggaattttgcaggcggcccccttgccgccctccgctagggcgattttgcactgtgcggggggccgcctgcaaatgggcggcgagggggcatgaaattttgcaggcggcccccttgccgccctgggggagggcgattttgtaccgtgctctatattttttttatataaatatcaatagttatcaaatctttttatattgaaaactatacaagattaaaatctccaagactggtaaaatacaattttattattttttagggcatatttggaatgttaccgtacaaatattttgttaatgccaaaatataagcaagttttggcactaccaaatatttggtaaggtaaaattgcatttgatcatatttggtttgctgccaaaatgtaaaattgtagtgaagaatgttgtacataatctcaattctagattacgtattaccaattaataggcttccattttcgtgtgtggtgtggtagtgggaaagaagatatgaagaggttgccttcagattgtcaattatatagcgtcgttttcactgcaatatatgtgaactcaatgagatacattattcattagatgtgacaagacgatcacgcgtgggcgtgattcactttatgtcaacaggcagcgccgaaagttgatagtgataactcgagctgccgcttttcatgtgtgctgttgtggactgtgcgcgctactggatatggcactaccgtgaagcgccgaaagtgtgttgttgtgagcataagttgttcaagcaccatacgaatgaaaagaactacgtagacgagacaaacacaagtagtactgcagtagtaatagcaaaagtagtactgctttacaagtttgtaagccaaaagaaacggtcacataaggactgaagaggtagaacactactgacgaggcctcttacccctgtccctcctaccctgcgccctaatgtgcccctgggagtacgtgagtcggtccgggggtacggcacggccaacccgtcctgcctgtacaggtgtgacctctggctgctcctgagtgtgcgcctctggagctcctccaagctgagaggagcctagtacgtcctggtggtctgcaccgtgcaagtcgtcgtcgtagaactggctagtaggaccagtcctaccggcgtgagacgaagaggccccagtaccgaagatcccggctgcaaatcctgctggacaaggaccatcagtttcgtacaggtatttaacagtattaataaaatcttaagtaccgtgtgggcgagggatcgacgctccgtgagaggaagagctggcgaacgcgcccgaagaggtggcgaacgcccctgcggagctcgcggaagcgccggtcgtgcctgcgaacgcgctcgaaggcatacgaggtcctgcgatgaggaaacgtgcagttaaaaaatggtgacacattcgtgcaaaagctgaaacaaaaaagaactaatatctaggctgaactgtaccgtgcgaaaccggtgctgtaggtcgcactgctccgaagctaggggcgctcgaagacaaacgaggtcctgctccgacggtaggaccgcgaggccgtgggtgtaccggaccagctggaggtacgacgtccacggcgctgcgacaggagaagacgcgcatgaccgcacgcatcttctcctgcatccggtcgaaggtcgacctctgctcaacgtcagtcaagtgcaaacctctactcaacctcacctggactgcggtgatatcggcactgatatcccgtgccgcatcagcctatgcaagatggaaataaaaaattcagtagttgtcctatattatgcaagataaatgacataattgttggaagtaatacaaattggacgtaccgccacgaagtagtctcggtcacggtgcgtgggatacgcgtccgtgacagcggcaacgtgcggctctggggcgtctggagtgaaggtcacacgcgcacgagtgcgaggaaggtaccagcgaaggtagtcacggtagttctcctccgtgtgtgggaagagctcgttgatcacctcctctgtagctaacacccagtcgtcaacgtactgctgtacacgtggagcccaaagtgcgcctgctagctgtccccgtcgagtcaacctgtgaagagaggtaaattgtatggctcgatgatgtaattatcataaaaatttagaaatgaacaatccgaactcacgagtggtcggcaggggggacggtcggctgcacgttgcccggaaacacctgcctaagtccgaactgtctcatcacacgctgcgggcagtgaggctcaacgaaaatgtcgaacaccatcgccaggatggtgagccagtaagcctggtcgcgtgtgcacaaggacgaaagtcctagcggtgctctcgcagcgacggctttttctgtgtacggctcccagatgacgtcgctcggctggagacggtcaaactcgaacacgaagtccgggtaaccacgtctcacctggacgtgagcgtaacgacgctgcaataaacatgatcggaattagacatgttatgtgaaggaaaaaaaaagaagaggactgataaacttataacgcagcgaagttgcactaaccccacgtcgacaccagtaagtccccatcgtgggaccgtcctctggccactgcgcgctgcgaccaaccccgtagggtgcgctgtccaccactggtcgccctatggcaaacctctcggctgcccaaagctgaagcaacataggacagccagcgatgatcgctcccgcgtcagtcttcgtgcacgcctcacagagggcacggtacgtggctgctagcacggcagaaccccagctccactgcggcacgtcctgtggctgagcatccgcgatggaccgtgcgtagtggaccagccggaagtccacagcgtgcccgtgggtgctagtgaacatcacccacccgaacaaccacaacaggtacgcctcaagggagcgtcggaccgagtaatcatcagcgtcagggtgcagaaggtccgcctacagttaagaatgaaatgttagtacaaaacactcatccggtcgcaaataagcatgtatgataataacaacttatttacttacagtgaactggagcaaccaagccttgctaggcccgactgtagagtacggaggaagggtggtggtcggtcctaggtgtggaaggcgcatcacctgctcgaagcgcgcagtgatatcctccttccacccaaaaacaccgtcgacgggaccaactggtgctcccgccagcggtagcccgagcaggtacgacacgtcctgcagtgtcggagccatctccccacagggaaggtggaacgtgtgcgtctcaggtctccagcggtctacaagagcggcaaggagtgaccggtctgcatcccaccgcttcgctgggtcacggtcgtccgccgccgcctcaacaagcctacaaagtggtagaaggcctgccgcacgcaacctgtatagagcaaacttcaaacataagtgcaaaacaaagcaaagttgagttcaaatgtgaacatacgcgtaccaaggaacgtgacgggggtcgacacgcaaccactcgcgcgacgtgcgtggacggaaggtgccgagctgtgcaccctcgactgctgacaggaacgagcggtggttcctgtcaatcccacggttcaacagcgccggtgtgtcgtacgccatacctgcatcaaataggttgatcagaaacatataaatattagttcaacataagtaataatgttcataagcgaattactaacacatattaaccaagagtccaaccaacaaaaagtgtttagtccgaccactcatcccgataccattatgatacaacnccgaatagttcgcaatactactagtacaccaatagtcggaggtactcattacaacaagattgaattgtaattacacgatagaagtatttagtccgaacactcattacatcattttatttcctaaatcgaaagcattgttacaccatggaatcgcctgctgcgcgacgacgccttggccttgcgcgcctgcttgttgttccttcaccaggtggtcgcctaccatcacttgcctgtccagatggactagcatctgcgccgcttggaacttctgcattcttcgggcatttcttgtaagtatggccgcgcagatcacacttgctgcagcgtaaagtcctcccacctgcttctgactcatccatatcatttctgatgcgtctagtttggcgtcgaccctttttcacccttaacttagatggatctggaatataaaaaacttgggcactcagcgttgtgtaagatcctgagatcccgaacccatatatctcctcactccatgtatgaaagattgcttctttcctgaaataatttgagacgtacacattgggagatatgccacaatcaccggcagcagcaagaacgtgtgagcaaggaaggtgatgaagcttcggcttcatacaactgcaggtacatccaccatccgccttcaagacacattcctgcacggcttgcttgcgatagataccacgcctgctcctatcaacacacattatttcataccgatgcacttgtgtgccttgagcaacaactctatgtctccgtgcctttttgattttatcttccatgtactttgtcactacgttgccaaacactatgttgttatcggccatggacggaccaattttcttgtatcgatccctaaagtaggcttgcgtgccgtgaaggatgaattcaacaatagcaaccaatggaagtacccgaactcctcgcattacccagttgtacacctctgccaaattggttgtcattatgccataccgagatccatcggtgtcgaacaatagagcccacttctccttaggctcattctcaatccactgagagaaatttctgatggccgaccctgacctccttctcattgttggtgggtcatcatgtaatgcaccaagaggtatgggaggctcgtcaccttcaacttgtggtctgcgagattgctcatctgtttgcttcgttgtcaactcatccaactggtcccacaactcattaaatttcttctcttggttctgtgcacagagcctcttaaagagatccataagatgcttgttcttgaattgcttgtagaaatttgcacccatgtgacgcatgcaccaccgactccgaacatcaggccacttagctggaagtcccttctcatcccaaccgttctgcaagtagtcaatagcccgcaacatacccgcatgacgatcatgtataaggcaaacgttgggcctcatacgcaccactgcaatgtgcactctctctaggaaccagtaccagctttcagtgttctcactctctacaaatgcgaaagccataggtagaacctggttgttcccatcacacccaattgctgtcaatatctgacctcggtatttacctgtcataaaagttccatctatgcatagaacaggtcgacaatgcacaaaagcattgatgcaagcacccaatgagaaaaaggctctttgcagcacactctttgttcgatcttcaaccgatgtaaatgtatgtaggtcatagtaagtattattattcctctgggcaatggtggctaacaaacgaggcaaattatcataagaagcttcaaatgtgccatacctcatctcaatgatcttttgtttggctctccaggcctttgcatagcttatggtgtacttgaatttgttctcgatgtgcctaataattgattttggttcaaagccaatgttaccaacaacactgctgtacatctcacttgccacaaaagctgaagtgatgtttcggtgatacttctccaccccttgtaagtagcacttgtgctcggtcacaatgctaactttccaataatcattccatttacccttatatgcatggacacgccacggacattcttccttcatgcacctcacttcatacacataatttgttgacttgaccaccctaaactctctctgcaatgaaactgcccaatgcttcaccgcctccttcatctcatccttatgagcataccttgcaccctcaattacctcgttctccttatactcccagggtacatgatcaccctctgatataacaagaccagagaagtcctcatttgcccaatcagtggccattacatcaccttcctcatcggatgatgcgtcgtcctccgcttgctcattatccgaatcttccctctccatttcatcaacaattataccgactctctccccctcatccgccatgcccatggcctgctcctcccttggttgattttcctcattttgcatcgatggtccaacaacatcccctgcattgctaggaccctccacatcttcggtttgcattgaaacatttgtatctttctcttgtaccgacacaaatataacgaggggccatgaccgttcaaaagccatttccacataccgtctccaagcagcagtgctgtccatcggcattagttcccaaaaataaccttctattgcacgactcactacaacagatactgacattgtgtagacttcttggtctattctaaatcctctcaacaaccaactataaattgactcaaatgttctctccgcaggcctatcgatgcccttagatgtcattacaaaatctgacagatcaacaccatctggaccaaatctaatatttccttcaccgtgaactatctgaaatgtgaccttacttgacattgtgcctgatgaaaacaataactgcgttaacctcgcatttctgtactacgccctaagttacattctctacaatattgttctctaaatttctaaaagtaggttacattctccagatcaaactaaactacatcttacaattaacactattgtctatgtctcaattcatactattatattctatgctctggatctacacatatgtgctgtgtgctacagatctgctaaaatatatggaactaaaactaaaacgcaacatatgtactcaaacgtaatatattagtacaaatgcaaaagatgtatgggagcatacctgtgatgaagtgagcgaaccagcagggcttcgccgctccccttctgctgccctcccctctctctctttcgtttttttggatttttagtgaatataatgaaatttcacaggggaggggctgggctttataggggggaggcaaaaatcgccctcccccagggcggcaagggggccgcctgcaaaattccatgccccctcgccgcccatttgcaggcggccccccgcacagtgcaaaatcgccctagcggagggcggcaagggggccgcctgcaaaatttcattgccccccctcgcccgagagcgaacggccgtctgccacgtcattttcgccgccctctgggagggcgatttggcggtaggcgactataaccgtcaattttcaaaatggaaaattatttttgtaaaacttttaataaaaaaaattataaataaaaaaaattcctcgttaagagcccgccatggtaatggaaagagagattatagcaagtctagtagtacaacccaccgcttactccaaaaattttatattagcaaaaatcattgtttaatcaatgcaaatgcattgttagttaaactattgtttttctccttgttccgtactctctctcctgacacaagttgcagtgcatggaagttaattggttgaattgctcatgtctgtgttggagcgcgagtgcaggtagcgcttaaatagtcgcccggtgatatactctctcacctccaactcactgtaaaagttgatgtggcaggtttatcgctagttattgtacctgttattaatggcttgatgtggaaaaatgaatggtaatggaaagagagattaatggcttgatgtggaaaagggaagaaatgtccacccctggaaaaattgcctttcttcttctgtttttctattcaactttctctgtttttcgattgaaccctttgttctgaaaaaaaaatgcctttgttcttcctctgtttttcgactgaactctttgctttacctttctcctacttttctatttgtgtttcaattgaactctttgtcttgcctttctcctaccttttctgtttttcaatcgaactgtttgttttttttttttgttaatctttcttcaatacgatagccaagacaaccacctaaaccccaatcatggggctagtattgcgtatctgcataagagcacacgattgtcgtcaaggaaaaaagaactaatagcctatattaaccatcacaatctatataaccaaacaaagcaagcacagcagagtagcagacagctctgaaagatttactccacctcaggacgcagaaacaaattttgcaacaccacagatttccgtacattgcatcattcagcacaaaagtggtagtacatcatcagcgttcaggagttgcttttggtttttcagcacatatattacaagcaacagtagcagtagtgcagcacacccatgactcgtgaaaaaaagaaaacaagagaagacatctgcaaaaactagctgggatggattggggcagagcttctattagtcaggaacgttccaacactgggttgatcgttgaggacgaactatttcttttgctttgcacgatagtcagcagctgctgctttgatggtagacttggcgagtgaggttggctttaggacgctcttcgggttcaaggcctgccgaatcttgaacactgcccatgctgtcccgattgcgtggcctgctgcatccatcccttcattggtcgcagccgcggctttctccccatatctgcagagcagacccaatgtaagagcttaagaagaatctctattgatcatttgatcaattccactacataaggaagaattagagaaaaaggatgtgcatatgatgtgcttcagatatggatgtaggacacgtaagaagtagtagaaatctacatataaagagaggagaaatgagtggaaaggagaataactcgtacttgtgggatacaagaccggtagtcacagttgatgatgtggacagaacattcgttccagccacttcgactgcgtcgcaaatcttccctgttggcatgaattaacgatatgtaagaaagacaatgttaccataatccaaagtgattagctccaacgagccaaattaccataagaaattactgcttcaaagaatgtgttcgggtaaatctgtatattttgttaactgttatactgaagtagatatatcgcataagagatataaagtactatttcatcggaaagcatggcggcaaacagaatatgtccctaaatgtatctaacatgttgagctaaggtcaaccagcatcagaaatgaaaaatagcataatcagtggttggaagtacaaagtggcagcagctgatttaatatgagctgatccagaaggagcatgccaaattaaacagaggaaatggagagccaagaaaaagaattgtatttcattccaaatttaagtcaccagagtacatgcttcttatgctaacttcagatttggcaaaaatttgtatccatcaagttatgcaaattcacaggatatatgcgaccaaaaaacccaagcaaagccttacctacgtcagataattatgacttatataatgcaacccacagggatattcaaattagaaacagaaaaaaaatctgctcatgagtcatgacacaggtgttgtctaggtgagtttaagaataacataaatttattaaattatgaaaccaggtttcatgtctgaataaagcaaacatatcaacactcattataccattaaaaaaaacaataatgcaaagcagacccattatgtaacactaaccagatacaatagaaaagttaaagaatcataccgaatccatcaagcgaagcaagaacaatctctccaggtaacaaattaaagaacttcttgccagcttttgagttagctattgagtttgtaaaatagccagtaacctttacaactccggatagtattccagttgccactttctcagacatttttgtcaccatcttgaccctggcaacaatcacaagcatgaattccttgaagcggaaaattgttaatgcttgatttaacacaatatctccctgcaacgtctattctcatagacactaaaaccatccaaatctaacatgatgtcggtgtgatggcaataataataagcagggagcatacctatttatttaaatggttttgtaacccagcaaaaatctttaaataaaagagaaacacaatgaaggcacattgtatcatcctttttggatagacatacagaaatggtaatactatcacactttagcaatgtaaagttgtaaactaatgaaccatggagaactgaaagcctgaaactgcattcatgccctgataactaaatcccaaatcatactggataaatttggttgacatcggttaattcaaatcacaattacaactaaaatgtgagatagagttactaccttttgatccgcctcaacatctcggggctgacctcggcgtcggcgtcgccgggctgcatcctcctcttgaggacctcgtttccccaccggagcctgtccaccgtcagttcactgcaccacagaatccccttggccaggtgcccggcccccgtcgcgatcgcatttgccaccttcccgccgtactcctccacattgggcgccaccgccgtccagtacgccgccgcctccacctcgtcgcgaaccttgctcgccaacgcctcgccgccgaccacggactggacggagaagctggtgtacgtggcgaggatgccatcgaggcgcgggtcggggtgggagagcgtgaggccgtaatggagagggccggggttggggtcgtcggcggagggcggcacggtgagggagaaggaatagtggcaggggtcgagcttcaccgaggcgacgtcgcgcgcgagcggccactggatggggtggaggagcgcgatggcggcgagggaggtgtcgccggagcggatgcggagcagcgagaggtcgccggcggcgagcgggtagctgcggtggcggtcgatgaggtggagctgcgcccccgggatccggagcaggacgtcctccgacggtggcggggcattggcgtaggcgtcgacgggggtggccggagacgccggggacatcggcgacgagggggaggaggggcctatctggacgggcgcgagatcggccatgctgagcgtggggtagagcggcggagcggagggagcagggctagggttagggttagggttagggttggaggtgttgccgtagtagcagtaggaagccatgggagcgcgccacgggggggaatatacgccgccggggacggtggaggggcggcggctcgccggcgacgtggcgcttgtatagggagagccggccgcgtacgtggcgacggagcccggtgggacccacgcggtttgggggaggtgggtcccgcatggctgtgtttaactaattgggtggttagttttcccatttatggcgatgcttctcgtcaatgacttgtggggtccgttgaaagtgttaactggtggaccatgttttcctggacccacctgtcggtgggtagctttgggtgaagagtaaccggcccacgaggaggtcacgctacccgatgccgatatcggcggagggagctgacgagaagctacgctatttatctttctgacgtgtgggcccatattggccgtcctatccacagcagctttcctccatgagtaagcaacctcgcggccatagcaacagcatccaatccatccatgcccaatgcggtaagtaatctggttaatgatctagtagtaggcttcgtttggaatatgattactacgtgtaacaacttttagttggatggaatgtatcccaataatataaatctggatataccatgtctagatttacagtaatacgttccatccaagcaaaatttactatattttgatatggagggagtagcttttttaatgtaattttcagcttccatatagttcaaattcagaaaataagctaccctttagaaccggaggactgaaaatctagctttttgcatattctcatgccagtcgcccaccaatttgttagaatcttagactgaatttgaaacagattattgacagtgacggagctaaaaatttacaaatagtaagggcctgtttggtacagttccaactcctaaatttaactccaggagttgagtctggagtggagttgtgnagctgtctaaacccagctccacaactctagttcattttgtgagagagctccacccagctccactcccagttttggtggagccgaaactgtttggctgagctccagctctagaaggggtgaagctggagctggagctgtgccaaacaggccctaaggctcaaccaacaaagtctaccgcttaattaatagaatttgttgaatcttcagactttccatgaattcttagatggatttataagggattaaggagataagcttagggcatattcaatggtagagacgagtatggtctcttgaacaatacatgattatttagagaccatgtctttacaataattaagacgataaaggctctaatcattaactcaaaaatattccgttcattaatattctttccttttttttttacccccatgcaaccatatttccatattatagtgattaagagtcgttgttaagccgttgttatgcataataacgatgttttgtctatcctctttcgctttcctccatgtcaacaagtattcctaattaacaacactaagagtccactattgataaccattgtacatgcccttagggctcaagcccatttttttgtctgggaaatgaacaaggcgcagcccgatatccactaggacttttacttgccctgatgtagttgatgcccagcccaacttcacatcatcatcacctattcacactctctaatattctgattcctgcagctttacatatatctacatccactaatcaactttcacaagcaactatctgagaaaacaaaggcctttcagcaatgcaatgctcaaagcagggtctaccatatctatcctgcatctgcatgcaaggaatatgtgccatctacttgcatgagcaacaaacaaaatgcagtgactcaggaatatatcctcctgagtcaaatccaagatgagtaatgaaaagaagaataaaggctcaaaggcaggttaggtgttgtgtgttctttctttcgcatgctttggattcgattctgcactgacggatacgtatactgatttacacatatcgcactatcatacctaaattcgttccccttttaggattcccatctcatatttagcgtcaaattcttcgatcctagatatggaaaaatagacagaaaaaaaaaacatgacaatgaaataacgaatagaactgctagttcagatcattagccccggagataagacatttcaacttcaactttactaatatgcacatattcatttagctattacgcatagcagaaaagcagtagtaatccgcctgttattgtacacgtcaaccacacgcggcaaaagtaccagctaagccaaaattaattagccgctaattaagcgcacacattaacagcaaacaataccgttaagtttggggttcagaaggtgacgaggaggtcaccactattgggctgggccgagtttgggttggagagcatgtggacgacctcgcgcatggtgggccgggccgtgctcgcctcctccacgcacgccatggccaccttgtacaggttcaccatcagcgccaccggctccggcgtcaggcggcggtcggccacggcgaggacggccgccgtgtcggagttgtccggcagctcggcggtcaccttgcggacccagtgcacgatgtccacgccgtcaccgaacccgcccacggggcggcgtccggtgatgagctccaatagcaccacaccgaagctatacacgtcgctcttctcgtccactcgcagcgtgtatgcgtactctgcaaacacaaatagtacataggattgatgaatcagttagatgatacctaacataccatttttagattatcaatcaaaaagatattagtgtaccgatcctttcccaacgcgcataactgaatgtaactacagccattagagctgcacatttgcataactgaatgtaaccacagccactagacagaattttcatttttcagggtagtgcatcacactcgaatcgtttgaaagacaggttatcctgaagctacgtacttcaccaacaacaccatttaagagtggactgacaagtcaataaggagcagatctaccatggagatacagccaagatacgaacgtgatacagctacagtagaacagtatctcctccaattatccaagagagtgccagtgtgccacacacgaggcaacaagacgacacaatatgaatgctagtactccaaaggcaggagactatccattaatccaaaggtagccaaattgccttgcctgccattgaccatacatatggctgcaagatctgcttctgtagaatccaaagaaacagagcagaaaactgaactgaccattaatcacaatcactgctacagccatgcaacggcaagaactgtagctgtaacttttgtttgctgtctgcagaaaaaaaaaagttcacactttggcccaaaggtaacatttgtcctctccccagttgaccgtgcacaaggcaacaaggattgtgctcagaggaaagcacaagctgcagtacagtactagtgcagttccagtggatggaacgtggctgcatctccatgcaggggccccctctattattgcctctacgtaaagtttacaatttttcaatgacacttcgtataatcgtatcagatcatttcaattatattagttatagttagaaccattatttattttaagcacattaaaagtttgttctttgtcatggtccagatataaagtttgttccttgtcatggttaaacagaaaaggtttgttcattcaacacatggatcagaaaaaaaaagtttgttctttcaacacatggatcaggataaacttgttgggtcttggaattcaatatttttcaaacagattcatttcggtaaatttagtactacagtactgtagtggttcgcattgaaaaagaatagtaataagaaataggctaaaaataatatggagaaattattttgggtggttacctggcgcgatgtagccgtaggagccagcaatggcggacatgcactcggaggtggcgccgccgaggaacttggcgaggccgaagtcggcgacgtgcgcctcgaaggcggagtcgaggaggatgttgttggacttgacgtcgcggtggatgatcctcggggcgcagtcatggtggaggtagcagaggccgcacgccgccttcgccgccacccgcgccctcgcctcccacccgaggtgcccccccttcccgccatggagcatctcccccagcgacccattcggcatgtactcgtacagcagcaggttcgtctccctgttcgacacgaaccccagcagcctcacgatgttccggtgcctgatcctccccagcgtcgtcacctccgccgagaacccccggtcgtgctcgccgccgccgcgccccaccaaccgcttgatcgccagctccgccccgcgcgtcacgccgtggtacacgatccccgcgccgcccttcccgatgatgttgtcctccttcacgcactccaccacgtcctccgccgagaactccagcttctggaacgccgtcatcttccacgcccccgaccgccgccgcgccgccgaccgccacgccgagcaccccttcctcgcgcccaggaacgccaccgccaccgccgcgaacgccgccaccagcgccaccagcatcttcttcgagtcccaccgcagccgcagctgggaccccgcgccgccgccgccgccggccatggacggagggcacgcgtcggccacggggccgccgcacagccccgggttgccgacgaacgagctctcgttgaacaccaagaactgcccctgcatcggcacggggcccgagaggctgttgtacgacacgtcgagcgtcgtgaggctcgtcatgttggacatctccggcgggagctcgccggtgagcctgttcctggacacgttcagcgtgcacagtatcttgagcgacgtgatgctctccggtatctcgccggagaagccgttacggctgaggtcgacggcggcgagggaggcgcagcggatgagctcgtctggaatggcgccggtgagcgcgttgccgctgacgttgagcctggacaggttcttgagattgccgatctccggtggcagcgctccggagaagttgttggactccagcgacagcgtctgcagcgccgggaggttgccgatggccggagggatgcggccaccgatcccattgttccccagcagcagcatgccgatcttgtcgccgccgatcacgtccgggagctcgccggtgagcaggttgtcggtgagctccaccatgttggcctgcgggaggttgaagagcccggcgggaaccgggccggtcaagaagttcttggcgaggcggacgcgcgtgagcgtcttgcagtcgccgagcgagtccgggatggggccgaacaggccgttctccatgagcacgagcatctccagccgccggccggcgcagaggtccgccgggatggggccggtgaggtggttggtggccaggtcgagcgtcttgaggcggccgttcttcccgagcccggcggggatgttgccggtgaggttgttgtcccacagctgcagcacctcgagctgcgcgaagccggcgacgaagtccggtatgctgccgcggaggtggttccggaagaggttgaggagcttgaggttggagaggttggcgaggctgggagggatctcgccggcgaggtcgttgacggagaggtcgagcgacgcgaggctgctgagatcgccgagctgcggcggtatctcgccggagaggcggttccactgcaggaagagcgtgtcgaggcgctggagtcggccgagctccggcgggacggggccggtgaggttgcagctgctcatgtcgaggcggaggagcgcgccgaggtcgccgaactccggcgggacgccgccgtcgtactggttgtagtatccgatgtacatctcgcggaggcgggtgaggcgggagagggagacggggacatggccggagagcgtgttgccgttgagtccaaggtactcgagcgcggcgaggtcgccatagctgtccgggattgcgccggtgaagtagttgccgccgaggtggaggtagcggaggcgagcgtgtgaagcggagaagggaggaagcaaccctgagaggttgttgttgtaagcgtcgatgagctcgagcgaggggaagtagggggaggcgccaccgccggagtcggggacggggaagtggccggaaaggttgttgttggagaggttgaggtggcggagagaggggagggtggggagctcgagggggacgtggccggggaggcagcaggcggcgatggtgaggttggcgagggagtcaaggagggcgatctcgggcgggaggtacccggagtggagcgggagggcggtgaggttgatggcgacgacgcgggagcggccgtcgcaggtgacgccggagaaggtgcagtgcgcgggggaggtcgcggccgggtcccagtcggcgaacggcggtggggcggtgccggagggggatggaacgagcgccgccttgagcttggcgagcgcgtagatgtcgcggtcgggggaggcgagggagggtgggaggaggaggaggaggaggaggagagtaggaggcattgtgaaatgcgatggtgagagggggaggggaagaaggcggggtggtggcgggaataaaaggaaggcgggcgcgcggcctgcaggctgcaaggaatggagcagaagcagaagcagaagcagaagctgtgggagtcactgacggcgttaggttggcgtggtcaatgcggcatgtacagataccagaggacgacgacgacgaggcggagactgacagaccgggcgcggagacgatgggacgggacgagatggccggagacgtgtgtggcagacacacacacacacagagccttcccttcttcccttcctccattgattgatcgcgggctgctgggctgctgccaccaggggcggctactagcctttctgctgtttaccaggagtacgtttgaactagtaggggtgtatagttcataccaaaattaaaagtttagttgaaattaaaacaatgtgatgaaaaatttgaaagtttatgtatataggtaagtttttatgtgatggaaaagttgaaagtttgaagaaaaactttggatctaaacttggcttagtattagtctagcacggagatcatcttcgcccttggttaggtggtgtttggatctagggatttaacttcagtctatgtatttagacactaattcatagtgttaaatatagactatttacaaaactaattacataaaatgaaagataatttgcgagacaaattttttaagcttaattaatctataattagagaatgtttactgtagcatcacataggctaactatggattaattaggctcaatagattcgtctcgtgaattagtctaagattatggatggtttttattaatagtctacgtttaatatttataattagtgtccaaacatccgatgttatagggacttaaaagttttagtcccatctaaatagggtctagtttccaactttttcttcagactttcaaatttttcatcacatcaaaactttcctacacacataagctttcaattttaatcaaactttattaaactttcgtttgattttgagcaaatttttagctaaaccgaaattgtttggtcaaaactatcagggtcttttttttaatttgaggaaaaacaaaaggattgaagatcctggggattaccgactacaggagtcgatcgtaggaaacctggtttagtttccaactttttaaaaaaaatttctaacttttatatcacatcaaaactttcttacacatataaacttttaacttttctgtcacaccgttctaatttcaaccaaacttctaattttgacgtgaattaaacacaccccaaattttcatatccaacccatagaaaaaaaaataccaactcactctaaactgttttcttttttccttcgagttggaacgagacaaccaattcatcgagcaaccataataaccagatcaaaagaattaaaagtatacttcctccttcactaatatatggtgttggttagttcatttttgaattaaaatgaaatgtgggaggacttatttttcactaattttacttaaaatatacaggtttaaaaagaatggattgttgtcttcaaaagcgcgcgaattggctctcccctagcaagcgagttcgcaatgccatcctacgaactttacacgagcaattcaatcgtatttacgtgttcttttttctgtttctatgtgttttataatcacgtgtttcaatggaaccctaacttttgctatggagtacaaatttaactaggtgtttcacaaaactgcattaatagcaaaaaattttatcccttacgtgtagatgacatgtgggcttgttttacaacgacttgggtatttgttgggttgggttggtaacttaggcatgaacttatctgagaaataaaaattacagctttttataaatttatatgctactgtagttatctttttataaagatgcatactacagtttttaaaaggaaaaatagtttttaaaattgaatgtgcttcttggtactggcaagcctttctgtcgccctgccacaaaagttgtggcttgtctagcttgtggatcatccaacggccagcaacgtaccagcaccaatccgtcagcggtccagcttaactgacacggtactacgtacaactccctgcaactcgtgtgatccggatctcatctcactgcactgcactgtcaatggcgattttctgctgtccaaaacaattctgaaaccgctttccttttctttttcttctagaactgtaatccaactccctggagtagtattgaattacaactccacacatattgaaatggacatatccggacaagtttggattgtgatccattgaaaaggtactagtaggacacaatttaagatgaggaaaaatatggaaattttggaggatttcaattctataggaaaattttctttgaagccctttaaaacaaaaggattgaatcatatccaatcctttaaaattcctatggaatgagtaattttatagagattttggagaaaatttagcaagagcttcaacctcttggtaacttttctttgagtctatctctcttatccaattcctatgtttttcttgcagttcaatcaaacgattattgatgtgtttttcctcctgcgttttacgatcctctattttcctatcaaaattgtacgttttttttttctgttcataagttttttcaatcgtgccattcaaagggcccttatatctgaactcaatgcatggtttgctttgccactggcactggaactgtagcctactccaagcatcagcagaaagggaagggaagcaaggctaatcaagtcgtcttctttccgagcaaggcctggtttagttctaaattttttcttcaaacttttaatttttctatcatattaaaatttttctacacatataaatttttaatttttttatcacattatttcaattttaaccaaacttttaattttagcatgaactagtagtagtacagcaccatctgcagctgcagccagtgttcatgtgtgctactgctacagctaacaggcagcagctgtgctgtgctgtgctgtgctacggctgctgctactcgcctgcctctggtcgtctatcatctgcccatcaactgattgatgctcaagtcttcgcgtaaagccaaagcaagaagctcacacaaaagcctctccagtacactctgctcatcactcgtcagggtgctcgatctctgctggaagatttgcttgggcatttgaatgcttttggacaagtcaagtgaagtactatatatctcccctattccaatataaggccgtgtttagtttttccgtattctcaactttccaccacatcatattacatcaaaaactttcctacacacataaacttttaatttttttttcaaactcataactttttataaagtttcaacttttttttaagaactaaacacaccctaagtgcagttgtaaatttttatatttttgcaacccagtattttcaaaacatgaaacgaaacgtagacctcgagcgtcttgacatttttaaatccgatggatagaaaataccgaaaaacctacatgaacgactgtttggatagaacgcgagaaaacattagaattagaattttaggaaaacataaatcaaaagagagatcctagacgtaaagaattttttttcaaaagattaaatcttatattattgaaaatccaatccttcaaaattcctgttacaaaaaaagcaatagcttgttcagctctcttgttgttcaaggcgttttggtctatggcatcggcagtaacagcgacgagtcttaatgacaaaataggcacatatcgactagtagctagtctctgttggctggcacctgatgctgcctaacctgtctgccaacattacaattttgttggcgttgacacttgagtttactaccagtagtatcaacaataaagtggactaatacagagataaagcgaagagaaaacaacaaactaaaagtaattagaatctactactactccacttcactatggaatcaattatcagtgaagagcacaaagtccagcttcatgacatgtcagggcatccacacacggtcgacagcataatgctaccgcccactaaactagacttacctgcatgattaatcattcaataatcagatcagtggaggaaagaaagaaagaaagaaagcagtagttctaatggcagtggtagagagtagagaggtgtaggttgatgataaggattggctgcacgtacagcagcatctcacaacagaaactgagaaaagagagagagagtttaccatcaagaacatatatattccattaacctgctctttttttgtgttttgtcatttaacaagcagtgttaggagatgttctagctactccagcccctacaagtgtcaatcagtgtgtgcaagatcgatccacaggacaagaaagctagagctgcagccagtacacgaaaaggctcgatatctcaccacgagcgaaccttcagttgctttaaaattctttttatcatgcatggtgccggcctggttaaattagtggaggaatagaatcacactaagttagatgtttaatcgcaagaaaatggcgtccatccatgcccgacctgacctgacctgggggtggtgaatggaatggaaagaaagcctagctactagtactagtgattccatgggtgacacagaatcgatgcgagtcttgtctgaatccttcgctttgctctgcatttcattgttaggcaggatgcagaggaagaagaagaagagggctccttgtcaatgtcaactcctccctcttcttttaactttttttttgctttgcatcttgtcgccaactcaattcgccatggccgatgacgacgatgaccaagatgaggtgaggcccattcacttagcgggccgaaacacgggccggcccagcacgagaatcaaagcagagacagaccgagctgtgccctagcacaaagccggccgccgccgccgcgcgctcgtctcgttcgcctctcctctgcgtcgccgccgccgtcccgacgattcaaggtatcctactctccctattactctggttcggtagaattaatcttggtggtcagcacttggttggttggtcgaatatgaattagcgtatgagcagctaacctttttgattcatgtggtgcccaattgtttcttgtgaaatcgcaagaaaaaaatatttgtttcttgtgatgtatagggttcgttcctctggttgatttgatttggttatggcaaacggcagcttctgcaaagaattttactactcttgtcctgtttgtgcaagcttaaggcttctgtgtaactgtatagaatgcaacaacagtgtgttcttttgggaagatttggtcgtaatgtgagaggtcaatgggtcatagctctgcatcactctagatcaagtttggtgaatctttatcggacattttacctgtcaagaagtgtgtaagaagaacaactaagaaaggcaatcaccttctttgcactagaactgataggcaagatagaactcatttaactgtagctgcaaaacatcagaactttaactcgtgtgtttttaaattccatggacaatggtctgcttgtactaggatcttaaatagaaacgtctgattctacatatcttcacaaaatgcttagtacttgctgctctcaagcacttaattatgttcaacccttcttttgccactgctgctggtttcacaccttccaattgttgcgatgatttccctatctatattacacatacaaattccagcaaaacctgttctcacattcagctgcgaattatgttggcaggttcaagagtcgatggaagaccaaacagctgctgcagcaggtcttgattcaagagtgaaagccagcttggttcttggaacagaatcatttgcaatcagttcagagtccggtattctatcggagcagctggctgctatgaaggagaagagcatggagatcctgaagggctacatcaccaagcataatgctcccgctgatgtccctgatgaacccatcgagggattatctgatgatgaaggagacgcacctgctaagaacccaccaaagaaacctaagaagcagaagtgatcatccaattgtaatggaaaaggttgatctggaaaagatgtgatcgtcctatcgttggattcatgatgcttagaatttgtaagaaattagctgctcgtacaatagtttgctcaaaggctgaacacactgtatttctccagctagatgcagatctgcccattaacttgtatgagtaagatatatcaacttgaggggtacatgtaaactgcagcataagaaattctggcaattgcatatgctatcatgagtattcaatcacttgttcgagctcctcagcaaaattctgagcccagcgaccaacacaggcctgagttacagacttacggcctgatttggccgttcagtcaagtaggaaattatagtatataaaggtaaggtttaaagaaagcaaaagggcagataacattcttccttccgcacagcagatttgttttggcgttttttagttatctgtacattcaacagagcgaactgtgctagaatacttttaggaatcacattcttttcctacatcaggtgtacaccgagtgctaaagctctgtttcttggtcttgtaaaagaaaaaaaaatcctcaaagcatcttccttgttaagtttaacttgttcatcatcttggtgtagtcctggtcactcgttgaagatatggagagcacaaggacctactgattaagaacattttggcccctcccttcggagtatgaaacaagggaagctagctttataatcagttccaattctgtatctgcagtcttgccccttgatcagagtgcagaagtcagataaaaaggcaggcataccatttcctcggcaacattttcgtggatttctgccttgcactaatcacaaatgcgggcaacaccgccaccactattaccattacttgccagtgtaacctgatgaagttcattgagtacctcagtaaaatcatctggtggggggcatgagaattcaaggatctttcctgagtgaggatgcttaaatctgaaaaaggaacaatgtcacactcaaatggcagaaaaatatgaatcgaaatgcatttgggataatacctacccaagcaacgcggcatggagacatggcctgtctatctttgatatcatatttgaaagatcacaatgatatcttgaaggagttctgggtctcaaaagtgacaatgccatgcttttggtacctccgtatgtttcatccccaagaaggggaatccctaggtactttgcatgtgctcgaatctaaaaatttaaagttgcatgttcatcaataagataaaaaaaggtatccttgaatagaattttccaatattaaggagtactatagcatatatagatcaaatttcaactgttgctcataatcctttgtacctctatttcaagccatacaatagatatgtaaccaagcactacctatgcaagatgcaaattttcttaataaaataaaataatatgaaagtattttactaaggattggtgcatcctttcttaaagaactgggatattgtggggggtctaataacctggtgagttcgtcctgtctccaatctccactctactagtgctgatccaccaccagcaaagacctctcttactttatacctgtagaatctcttgagattagaaggccatctactaagaactaacatagctacttgacagatttttatttaaaagccaagctcttgtataaaaataagattgtcgccatatctacaaatataatcacctaccagtatgaagtgctaacctaatttctgtgatcagttgaaattcatattttttcaaattcaggctgtaaccagtaaagctagtgtatacaaggaaccccctctcttttttttttctttttctttttcgaaattcaggtggttatgactggagttaacacatctgctatatttgaaatgttttgacccaattttccctttatcattccttagtcctagcattaactggggggcaaagaaaagttgaacctttatgtttcctgtaatccatacacagctcaacataatagacatctccacgtaaataacactgctcctagtggcataacttctaaagtttgatgcttgattagttagctatttagcttagtcagttcttgagattaattatattcaagcaaattaaaagggaaaagtgaaaaagcattaaatcccctactagcggcatgtcgtgcatatctatggcctgatccaggagtggcaatcatacggatccggttgttaggatcacgagctataggaacttcaatcctgccagaattcggattcggtgcaccacaagtaagactgatgtacactctgcgtattgtatgcagcttgaattgttctgctaattgtgcatgagaatgctcatcctgttaacaaggggagagtacaaaaggtcttaatgctaacttggtagcaataaaagaatctacattcaatgcagtaacccttgaaattccataaattatgtgctagtttacaaaaggaaaagagtgttctgttttgggttagaacaaaccagtcagtaccttggctacaacaagtagtccacttgtacccttatcaagcctatgcacgataccaggacgcacaagagcttcacggacttctgaacttacttcgccagtagtaaattgatcgatgtcaaacacatcaatatcatcatctgaagaatcagggcattcatcatcaattgaattacgtgctaaacaggtaaatgttgaaatcttgcagtggtgaagtatagcattgactaaggtgccatttgcatttcctggtgctgggtgaacaacctaaaagtcacaacaaacaaatatcaccatgcaggaacaactgtttcgtccatgaattgaaaattcaaaacaagagtttaaggattaaagtgaaaatgcatcgataaagaaagacaggatgtaggagcaaccccaaaaaaatctcttattggttgtaaaggcatattatcagcaaatatacaagactagaatatacaactctaaatatttgcagctgtgacttgtgggacctgcaattgctggaatggtaagactgtttctcatagaagaaagcagactagagggctccagagtcgtgtaaagtacagcttctgattgatgctcggagcaaagcaaacaaaatgccaaagacatcaagcaacaaactagcagaagctgtcaccttaatggcttgttttgtttagaaatggtgattggtgagatagaatgtgcaacctctagcccttgtggcagtgcttttgaatgttttttttggtggtgtggctccactcagttttatttcgactgagcaattcattagaatgaaagagtttaatgtcctttagagtctttaaaaaacctattcagacaagtgttgctttggcatccagagaaaataagaaccaggaaaccaaagcttgctccagtatcactgaaattctgcaaatatggcaaaaatcaaatgttagaaaaaatggcgcataccatatgagccggtttgttcacaacgagaagatggtcatcctcataaacaatgtccagtgggatgtcctctggctctgctctcagtggctgcagctccaacaccgtgcagctgacaatgtctccaccttttaccatatgtgaaacctacatttcgcaatgaatagaaaatcggcttaagaatactatcaatgagaaccaaacagatagttattgacatgtagttacaactgctactacttcatggtctgatatttgcaattggaaagatttgtgccatgttctgtacaaatctttactctacgggagatagagaacaataactctaggaaatttactttgggccacctttaattgctggtgtttcgctttggaccatccttcaacaaatgtttttattttggaccggataattttacctttgtggcacttttgactaccctcaactcttttatccatctacatctaatttgttgtatgccaattgtcaaagaaatggactacatacagctcagcgagtttattgacgaacaggagccggcgtactcaaggtcattcatatgcttgagaagagagtcgaggtgctctaaagtgaaacaaatgcaaagattacacggcgcaatgtgaaaatatcggttaaagagtggtccaaagcgaaacatcggtaagaaaagatggccaaaagtgaaatttacttgtaactaacctaacaatatagtgatctttgctctaaaaaacatctttactgtacggtcttcagaatgagaacacaaacttaggttgagttaagacagcaaattagcaactataaattgtaatttgctcaagacatcgcttattgttgaactaatagaaagatgaaagcttaactggaagcaaatgaggtttcggggaaatcgtgtcaccttggagacgggacggccattgacgacgacgaggccggcgcggatgctcgcctggatacgcgcgcggctgacgcctccgcccccgagcctcgcggagatccacgcgtcgatcctcgagcgcccctcgccggccggcacggcctcctcaaggcgcgtcccaccgtggcctcccctccggctcggcgccaccgcctcagcattcgcgtcggcggcgaggcatctggcgtgcgatgcccccacgcaacggctgcttctcctcctctgtcgccgcagcagggcggagagcgcggtcgcgatcgccggcggcgacgccgccgccgtggttgccatgggagatgggagggggaagtgaagtgggcgaggtggataatgttttggttaatgggccacatttagtttgaaatgggccgggccggcctccatttaccccccacacaaaaagggccggagctctcttttttttttctttttcttttcattttttaaaaaacaacaatacatgctgcagtctaaccatggaatggctacaaaataaaattgcgctattcctttttttatgtgatggcatgggagaaagagacgtcaacaaatacacatgcacaccacacctcacacacctataaatggaataattaattatctgacattcatacgagtggtgataaaaaatttatcattggacccatatattatagaaagcgagtgttaaataattaattgtcacgtcttaaaataggtaaaaagttaaatgtccccctgtaaaagtaccttactataacacacgctcgtataaacggagtcatggagagaccaacgataaattcccggcagatccatttaaaagtggagtcatggagagaccaacaatagattcccggcagatcctattaaaaatgtgctattctggattgtaagggatatgattttctagtgcacatttatggtgctaaataaaaagcaaacaatttgtcagttttttggtgggctgaatttaaaactcgatattttatatacatattaaatgtgaactagtaataaattagatgtatttcatgttgatttaggtgccgtagaaaattgattactccaacataagcacaaccaaaattaaaaacaattgcatagtccaagttgtcaacacccatgtatttattctagtatagtatatctacacactatggttatgaatgacttgtgcaccctcctgattctcttgttaggcatcaatcacaccatgatactgctgtgacatttaatttgtagtgatccattttggaaaagaaaattgataattaaaataaatgtgatggggcccacaagaagcattaggacggtggccccctcaccataactggctggctctgatgtaaatggaaaacttagtgcttggcactgtggatatatgaattggccatgctttcttttatgggacaatagtggatgtgatctctcaaagatatatttttttctaaaaaaattatatacacggtaattaagtctcagaactttataattattattttctatattcttatggaatttattttttctagtgatcattaatttcttcagatgtttttttaaatgtaaattgactactgtaaatgtaaacatatatacaactgaatttataaccgatttaactacgtgatccatcacttattgcatgtgatatttctttatgttattttgagaggcagattgcacgtgacgtgatttttaattcatatacgtgaataattcacgcaccactcgtacgttctgatctttatttatttcagttcacggggtgtgcgtaatgggtgggtcaaatcatagttctcattgatcccacatattaaaacataagcatattaatttatttatgttttttcaggcaaagaaaatgataagaaagttttacgccagcctagctgttcagtactacgtactcctactagatattttagcttaagataaaaggagattttacaagatgataattagaacctctctgttgagacaacttttacccaaaaaaaaaagtgtcgtttgaccgcatatatatgacctgtgctgtcagatactcaaacagaaactttaatttggggagttgcacagtaaaactaattatcaacggccatttcaagcaatagttgattgtgatattctttaaatatggtcaaaattgacggcgtagctggttgcctaactctggttgaagggttttagccatcatcgaattaaagtagttagttctttttcctactaaaacgcatgctaaaaaaacagggctcaaatggcaataaatacatgatgctcactaaattctattaaaaagctagcataatctcgtgtttaatacatatatatgaactaaaatttaatttttaagggatgaagtagcgcactcacgacgtcatctctgtatctttattgtgtttttaccggtagtacttaattagttgcattctgttaaaaagaatttttttttcttttttgtggggaagagagaatatgttaatttggattttgcagttttcacacgctagctagcagcagcttttacttaaaaacagcagcaatttgaaaccttcgttgatcgaactgcctatatctaatatgtaaattagccatggttcttttaagcacaaattttacttattttctgagaagtttacaagtattttattctgaagtttatgacaaattattcagttcttcgagtgtgtgttaatgcccccttgagttgctgtatagaaaaccattattagaaaaacgattttcgaccataggacccatttcactatacaggaactctaaaaacccgcctgtataggggtgtgcgagaggatttgaatatttgatggtcgaccgcttatgaagattcattatcatatacgatcacttaagaggtttatatgcgaactgcgaacgtagatatgtatgctatatattgtgttgtggatttgggaactttgggattttgtgtgtgtggatttgtgaattactgtgaatgtgaattggagttgagtctgggaagctgtcgccgctgagaaacgacgtctgtggaattttttttcgccgaaaatgtgtatttcaggcggatggctcaacttggccgtctacgaaaatcatgcaaaaatagattttttaaggagtgaaccctacgtgtacatccaagatctgggtttgcacagtgcatgtgcccacaaggatatcgatctcactgtgtgagcaactgcgtgtacatatgtgtaccccagttgccgacaatgcaatgtactggctactaaaacacgcgatgccacagtaaacagtgtcattatttatgctgtagttataaacagtgtcattattggatctatcaatttgagaagtattctttttatgctagtagtcgatcgcataaaaaaatgtcatgtcaaaatttatgctagtatggataaaaatagcatcattattggatctatcaaactgagaagtattttttttctaagaaattataaacatgtacttattaaaaaagaaggaacatatactatgaacacataatcttatggtacacactccgtacacaccaactaacaaagttcacccaagtttataaaaaaaaagtagtgcacatattttcaataatattacacccatatggaaattttggcctaaaaatgacaattatgacatatagttttaaaactatcactttttatagctaaaatataatgaatttgaagttgatactttatagatatatgcaatactgctgttggaaatacgtgtatgcttgttagttggtgtgtatagaatacggtcctataaaaacatattctctttttaaaatgcttgggcaataaactggcgatggatttaatatcttacatgtggtacatgtggacaggtcactctagatatatacatcattgcaattttctgatcaatttacgttgtgctggtagtactatatgtattatgtatactatatgcctatatacacgggtggagaaacccttttcagtcccagtttgcaactcctttagtcccaggttgtaaatcgggaccgcgaatctggaactaaagatgggtatctttagtcccaggtgaaataactgggactaatttcacctgggactaaatataaatctttggtccagttggtgttttcaaccgggactaaaaagtttttttccattgttttctgctttttgcatattgattttaaaccgaactcaacaaaaaaaatcatctacattcacaaaatcatccataaattcatagaatgaacatagtcaaattcacatcacaaatttataaatccatatacatcacctacaaatcaagaaattcacatagaaatcaataaaacag

SEQ ID NO: 28843 - DNA, 14599 bp, Oryza sativa
aaaagaaccatattacttatcaaatgagaccattagatccgttatgaaagaaatatattttcatagatattggttttatgtgtaggtagatatagaattatcttattttaagaagcccctttcgaacctgctaagatgaagattaaatactattagcgtatgattaattgacttttatttattttaaattttaaaatatatctatttgatattttaaaataatttatatttattaatttttttatataagtacactgtttagccatttaaaaacgtgataattaacagaaaccaggataaatctgtaccttaattaatcaacagaacctagacgatcacaaagtctttgaaaaaggagggaataaagttatactactcttgattatatttctgttaggataaggttacacttgagtattatatcatctagctaggagtactagattaggttctccaacagggccatacgatcgaaaataatgagaacagaccggcgagcgagcgatcgaacggacctgcacacacgatggatgctcatttatacgcatatacacatggaaactattttaaactcttgagattcccttgtttatataaaaattagctaaatagttatgaaaaattttgaaaaaaaatgaacgttcatataacatatatgtaccactccacaaaaatttagatccaaactcaactcacatattgagatatataaaaaaacaaattcggatataaatagtagtggtataatttacccaaatttatctttttttttctcaatatacagatcaaatttgaaattaagtgttactcctagatgtcactacccactatactctaaattcacattttttttctattttttttctaaaactatttgcattgaatttgaaaaaggagatacacaaggggacatcccttaagggatatattagaatacacctgcataatacgagtacattccttaagtactaaaaccggattaatgaatcaataatcttgatgcatatatgtatatgtgcatgttaattaattggcaacagcaaagataggcatctcgtccctatcacaattcatcgatcacacgtacctgatcgagccccacgtcgtacagtgctgtagctcagtcaatatcagatcgaccgcccggtcggtcgcttcaaaccagtgttatgtacgtacatacgtatatgcaatgcatatacgtgatctcactcctacgcgtatacatacgcgtgctagctagctggagtagttcaacggcagagcagtgctaacttgaatgaattccttattgcatatatgtgatgagatgatgactgttaggagcttgtatggcttcgtccttgggcattatatgaattgttgcggtgatcattaagggtcaaatggagcttgtatgtcagagttggtaaacaatggttatatataaatttttgtcaaccatgaatgtggaggttcagtataataggattaggttccagtttaaatttctctatgtatatttgttcttttttactttttttttggaggaggggggcagtggtctttctggcagttgtgttgtgtatttgaaactctactttcttctaatatattgacgtgtaatccttttatgtgtttggagaaaaaaattattcttctggtattagagtacttcttgccgtatcttgtaatatatactttataaaccatctataatctaaaatgacacaaaaacaagtaataacatgatatacatctaaacttatgaagtaaattaaacaacaagaacaaaacaaaattctaacctattttttggactaaataaatgcaaaaatgagaagagcaaggtcttaccctaaaccctagtcacgataagataaagtatagctgcgtgggagtcgaacatgagacaatgacattctgccgactggattggttgatgatgggcatctggccgaactggggcttaggcggtctcacaaccggtctaggctcttcagccagccttgagttcagcccaagtagtaaataaatgtatcaatggatcctcgcaaaaaaaaagtatcaatagaataacggtttgatattgaaacaaaaatactcctcgtaaatttttttatatttggcactattgatgttttaacataaatttgaccattcattttattattaaaaatatgtaattatcatttaatttatcgtgatttattttaaaaaaattaaataagataaataatggacaatgtagtaaaaaaaatgaaaggaaatatcaatgtaggacagtacagtaaaggtacgtcggtcggtcggtgcagagtataaagcaaggagcgaaaatatctgtgtggcttcgtacctgcaggggacgggcttctgccgtgtctggacacgatgggcctcccctgcattgcatgatttatttatttattgatccattaaattttaccccactcttccacttgctatttatattaatttactccaatttatatactccacgacaggagcgagctgagaaccctaattactactgcatccgttccagaaaaaaaaataattttacatcgttcatcttcaacatttgatcattcttttatttaaaaaaaattatgattaatattttctattgtagatgatgaaatataaagggtactttatgtgtcaataatttttaaaaaaaattataaattttttaaataatacggacgactaattgttggatataaaacttacaactacatttaaaatgtgggggaggtagtacttaattactgcccggaagatccacgatgcacattgcgaatatctagctattccagctgatgaatgcgtgatacatattgtatctgatgagactgttgagtgatgaagctgaagctagctgatgccgatgctgatgctgagcaatctccaatctccccacggggagagattagcccaaccaaacctaaccatgctcttcttcttctcctcctcgtcgatgagtatttagtccatctccttaaatgcagcggtgcgagttagttggcgccataaattccttcacttcaatttcttcctagctcagctttcccctcttctccttctcctcctactacccaatacgactactactagttttctttcttggccatcatcatttgttcctcatcttactctagcttctccattccaaaattcaccaccgccggcgccgccatctccattccaaaatttgctctgcgtcgagtcgtgtgatcgatcgatcgatcgaggtgtacgtgtgcgctgctggggaaaagggaaatggatccgtcgggcgccttcttccacgcggctccccggagcggctcgaatgtgtcgctggcgtcgctggcgaggacggccggagggaggaggatgatgcacagggtcttccgcggcgtcatcaccttcatcttcgccataggtcgctaattaatctctctcttgctattcaatttgcttcttctgaatcttctttccaatctcccttgtttgctttctgctgcctgctctgatagcctgatctacaccgtcttggtgtgggtctgtgtgatccagcttcatttctgcttaatttcatcttgtttatgtgtttcagtgtctcgcatgcatatatatatggcacgagctacttcagatatatattttcccctttttctttttcttgccctccttttcttgtcctgcttcatttccatttcttggtccaagaagaaaaattaagggggacattttttatgcatgtttcatcaccaatactcaactcattttcacattttcccttttcaattcccttctatgatgggttctctctttctttgtggatgaatctgtgtgaagagagaggacatgacatccatgcatcggctgatggagctcaagctgctcaatcagcgctttgtatcatcttggtgtatttgagtcttaataaagcttccattatcttaaaaaaatcagcactttgtatggatggattttacagtgctcaatcttcagagcactgtctgtatttcctttttcaaggcagcatatactgatacttgcttaattggttctcccaacgaaaatacagattttttttgtcggcactgttaatttgcatactgttttatttccttctgagcaagtgcaaagtaatagatactaatattgtttggtcatatacgtgcagaatgggttcttgcacagcttaaaaccacaacttcttttctctgaacaatgcttttcagagtgtgacatttgtctcgttttttttttgttcaatcttgaagcctgaatcttgaaccggaaagctgtggtggtagctatgaatgttaattaacatggatgtgtttgtgtgtgtgcagctggactgtttcttggagcggtgactggcgggctgatcgggctggccaccgagagcggcctcttccgcggcaccggcatcggcgccatcaccggcgccctcgtctccatcgaggtcgtcgactcctccatccgcgtctggcgatcccgccgatccgggatctccagcatctgctatgtggtaagaacgaacacacacatttcttcttcatcatgccgacaggtatagtagattagtagtagctttggagtaggagagcaacctcatagctgcacgcttgcttgcttgcttacctcaactactgaacttccttgtctgtaccagtcatcagtgtgtgttgcttaatttatttatatgaactagtacttgcttaattcatataacctgtttgtgtttattttaaaacaaagggtcaaagctaactgcctcttttatgagatgatacaacttgtcaaaccttgctgtcttgaaagttcagatgattatttcgtacaaaaaagaatagttcagatgatgttttccaaagcaatttgtgcattctttacaatctaattaacctgctcatgtattctcagtaccacttttaggggggggggggggggggaagctccctaggtagattgtgcaacaaatatctgcacaaacgggatctctgaacatctcttctgcttcatctgtcatatatacgtgctcacagccttacattttgctaatttttttttgttggcttgttaaacctaacacaaatctctctgcacaaaatgcagcttaatgtgatctacagcctcctgaccggcaggcttgtccgcgagaaggtcgatccggcggtgcagcgggtggtccggagccaggtcagtttggtcgtctcatgaatctgcccctgcatacatggttgcgtctgattcagaaatatgcagtagcagcttcagttacagatttgtctgacgagattgcctctgaattcagatgaatgcagtggattcatcgcccttcagggagtcccctgacctgttcgagatcgagggcaccaacggcatgccacgggcatccatcgacaagctcccggaggtcaggatcactgaggagtacaggaggaacgccattggtgacctctcgggatgttcagtttgcctccaggtctgaaacttttaccatttctcaaactcactgtacctaaattgaacatctctgcattattgcttgcacattaccttgcaaccaattgatgagagtacattgcatccatatttaatttatcactgtctcgtatcaaaaccgtgtgcttctcattgatgtgccagatctttgcatgaattctcactgattactgaatcctgtgaattctgaaacatttggctcctcttactactgcaggatttccagacaggtgagaaggtgaggagcttgccggattgctggcacgtgttccatgtgccgtgcatcgacggctggttgatcaagcatggatcctgcccgttgtgccggaggaagctgtgagatcgacgacgacgacggccatggtgatcactgctatagttgtagcagaaggaggaggaggctgctctgctttcttgctgtgtgctgcgatcgagttgtccatcagtgttgctgttcttagagaagaagactgacatctctctctctctctatatatatagaaaacccttaatctatagagcattttgtttctgcttatattgctacatgctctatctttttggttgaactatctacatatatatctatatttctatctactcactcctttctccttatgtaacatacctctcaaaactctgaactggcttgtgctgatcatctgatgtataatatataatatataaatatatatcgccccttggacaccatcgcatatcaatctcctggatatacttggtagactggcttaaatcatttctgctcttctgggtcattacagcttgattataattggataattatcaaagagctgagtagctgacacagtttttgcattgagctgtcccagtccagagtctacttcgaagtttagaacaccagtatcactgcatctgcatatgcctgatgcgaggaaagccaataaatatggatctgatgagcatgccatgcagaaaggataagatacagacggcacgcatgcatgcccacatacacgtgctgtatcaatcaagagaacatcatccaaatatccaaaccaaaatgcaaaggatcaacatcatcatcaatgaccagtgccacactgcacaagttaaagaggcacagcggatgagatctggttcagttcaggtacccttgttgagagttggcagagttcttgctgtatccaaagtgaatcttccccaaggggaaagcaacaatttacacggtggtcaataaataagagtgcatgtacaagtcaaaaatatagtagtagtatacataaggtccacaacatcagctaattaagttactccttttttggcttattatttcatatgcactggtgttaaaattcctgcggcggaacaagacttttgctttttcggctggaaagattgagctttccatggagcatcagcagcacaacacaattgaacagctagctattctttttaagtcgatcttgaaacatacattactatgatgctgggattaaagagctggagaagagcttctgtgtctctccatttttttttacatcatggagggaatgatcttggccgaaatgaccggcttttactttaccacaggggaagaaaaccttcttcagtcaggtgtgttgcctccaccatgcattcagggtcacatttgagatgcataaggtgcaagtgtgttgctgcgcagattcacgccgccgccttttaaagaaacagaagggcccctgtaggtgctcgccctgctgacaaggctggagtcgaggaagactactatgacggttatgtcatcatggaagtggcggcgaacaccacggtcaatcttcttgagatctgagtacctcatttctcttttcttggctgcttcttgcaaagctgcctttatgagcctcctagcacttccctgaaagatcaaagagcacaaatcatcagattctttcacttcacaatcaacacttagcgtgtccattttgttttcatgcatgttgccttccactgagggctgaacaataacaaggtaaatgatgctaagcttctgtgccagcaagtagctacaaatttcagctctacttgatcatagatttatatatccacatgagtctattttctattgtatatgcagccatgccaggactatgtacataaaccaatgccatgcaacaaattgttgtactgaagggaaccatccatattcatattttgtattgctgttttggtgacaggctaatatttcattccaagaggcaatattgcttaagctatgtgcatgggtttttctgaaaccttcagaataacatcttgggcttttacgcaatttagtcttaatgctgctatacaaaaggattttggattggctgcaataagaaatcatgtcactgagactacaaaatttattagctatgtggtagtaactcaaggaaatatggtagtagtaaactaccactaattcttatgttggcatttggcaatatatgtcaaccaatgacatgcatggttgcaatggaaaatgccaaccaatgtatctgtatgtttcatgttaatttatttgtgcaggagcaagcacttacattgcgagggctactgtgaacaatgtcaacggcctcttgattggttaagtgctcccatagaccatcagatgcaaatatgagaaattgatcatgtggttgtaggggttgcacactaatcgatggttctgaacttagtatgggcttgtgaaaaggttcccggaggcggaattttgcatacaaaggttcccggttgaactctgatcttttgagataggcatcaccaattgatctgcagacctgcaaaatatataacaaattaaaggaaaacccaacaatcttcacttagaccttggaagaaacataaataaagcagcaagtattgccagatttgtaaactgtacaataaaaactcatcaaacatttggatgccttatcatggtagcctagtgaagggtgtatcaagctctgaagagtggagattggagggatattcataaaatgtttttcactaacaaatggttatttgagggatggcatgaacctaacagataaatagcaaacaaagtatttcttcaaccagcagctatctgtaccacgaaaaaaaaaatctctcaattaagtagatgaacatgcaattaaacaacagacaatgcaaaaccttcgattattctcaagctcctcactggcacaaaatataggagtgatatcacaatcatcaatcacagatgacatctctcatccatgagcagaagaagactttattgcatttatttccaatggtgtaaccacctcgaatctacttggttttgtcttaacattacaaatgcagatgagtttaataagccgattaccatccggaaggtgatgatgggaataatggcagatgcaggaggcaatatgaaatgatccttcaatcaaacttcttcaaagctaaaactgtgttcatagtgatagagaactcacctgaattagaccttttacacgccaaacgttgtgcttgagaacaacaatatgcctatcttccgggtgcattgactgcaattcttttctcactgactcaatgcttacgttatgctctgctgagagttggacagccagaacttctcccgtggctttgacatgtctgcctaaaacaacacgggaatccccaacattagcaacataaagaatgccaccacagattacaccaaccaggcagcacgagccaacagcagctatttgaggcttcacaggccattgcttggtgacaacagagaagaacccatcttctgtagcttcatatgctttcttcagcacatcagcagatatcgaattctgttcagatgcaaaccctgcaatataagccatggaagaatgaaatggtcatggaattgctctaaaacacagtatggaagtagtgcaaaacaacactagtgcatactgtcagtatcaattacttttcagatggtggaataggtgatcgttgatatagcaagccgtctctgggccaccatgtccatcataaaccccgacgaaagttccgtatggaccagagtcaagaaagctcaatggacccgattcaatctggcactgatcctcaagtaagttgttggcctggaccacagccatagagaattccccatttacatgctgaccagtgtccttgtaccatagaagtccatcctgcctgccggcaacatctgagcctgcccgggcatgctggttggatgatggtctccagcatgcccgtaacaagttcatcaatgtcactatcatccctcatcagtcatcccaccacagacgccttcgaggccgcttcatctgagctctaagaaaatgcagcttcacttgttgatacgccgatgttttcctttattctggaaaaaagcatgcatacatatatgaaacagaagtatggattattaatggaactcaagaccattgtatgtgcctagtttggaagcattttaaaggatatcatcttttatttttcattcatttcctttggtgtgtatgctttctataacatctagtgttatacaaattgaagttaataaagttgctttttctacaacaggaaagccaaaatatcaaagaaatatccttcccgataacaataagaccaatgataactttaagtccaagcaaacttgtcttgtgtaacaaatatccttgctgtggggtatagcaaaacaatataccacattctgtagcattctataacgccttagtatgcaacttttatatcaaagagaaagggagaaggcagcagaagacccaactgatcatcgttttttcactatatctcttattactcgagaaacatagcatggccaacacttttttttttccatctcccatcctcacagcaaccaaccgatcaaagctaaaacttagtacaatattctgaaaaaacttactcctactttgcaaatacagtttttctccccccctactatccttcacttggataaacagaaagtgtgaattggtggaatcaaaatcaaacaccttcccccaacctaagaacaagcggacacactcacaccttatcctcgagctaacgagtagaattgcacaccatgatcctcacattaattcccccaatcatatccgcaattcctccctccaattagcgcgggcgcctcttctccccccaagtcgcaagcgaaggacagtccaccaaatcaaaagactcgctcggaattaccatttcataccccccgatccacgaactccacacccgcatacagaaccaaacgatcccccccccccccccaaacgcccaagaacgccaaaatcactaggcataaatcacactaaattcggatcaataaagggagagggaaagccccctcccaaatccaaaagcgagaaattcgcacctcttggcgtggcggacgcggccaattggcggatttcggataggggatttgagggaattggggagggttgcctcgatcgaatcgcgcgatttgggcgtcgccacgctgcttgctctcaatctgtgtccaaaccaagggaggaaaattagtcgcggaagtgaggggaaaaaataccggaggaggagggtagggtaagcggatcgggttttttttccctacccgcctccgatccgacccgaatccgcctcctctcggatcgtatcgacgcggagccaaggggaaatccctctctctctctctctctccgaccagcaccgccggggacgaacgaaccggcggccggcgtgaggcggcgctgactcgtcggcggatcaccggcggcggattcgcggctcgcgctggcgttggatgtcataaatgaagggagaaaaagttgtgggaagtttcataaatgaccctggataaaaatttaattacatattagtccctacaaagactacgtgtagtagtacctagaccaggtttggtttgatgattcagaatctcggatcatcagattagtactaatcaaagattacatacagcttttgtgcttggaagaacttggtattggacacacaccgattttgaaccatctcctgcaaatgttcatacgcagtcacacattgatgatgactttgctactacatataaacttcaactaactgtatgtatgtcaatgctacggtcgtcagtttcacctaatttgatgaaaaaactagaagcttctacgagctttgcttaacaagaaccctattctgctttggacaaacttaacttgatgacatactgacaacttaattttgattcctcaactctgaacatttgcaaccaaagtctgaatatatatatacctgcattcctgcaacaacaagtatatgtgtgctttttcatcttcatctgcctcttgtcaagcaaagttgtcgagttatggtgttattaagtgctactattaagactgatagagatgtatcggcatggtgttgatagagagaagagaaggtagaagcctgcaccagcaaacgcccagcatcatgtcacaccaaccaaacacttgatgatcttcgtcactttcagagtctgaactcaactgaacgtactacgcaggtgtagttactgtttaaacgcttatttacagtacttctacagtttcgactgcagtgcataattcaggcgttcatactactggtggccaataagtatttttaatgaaatatgtccatctctaactggaaaagggaaagaaagcagccatgaaatgtgttaatttcagtcaggtctcaggacagcagcaactctgacgagatggaatgatgaaaacagtgcaaaggatgtccagtacttcttctctggatatacactgcagaaaaagtgaagagatgatgttaattgctgattaatgcatggttttgcagtggtgctttatctaccttgatggcgtgttagcatcaaacaatgactcgtcgttgactcactaaacctttactagcctgatactttagctaaatattggtctgaagaaaaagatcaagttcttgtggccttgtgggaaaggtatatccttttctgacccggttggtttggtttagcctctgccccgttgtttatttgtgttcatcctatggagaaaattaagtcaggctttagtgccaattgccatttgtatatgcagttttgtggtgtcatccaggaagaatgttgccacagatatgtgcaagagaattaagaaataattaggggagtaaccatgcatcgtatcttctcttctcaccacatgaccatagattctccttttctttatcatggtccaagttttcgttccggcgtaatttcagcaagaagcaatggtcttcagaacgactaggaaatgaattagccttttttgcaaattgtcatgttgtcatgcacattataattcatatttaattatgcctgaacatgagatgactgcatgaagaggaaagaaatccagaaaccgtaaattaattatagtagaggtccatttagcttgcaagcaagttgctatcagatgttggtggtcacattctcaagcctctgaaacgtacatgatccaagaattgacaaccaataattcatatatgcgatatatatccaaaacagagtttgggttataaatatacatatcggcttaattatttcctgacaaaatatttgactaactttaatatcaagctcataccggatacattatccatttccagtgataaataattaatgagatgcgatccattatctaaacaaaaataatgagagatggatcggatagcgcacttttggaagtacaaatcgtactcgaataacgaatttgccgtttattctcttgttattctctgagggcatattggctgctaatggggctagctatatattcgatcaagaatataagtttttctgtgttggcttttcagtgttgtctccaaactaagcttgaagtgactaaccgagtatatatacggattactgatactcccatttgcttttgccgaagaatggagggtggagaagaaacataattaataaaagaaagagttaactgataagcagcaattgcaggtaacctgtcaagaatctggcctgaagtcgatcaacacgtaagagaaatcgagtgacagaggaggaaggagaagaagatttggagactaatataagcaaatcattcagacaaggtgattataatatcacggtccccagctagctgagactgagactgatgagacagatctttggagatgatcagaggctgaggcacgagagaatcgatcggcagcttcgcagctgcctctgcgcacgagggccacatcagatagataccccatccgttctaaaatataaacatttttaagattcaaaatttataccaatgatattactgttcttgaaatcaaagcattttcaaccgattaggagcttcagaagggaatgtaagcaattcaaaattttaaaatttgattaatgaggtgactgaaaagaaatattcttcatcgatttttttactagaccacgtagaaatgtttatatgagagaagagattccatgagatggttgtgtctccgtcagtgcagacgcaagtgttggttggtttcaacctttcaggtcagaacaccatgcaggttacagactagcagaaagccacggattgaccaaaggagagccacagatagatagctgcagtaatcaacgaaacactccctggattgctaagttgtatagtaaatcgcatgcatggatggatcgatctctatcagtcagcgattgacgacaaaacgcaggcaggcaggcaggcattttctgaccaaaggaaaatgacctaatagacgctatgtacgtacagtatgtggaattgacgctggttaaagcttctatctccatcgcttacactgtttttttccttcctgatgctgtttagcagtaaaaggtaagctttgcattcaaacagatttttacgcggattgtttacttgattaatttaataaattaatgttttgataaataaacttcaaaattagttttaagaaagtggtctaaataatatagtgtttttttaaaaaaacaacgtttctttaaatgcaaagcaaataatccatgtcaaaaatctaaaaaagaaaagctaaaagaacagtgcctaaagcccaatagacaagacactaaaagtagtatggtagtggagagggatttttatcgcatgtcaattaaataattatgaaa

SEQ ID NO: 28844 - DNA, 5444 bp, Oryza sativa
  unsure (1)..(5444): unsure at all n locations
ttgaaattttcaaacttaattctagagtcggcttacgcttttcgtcgtaacctatattttaatattggcttttaaatgacagatagcatatgtttgctttgtctatttctctacgtgcttaccgatgattgctcaaaccatcgaaatcttattgttattttagaagcatgatacaaacacaggtgctcttaacgcgtgcacactcaccctattaacacatacacacactccatctctataagtatattcggaagactgagttggcatatcaatcttagcctttccttttaaaataacttattttcgccttgtctaagtacgtaaccagaaattaaatgttcttggacggaggggtgtaattaacagcgagtgaaagtcaagtgttttaattaggcaagaaacaatcacaatcgaaacctgactcctgtttggagttagcgcgtttctgccaggtaccatgagaaataaaccagaccattagccacacaaataaaatactggtccgtacacgaaatgcgtggtcatggccgccatggctgacggaagaagcaagcgagtgagctgccaaaatttctgtgtttcccctttctctttcacccgattgtttactgtctacggagtagtccagtttttacacctgctgagctcacacctgacctgacctgacctgaatacatacctaaccgtgaccgatgaggcaatgactgctaattatgttgttgttagtttaattaatctcaaccttaaaacttannaaatttaaaatttaattttgttggttagtttctgatggttttcaattatgggtttttttctatatattaactcgctatatataaaaattttacctgtaaaatattattttaagttgttaataagttttgtgatttataatctatagtctattggttacaagagtctcagtagcatcttaggtcctgggttcgacttcccgtgagagtgaattttccaggatttaacggctttgtgcttttagtcacgcttatagtgacttcgttaatctccattatggatttgccgtctcagtcttcaaagatgctcatggggtagggtttgcgtgcgtgcgcttatatagtgagcgtacgtatgtgagtgtctatattgtactgtgtaattaaagaaaaaactccatcgccagccggcaggcgcagtccatacgtttgtttaattcgtcaatcatctctctcaagtttcaattagtgtgagtcactatcagagtttcagtacttcactattcttcctgtagaatttgggacatccaatggagagctcccagcaatcaacgaagattccacggagttgacacaggtgcactgatctcacgggagaagaataacagtacgtgtttcttctctgtccaacgaaacgcccacttaactacctgacagcatacgtcttgaggatcactgcactattattattaactgatgtttcagctaattaataacaacgaacaaatccgtcgaacaagtcaagcaaatcatctaccttaattagctgttgttagctgagcatttttgttctgcctaaaactatatttgtcggaagttgtgggctgcatgaataattcggtcgaagagagaacactttccgctgctgtattctgttgccacaagaaaaaataacaattctcacggtcaacacgacaccaagtattaagaaaacggcttagcaaaaatcaagtttatcacaggcgacgatctctcgtaatttgtcgagttgacgtgcatattgtccaaatgaatatccaagatctcctcccattagtacatgcctgcatgtgcaactaactgcattacattattacaggataattcagttgatcaggtactgatgattatgtgtcaatcagaagaaactgctctaacgtgcacaaatcattttctgcaacataatctctttcttattccgacttccctacagcttgcagatagcataacctcggaacctttttctttattattcttgatggctggaaactatgatattgtttttttcttctaaagtgttgaccactggaataaattaaaatgtctggtatttcttttacatatatatgagaattgcaacattatatatgttgttagaaatgccttgataataccaggtcttatttctatattttaatacaaggttataaaaatataacggccgcaatcccattttatttaaagactctgtcaaaaacagcgcgcacaaaaaatgcagttattaactagttgttggaaaattttgcagattatcaggttcactgaatgccccgtaataagttgaactgcacaaaagtgctgtggtacagtcaagtcatgatgcataaacatgagtccatgtatattaattaattaatttcaagttttggtctgcctagattaattactttttgagtgccatggccatgggttaagttgaatggtaacgtggccttgtaggtcagttccaaccacaaaagactgagcaatcaacatcaagctggcgacagtcaatccgtgttggtcctgattcatgaacaaaacacaaaaagtaacatgatttgctcgtacgaaccactgagcttgaaaaaagaagaatattatattaaattgatatatatggaaatcatttttgacggattcctaagacttgtttggttggagactaatgatgccacaactttttgactaaagtggctaagattagtcttgtcatacttttgtggcaaactaagggcttatttagtttggagaaatttaaactcataggaataggaaaatggaggactaggaatttttccaagatctttgagtggatggaaaaattcatatgttttctctatacaccttgtagaaaaggaaattttactttgattttcctatagttcaatcctacaaaccgaatgacatctataggcattaatccttaggaatccaaatcctttgtttttcatcaaaaacaaacaagccctaagcttaggcagagttagagagtataatatgtgggccagatgactaagagataggtaaaatagagttgtggtagaaatcaaatattgtctacaaaatagaggtatgataaatttagttgataaccaaacatgcccatcaggatacaatgcattttctattgttagtcaagtacagaacaaatgtttcttattttttgtacggttaaattgatttcagcatgaaaacatagaacaacgacgtagaaaattgtaacccaattcaacaagaatcaagagagcacaatttgggtatggtgagtgaattttggatgaattactttatccaataaacttcaagcatcttggttaatattcatgcacaatgaggtgtgttttaatacttttttttttgaggttcaaagagcaatataatgctgcatgccatcaattcagtgcctgttatcatggattatatatttgattgtagagattttctatacttgattatagagatagatcaaatattttcaggaataaacttaaaaaatactacatacgtaatctgtagcaatatagtacttcagaacacaattttttttgaacgtttagaagtgctataccttcatagtataagctgaaaaagacatggcctaagtacatagttgcgcccatatttcatatatctgaaaaaatcgaacaaaactctaaaacatttctctttctctttagagaatgataatgatttacatctctaaccttttccattaagcatacaactaatccaatactctctttagggagattctagcaattgcaacatcttccagaatctacaactcttctaaacagtccaaattcttacttagggtgtgtttagttcacgccaaaattaaaagtttagttgaaattgaaacgatgtgacggaaaaattgaaagtttgaagaaaaagtttgaaactaaacttggccttgagtagattttaagaacagtcatagaatatagagaataaattagaaaccagaaatttaaaagcgcaacctttttctaattgttatcaggcggttactctgctcattaaatgtttattagaatattaatctcccctaaaaaggattatttccctttacacaaaagtatgttgtgcattcctatcctaattaatccctcacccccacaggttagcaaaaaaagatatactccagggacctaggcgtaaaaagccccctgcctgcctgccgtcccacacgggcacgccgcggcggccacgttctcttcccgctccgacgaattctgctctccattctcctcgccgttgacgaaaaccaaactaagccaagactttgactcgctcgtcacctcgacctcaccatgcgcgtcgctctcctcctcctcctcttaaaatcgatgtcgatggcgcgcaccaaccttcatcttgctgcccccgcgcgcacgccacctcgccccgtccccaccccaccatgcctcactcctcctacctcgccctcgccctcgccgttgcggcggttcttgctatggccgccgtcgaggtgtccggcctcggcttcgacctccaccaccggtactcccccatcgtccagcggtgggcggaggagcgtggccacgctggcgtgtcctggcctgccggcgccgaggtgatcggctcgcccgagtactactccgcgctgtcccgacacgaccacgccctgttcgcgcgacgcgggctcgcccagggcgacggcctcgtcaccttcgccgacggcaacatcaccctgcggctcgacggatcgtacggacaccttctcgccgccgcgcgcccccctgctcttgctccctcctgcgcgccggcgagttgacctgatcgagtttttgcaggctgcactacgcggaggtggcggtgggcacgccgaacacgacgttcctggtggcgctcgacaccggcagcgacctcttctgggtgccctgcgactgaagcagtgcgctcccctcggcaacctcacggcggtggacggcggcggcggcccggagctcaggcagtacagcccgagcaagtcgtcgacgagcaagacggtcacctgcgccagcaacctctgcgaccagcccaacgcctgcgccacggccaccagcagctgcccctacgccgtccgctacgccatggccaacacctcctcctccggcgagctcgtcgaggacgtgctctacctcaccagggagaagggcgccgccgccgccgccgccggagccgccgtgcgaactcccgtggtgttcgggtgcgggcaggtgcagacgggctcgttcctcgacggcgccgccgccgacggcctcatgggtctcggcatggagaaggtgtccgtgcccagcatcctcgccagcaccggcgtcgtcaagtcgaacagcttctccatgtgcttcagcaaagacggcctcggccggatcaacttcggcgacaccggcagcgccgaccagtccgagacgccgttcatcgtcaaatccacacagtaattaa

SEQ ID NO: 28845 - DNA, 636 bp, Oryza sativa
catcacatcctgcgcaaatacacgctagactcgagattgtactgctccattaaatctgaccatgccttctcaaactctgcctctgtttggggttcatttaacacccggtggaactcctgtttgaaactgcttcttttactgtaaatgttccccaagttctccttagcattcttcagaacatgccatttgcaaactctatgaatagtttcaggccaaaccgctttgatcgccacctccatttgatgacagttatctaaaaaagaagttcacaaccattcgagattaaaaacagaagacatatcattaaacacaccactgatccatccaaataaacatatacctgttaaaattgctacaggcctcttcccatgcattgcatcagtaaatgtttggaaaagccacttgaatgcttcgattgtctcctccctcaacaaagcgcaaccaaaaattgctgtttgaaaatggttatttacaccgacaaaaatcccaaatggcatgttgtacctattagtctgatatgtagtatcaaaagtgattgcatccccaaaatggtcaaaacttaatctggaaagagaatgacaccaaaatatatttttaatccttgaagcaccatcaatctgtatggtgtaaaagaaa

SEQ ID NO: 28846 - DNA, 755 bp, Oryza sativa
ttcagcttttgcacgaatgtgtcaccattttttaactgcacgtttcctcatcgcaggacctcgtatgccttcgagcgcgttcgcaggcacgaccggcgcttccgcgagctccgcaggggcgttcgccacctcttcgggcgcgttcgccagctcttcctctcacggagcgtcgatccctcgcccacacggtacttaagattttattaatactgttaaatacctgtacgaaactgatggtccttgtccagcaggatttgcagccgggatcttcggtactggggcctcttcgtctcacgccggtaggactggtcctactagccagttctacgacgacgacttgcacggtgcagaccaccaggacgtactaggctcctctcagcttggaggagctccagaggcgcacactcaggagcagccagaggtcacacctgtacaggcaggacgggttggccgtgccgtacccccggaccgactcacgtactcccaggggcacattagggcgcaaggtatgagggacaggggtaagaggcctcgtcagtagtgttctacctcttcagtccttatgtgaccgtttcttttggcttacaaacttgtaaagcagtactacttttgctattactactgcagtactacttgcgtttggctccgctacgtagatcttttcattctatggtgcttgaacaacttatgctcacaacaacacactttccgcgcttcacggtagtgccatattcaatagcgcgcacagttcacaa

SEQ ID NO: 28847 - DNA, 1270 bp, Oryza sativa
attttcaaaatggaaaattatttttgtaaaacttttaataaaaaaaattataaataaaaaaaattccttgacgagaagggcaccatcgtgatcaatcatctgtctggtgggcccaccacaatagactcgggaggcccaagttgatcccaagccgcacgatcaaagccgatgcgcgtcatgattggatttttgccctttgcccctgccccctcgctcctcgtggtggggtgcacatgacacgactgcttccgcgtttcttctcggcgacgcaccccacacacgcacacacacacctccattcgctccccgccacacaacacgagaaaccccccacccttcgctcgccgccgccgccgccgccttccgccgcctcgaaccggaccaaccaacgacggctcgcttccctccgaggcggtaggccacctcctcccggcggctcccccatctggccgcccggcgccgagctggggatccatccgcccgcgattcctctcgccggtaacgactccctatcttcgctgcttggatttgcgaacgacagaatcgaatccagatatatctctctcggttgaatccccgtcgcgttttagtcatcatcattcgtatcgtaggtagggaggatttaggaggagtaggggttccgagtcaacaatttttggtgtgtaatcgtggtgactttgtgaccaggtttgctctccattgccagctgccggtggccatggatgacggggacctcgatttctccaacccggacacattcctctgcccggccgtcggtggtgctgaccccgacggcagctgctccatggacagctatttcgacgacatcctcaaggatacggagcaccatgcatgcacccacacccacacctgcaacccgcctgtgcatgacctctcacacacccacacctgcgtccatgtccacaccaagatcgtctccgccccatccgacactccgtcggatgctgccgagaccgccgagtccccgacggagaacaatgcctccaagaagcggccgtcgggtaaccgtgccgctgtgaggaagtacagggagaagaagaaagctcacactgcctcgctggaggaggaggttgttcatttgagggctctaaaccagcagctcatgaagaagctccagaaccatgccacgctcgaggcagaggtatccaggctgcggtgcctgctcgttgatattagaggaaggattgaaggggagattggggcttttccttatcagaggccagtgaagaacatcgatttggtttctagt

SEQ ID NO: 28848 - DNA, 3388 bp, Oryza sativa
aggataaaagtcaattgtgtggggtgttaattgacagtcccctctcctccaagggggccatggtatttatacccataggtatccctttgtccaagtggacttagggaaccaaatatggatccaatcgaggaagtcattgttgtttccatgaaaaattctggttgtctttctttatccggaactccctcgaggtcagttcccgtataagacatgatatgtggtggatcctgccgagatttagttacctattattaggtatgtggtatccatacccctgacagtagcccccgacttcaatgcaaatgaacgaattcatattctcgaccgctaaccatggaataactgttatcgagctcaagtgaccgttctcggtgagttcagagataacgttagacttcttttgtcagcctcgggaggacacctaaagggtttgtctgagtcaatctccgacgtcaaccaagaaagtacagagcatatgactaagtctcctgtcttgctataatcgagaatttggattgaagtcaagaaattttatctcggcgggtacaccatctcttcattccgtattccttgtcgagatccaccaactgttctcgagcaatcgagaaggcgtagaatctgcgacgaagccttgtcaacatttgtcgtactcgccttagtcgatcttggtgtacaaccatagagacatggagtcttcgataatgtcgaatagaattttcctgaaatcaatactcagaaaagaatattagatagaaatagcccccgagtgaacgctcaaagggtaacatgttataatatgtatggaaaaccgaaaatgaattaaacttacagaccaatgttttgtatatgagcgtctactcttttaccgacttcgatcagtcagtttgttgagttatacactctccctagcccccagccttgtcatcggagaatcgttctcggaagatatggctcctggacctttgacctgcctcggttgaacaagcactgatcctagcccccagccgtgaagttggaaaatccaatttccgattacacggcttggttaatacgcacggtgagaactcttacacaaccatatcttacatggtctttcatctctgaaggatccgacaaggccttatcggctctgggcatccccagccgaagttcccttaggttcctcagaggccttggcaagacggcgtaaagggacattcggataggtttcaactctaggtgtcatcgaggtaagggatctcagggtaaaacacctggtgatattgggtacctgatatcaaactttgtgaagtagaggtaatgggagaatcgctacacctctggtcgaggaccaggtagtagtcgtaacccgaccacttgaagtggaaatagtgggagaatcgctacaccgctggtcgagaacagctagtagtcgtaactcaaccactataagtaaatgtacgagagatcgctacgattgactggttgagaaccagtgaataggtgtctctcgatcatttgaagtcgtggtgcgaggaccgctgcgttattgttgtagtcgtacctcgaccatctgaggttgtggtgcgagagattgctacgtactggttcgaggaccagcaaacatgtagaatcatctttggaacaccaatggaagttgcggtgcgagagattgctacgtactagttcgagaaccagcgagcgtgtagaattatctctcgatcgaggaccagcgagcgtgtagagttatctctcgaacaccaatggaagcttgcggtgcgagagattgctacgtactggttcgagaaccagcaaacgtgtagaattatctctcgaacaccagtagaggtgctagagttggtttattacatgtgcgtctcatgtggccagcatgactcacacacccaactcgtagcatatccggatgttcgttcgcaatcatatcgggtgatcaagccgacgatgttcgcgataattatccgttaacaaccttttctcgagtagtccagccatggccggtgctatgagataggtcgtcggtcttcgttggcaggttggacgcgacgactctgcatttgtcgaggtcgttctcgataatgcggtgtactcgaccacaacctactcgagtgctcaattgttcctgaaaaatattttctagaaggcaagacatacagcagagaatatcgagtatgtattcgaaaaactgcatggatcttctagtattatcaggatatagcgagcagaataaatatcaggcattatgtaaaccgtaaacaagtatgatttatatggaagaaaacagagcgagcccccagcgttagaccatagtctatttaacatcggggacacacgcacaatagatattgtatagaaaacatgctctaggtaaacataataaattatagatctgacaatattgtacgatctgaataggtacgataaattgcatataaaatattgcgtacctttgtagatacatgccggatgtatctacgaaattagtagattaatttaaaaaaccaatctaccaattaccttgttgcgtactcgttcgacatcatatgatctgacatcttctggtatgccgcgaagcttaaggcttggatgatctcgatagaccaagttgtcgatgatgatgagcgttccgatctaatcggaagatgtacttggacaggttggatctccccacagccgaagtcgtcgagtagcttgttgtcggagaatccatctctcaaacccatctcgtcgaaaccttgaagcaccaaaatccccctacctggcgtgccactgtcgacgtttgatgtctcgactacggtatttgcatggcatggggatcgttggtactagggtatacgcgagactgagataaaagagatggagatgaggatttttatacaggttcgggcccctgaattgttaggtaataaccctacatcctgttggccgaagccagtattgctcttattcatgataatcacaccagtacaatgtttggggtagcctatctaactgttgtcgacatggcagtctgaagatctgactcgtagtcgaccataggtagcctttctcctcgaatccgtgcccggcgagatcagagatagcgctttcatctcttctgacagtatccaaagacaccggagggtactaacccagcttattcctgaagtcgatattcggcggcgtgtcttggcttatgtaagcttctatggtggggcttctatgtcaaatgggttgggtgttgattgtccgtccccttttctctagggggccttgatttatacccattggtatccccttgtccaagttgaacttgggaaaaccaatttggatacattcccggtagtcattggttgttacacagaaaacttttggttgtctttccttatcaagaaccccctaggggtaagtt

SEQ ID NO: 28849 - DNA, 19037 bp, Oryza sativa
ttattgaaatacggaagagagaaaaaagataagtatatgcatatgtggtagcccccggccaaccctgcacgcccgaggggggtgcggggttggcccgagcccgagacctgacacccgacccccactaggggtagaagcgacgaaggtgttcgatgttccacgggttaggcagctctgtgccgtcgcccgtggccagccgaacggagcccggccgggagacgccgatcactcgatacggaccctcccacattggtgagagcttgctcagtccagcacgcgtttggacgcggcgtaggacgaggtcatcgacgcagagtgattgggcccggacgtgacgctgatggtagcgccgcaggctctgctggtagcgcgcggctcgaagggccgcgcgccgccttcgttcttccaagtagtcgaggtcatctctgcgaagctgatcttgatcagcctcgcagtacatggtggcccgaggggacctcagggtgagctcggatgggagaaccgcctccgcgccgtagacgaggaagaaaggcgtttccccggttgctcggcttggcgtggttcggttcgcccagagcaccgctggcagctcctcgatccacgagtcgccgtgcttcttgaggatgttgaaggtcttggttttgaggcccttgaggatttctgcgttggcgcgctccacttggccattgcttctggggtgggcgggagaggcgaagcagagcttaatgcccatgtcttcgcagtagtcaccgaagagctcactagtgaactgggtgccgttatccgtaatgatacggttaggcaccccaaaccgagcagtgatacccctgatgaatttaagtgcggagtgcttatcgatcttgatgaccggataagcctcgggccacttagtgaacttgtcgatagcgacatacagatactcgaacccgcccggggcccgtctaaatggacccaggatatcgagcccccagacagcaaacggccatgaaagaggtatggtctgcagggcctgggccggctgatgggtttgcttggcgtggaactggcacgccctgcaccgccggaccaagtcgaccgcatcgttgagagccgtcggccaatagaaaccctggcgaaaggccttgccaaccaaggtgcgtgaggcagagtgggctccgcactcgccttcatggatatcggcaagaagctcgacgccttgttcccgaggaatgcacttcaggaggactccgttagccgcgtgccgatagagggtcccttccaccagcacgtagcgcttggagatgcgctggacgcgttcactcccttcgtggtcctcgggtagagtcttatctgcgaggtacgcctggatctcagcgatccaagcaatcaatctaagggagctgggagcgctcccctcgggtcccgaggcctggactccgacgggcctcgggggccgttcaggcgcgtccgtctcccctagggggtcgggtcgcgccgacggctgggcaagcctttcttcaaaggcgctcggtggggtctgggctcgcgaggaagcgagccttgagagttcgtcggcgaccgcgttatcccgtctgggcacgtgccaaagctctatcccgtcaaaatggcgctccatacgccgcacctggcgcacgtaagcatccatctgcgggttagagcactggtactccttggagacctggttaacgaccaactgagagtcgcctaacaccaggaggcggcggatccccagtccagccgccactctgagtcccgcaaggagtccctcgtactctgccatattgttggttgcccgaaagtcaaggcggaccaggtatttaaggacatctccgctcggcgaggtcaacgtgacccccgcaccggcgccctgaagagacagggagccgtcgaactgcatcacccaataggcggtgtgaggcagctgcgaagggcccgagctggcctcggggatggagacgggctcgggagccggtgtccactctgccacaaagtcggcgagggcctggctcttgatcgcgtggcgtggttcaaagtgcaaatcgaactcagagagttcgattgcccatttcaccacccgtccagtaccttctcggttatgcaagatttggccgagcgggtaggacgtaaccaccgtgacctgacgcgcctggaaataatggcgcaacttcctcgaagccatcagaatagcgtaaagcatcttctgggcctgagggtatcgggtcttggcgtcccggagggcctcactaacaaagtagacgggccgctgcaccttttggcggggccgatcctcttcgctaggggccgcatctccagggcgcttttcgtccgagaggccgcgcggggcgcactcggcttctgtgtcgacgacctcggggtcggaaggcgacaggcgcggccttcccgcagtggccctggggccatcctgggggtcgggggcttctggcaccgtcggacaagcgggcagagggccagctccggtcgtcgggggcctcgggccgccgttcggctcgggggcctctcctccctgctctctcccgggtcgagtcgatacagggtgctcttcgtccgagaggccgcgcggggcgcactcggcttctgtgccgacgacctcggggtcagagggcgacaggcgcggccttcccgcagtggccccggggccatcctgggggtcgggggcgcctggcaccgtcggacaagcgggcagagggccagcttcggtcgtcgggggcctctcctccctgctctctcccgggtcgagtcgacacagggtggggatgcgcggagcgagggtcgtcctcgtcgcgctccacgaccaacgccgcgctgaccacctgcggagttgccgccaggtagagtagcaacggctcatctggctccggggcgaccaggactgggggagaactgaggtacgccttcaactgagtgagggcccgttcagcctcctccgtccagataaacggcccggagcgtttgaggagcttaaataggggtagcgccttctctcccagcctcgatatgaaccgacttagggcggccatacagccagtgacgcattgcacatccctaagcttcctgggggggcgcatccgctctatagctcgtatcttctcggggttggcctcaatgcctcgggcagagatcaagaacccgagaagcttgcccgcaggcacgccgaacatgcacttgtcggggttcagctttatgcaggtggtgcggagactttcgaaagtttccgctagattcgagagtaaggtctcctggttgcgtgttttcacaaccaagtcatcaacataggcctcaacattacgtcctatttggctacccaaagaaattcgagtagtacgttgaaaagtaggacctgcattctttaacccgaaaggcattgtcgtataacaataagttcctacgggggtaatgaatgcagttttttcctcatcctccctagccatgcgaatctgatgataaccagagtatgcatctagaaaacacaaaaggtcgcaccccgcggtggagtcgacaatctgatctatgcgtggcagggggtaagggtccttaggacatgccttgttaaggtcggtgtagtcgatgcacatccgaagcttgccgttcgccttgggaacgacgaccgggttcgccagccactccggatggatgacctctcggatgaatccggcctccagaagtcgcgccacctcctcgcggatgaaggcttgacgttccggggcctgccgccgcaccttctgcaggaccggccttgcgcccggccgtacggcgagacggtgctcaatcacctccttggggaccccgggcatgtccgccggtctccaggcgaagacgtcggcgtttgcccgcaggaaggagacgagcgcgtcttcctatttgtcgtccagaagaccaccgattcgtgtggtcttggacgggccgtcgcccagggcaacctgcttgatctggacctcgtcgcacgtgatcatccgctgcctcggggcggctgggacggaggtgctgagcttctcgtcgccacccgtgggcttggatgccgtggcgaggtggtccgcgcgctgctccatgcaagcaagcgcgactttgaggtcgccatggacggtgatggggccaccggggcccggcatcttcatctggagataggcgtagtggaccgccaccatgaacttcaccaacgcgggcctccccaggaccgcgttgtagggtagactgaggtccgccacatcgaagttcacccgctccgtgcggaagttggcggaaccaccgaaggtgaccgggaggtcgatatggcctagcggccaagtgtgccccggcgtcacaccgatgatcggctgggacgaccggagcaccatccccggggccttaatggcgtcaaaggcagcgggggaaaggatattgagggctgcacccccgtcaatgaggacacgccccaacttcacattgcaaacggtgggggaaaccaccatcgcgatctgtcctccccgggcaacgcacggtgggtggtcggtctgatcgaaggtgagggcaacctccgaccaccgcgcccgccgcgtcgcctcatgggtaggggccacggccagaagctctcgcttcatggccttgaggctccggcgagaagcgtgagcacacgctcccccatcaacggtggcgacggtggcctcaggctcctggaaccctaggtcatcgtcgccatcgttgatgtcctcggcgggggccttctgcttggcctcacctcgccggttgccggcgggagccgccggggtattgccctcacggcgctcctgcctcctctcctcctcccacttcctcgtccgctcagccaaacttttgaccgcgcggcagtccacgaggtcgtggagggaggtgttgtgcacggtgcaccacttgccggtcgggcgctccctactgggagcgccggcctccttctttttgtcgctcgcaggcctcccctttcgggtggcccgcgaagcgccctcgacggcgaggacgtgaccctcgtcgtcggaatgggccgacctcttcttcctcctcctgtcccgccgccctgaccgagcagcgggcccgggggcggccggagctgccacaccggaaccggaggagttccaggtccaggcctcctccttgcgagccacacggtccgcgagctgaaaaagctccgcggtggtctggggctccttggaggcgatcttctcgagcatgcggttgtgccgcacgccccccctaaacgcgtagatcaccgcgtgtgcagggatgcacagtatagtgttgcggacttgacaaaaccgctgaatgtacgagcgaagagactcatcgtcccctcgctgtaccacgtgcaagtccgcttcttcacctgggcgcggatatgtgccctggaagttcatggtgaactgctggcacaaatcctcccaagagtgcaccgacgcgggtggcaagttcattagccaaccccgcgcctgtcctttcagggccatggggaagaaattcgccatgaccctgtcgtcacccccggcggcctcgatcccagtcgtgtagatctggaggaactcggcggggttgacgcttccgtcgtatttttcggtgatggtgggccggaaccttgggggccaacggacgttccgaaggctcgccacaaaggctcgacagccggcaccgccaaccggggacacggggggctggcccccgtgcccggaccgaagtggcgctccggacgaggaagcgccctccgatgcgttggcagcacggcgatcattgcgccggcgctcgatattgaagcgggcatctggccccctacgcacatcttcttgggttggaggcgttgacgagggaatggcggacgaacggcgggtaacggccgccgctcgccgcgccctccgcctcgacgacacggagccagcagtagcaacgccagtggccttggtggcggaggaccgccagtcggcgcctaggcgctgctgcgccgtcatgagcaaattggccacgtcatctagccaacgtcgggttgaagtctctggatcagggatgacgggcgggtgacgcaggagcgcgcccgcagcctggagcgcgccctggggcgtgctgccatcaccgtagacgaggagacgacgctccccgtctcgacgtccttctccatcgcccgcgtgcggcgaagtcgcggatctttcgacctcctcgagcgcctcctcccgcccaagacttcggcgagagggggacagtggagtacgagctcgacggcgcaggttctgctccccgtcgtcaccgctagcgctcggagagagattgtgcgccactgcccgttcggccatggggctgagcgggagaagcttggcgcacacgaaagaggacgagggcttagaaagacacacgcgccccctacctggcgcgccagatgacggagcgtggagctcctcatcgggagaccgcgcaggcccccctttgccggttcggccgggggcactaagtgaggttcttcgccctcgatttccttaacgtatgccgaaaacgtccgtatacacgcaagtataccatatcgatatgtgacgtatatcgaagggtagagggtataccttacctgtaaccctgacagtagcccccgacttctgtttaaatgaactcgtgtaaccgatcgtgacttttgatgtcgaggttgttgttgttcttggtgtgaggaccgagagacaaggagtaatcgacaacaccaagtgaagctcaacggtcatgagtgaatttaaattgaagtccgaaaaactgccacgcgtaacggacctagaaattcccggcggttatctctctcctttccttggaattcgcaccgtcggaagtgcgactatttaagggagtttcggggatccattttgaagtccgcctgttgtgaaaaaactctccagcccccaagcgttactcgtcttctccgctcccgcaaaaaccctagctagctcatctcggtcctttctccggcgatctccggcggcaatggacctcgacaagtatacctccaccagcgcgtcgttgaagaaactacaggaggatggcgcccttcccggtcgcgggaccatggagagagaagcaggaggtattgaaccctagcctttcctaggtcgcatggttgcgatcgaggactatattctctgtggttttcttcctccgccttctgaatttcttctcttggtcttgaatttctacggcctttctttggtccatttgaaccctaattccatcgccttcctcagtattttttcacatctttgtgaggcctacattggggtagagctgttccttgacctctttcgtttctactacgagttgcgtttgatggaatccaacagggtatccggatgcgtcggtttccgaccttgggatggcctgaagtcgcgctatatccccttccagtgcccttcttctcgtagcaaatggcgggcgaggtggttctatcttcagatagaaaattcggatccagtcttcgttgttcctgaggaacaaccagacaagatttcgtcttggaccgcaaaacccgccttgaccccttctcttcagtccttcatcgatgccatcgatgacctccgagtacgaggtttgtcggggtatgaaatcgctgccgacttcattggtaggcggatccagccgctctaggctcgagcccacccagcctttgactattttgggctggaggacgcgacccggatttctcctcggggtatttttcttgtatttaaattgacttccttatgtgtgtgttcctcctgacttatcgaattccgattctcgatctacaggtttgaacagcgaaaccgtggagcgccgcgtcggccaattgatgatcagcggcccgacaacggcaagcaacgtccccgtccccctttgcgagaagggggcagccgaacgcgaggctgccatcaatgtaagtgtactcggtggcccttttgcatttttcttccggaatcgcattgtgacttcatgaagtgtaggctctccctctgactgatatcatcgggccgctcgtggatcatcaggcggcggcgtcgctgaaggaggacgtcgccaaggaggcgtccgatgttgctgccgctgcagccacaacgagtggcggcaactttccaaaaagggggaggaaattctcctccgtgatcggaaatcgtcggaagacacccaccccctcggtaagctctcctggtccttcatcgcgtagtcagaaaacttccacctcacatcatgcccgttatactctaggcctcggatgcgtctcccctgcctccgcgacggcagcagcttgtgacgcttggcgagaagtaagtggatgaatttgaggttttctcacttcgtcaaactcttgcagcctgtctcaattgcggcctttcacagggcggcgcgggcgaaggcggcgcaagacgaatctggagggacctctagcgcgtctcttgctgtggcctcgacagatgtcgtggtcgtgcccaggagccgcgaggcaacgcctagtggcccagccagcgatctcgcggctggttggggtccgccggctgccgtcctcacctgggaggagctccaggtcgagatggggcgcctccttgaggctggtggtcacagtattagccgcgagatcgcggaggtgagggcggcagtggcgtcgtcggtgaatgagcgcgccgaccggctgacgcgcgatttggcagaggttcgcgaggacctccagaagatgagggagctggtggccggcaatgagcgacaacggcaagggctcgagcatcgtatgtcggagcttgagaacttgtcggaaatccgtggctcgctgcgggtcacctacactggtctgcaccagctcgccggggagtgtggcatcaggaccaccatcccggcgaatcccgacgagttctcgctgacgtcttcgcttgcaaaactggccacggcgatggaggcgatcccctccaaacacgcagccatgatcggagaggagacgtcaaatgggatctataccggggcgtgccatgtccttgcgtgtgtgtggctggcgcatcctgaactcgatctccagaagatcttggatcagggggcggctagcgatgcgcgcaaggatgtgatggaagaagtcggcgatctgggggagtcaatcctcccgctttttgaagagtaggtttttggctcccttgtactctttagtcatgctttgtaagactctcattggttccaaccgcctttgtgtgtgcagtcatcaccttagttttctttagcattttgatctcgagtattttgttgtcgtttgtagagatgttgatgtcgaggatgtccagtagcgtgggcagcctgagttgccagtgatcgtttcggcacttgcgttcgagccatatgtgccgcagggcgatgtagatcaaaattcgcctatggaaacgggcatggcgacgacttccttaggttggttatttttgttttcatctcctttactcctccgtctggaccgacttgctttgctgtgttctcgggagagaagagcagtttgacttagtcatttccatgctgagcagacctcgagagtgcgcttgctaaccaagatcgtcgcatccaatattggaggacaaaatttgaggtagcggaactcgagaggactatgctggaagtgaagaaggaccaggccgtggaaacactccgaggtcgtgaggtgtggttcagctcgtacctgaagagttgctgcacatccatgacaagagtctgtagagagctccgagtaccccgtggggatcctgaggaatcggcggccggatacatctcgtggctgaatggggcctgcgcccagctcgacgacatcagcaagcgtattgacgaggccctgaagcaggagtgccgtcgatcgagccgatatgccggggggcatgtattggcttgcatacgagatcatcgcccgcagctacacctcgagttcctccacgaagggttttctcgttgtcggagaaatcctacggagatagatcacttggcgaagtcgatggcgccgctggggagaaggtcttccagtccatggactggcgttggccttcctggtagtctccgtatcctatgacaaatgtcttagggaaaagtgtaatataattttggatttttacgtaattgtaagaagtatttgtgaaatagaaaagaaatctatctaactaagctttcttactctggacgtagtgtgtaagagtgtcttcgcacttcgcgacttcgatcagtcgtttgagttatacactctctctagcccccagccttatcatcggagaattcttctcggaagataaggctcttggacctttgacctgcctcggttgaacaagcactgatcctggcccccagccgtgaagttggaaaattagtttccaattacacggcttggttaatacgcacggcgagaactcttacatgaccagatcttacatggtatttcatctctataggatccgacaaggccttatcggttctgggcgtccccagtcgaagttcccttaggttcctcagaggccttgtcaagacggcgtaaagggacatgaggataggtttcaacgctaggtgtcatctgggtaagggatcatcaggaaggaacactttgattgtaatatgtacctgaaaataggctttattgaagctgtaagatgtcttacaagtatggatactattgacttatacatagaatttatgtaattgatcaatgttccaggaatttgccaactcgcgaccatcgctgtctgcaatcttgaatgcgcctggccgcaagacctgtgtgatcgtgtacagtccttcccatttgggtgagagcttgtttcgccctgcttggctttgaacccgtcggaggacgtagtcgccgatcgaaagcgtgcgtgctcggatgcgcttctcgtggtaacggcgaatggcctgttggtagctggctgctcgaacggcaactcgttcgcgatgttcctcgagtagattcacagcgtcatttccctgctcctcctgatcctcatcggaatacttctgtactcgtgtactttgatgtcgtagctcggtggggagcatgtcctctgagccgtacacaaggaagaagggtgtctccttgttagacgttgtcggtatggtatgcacggcccatagtactgatgggagttcttcgacccacttcttgtatgtgatatgagcctgtcgtagacgcaggtcttgattccttgtagtactatgccgtttgccctcttgacctgtccattgctctgagggtgagaaaccgaggcgaagcagatcttgactctcagcctgatgcagtaatcctggaaatcggcactgatgaactgggagccgttgtccgttatgatacggtgaggcaatccgaatctgcaaaatatccctttgatgaatttgatggtatggtcggccttgatttcccccgtgggtgttgcttctatccacttagtgaatttgtcgatcgccacgaataggaacctgtagccgccctgctctcgtgggaatggcccgagtatgtccagcccctagcacgagaacggccaagtaagagggatagtctagagtgcttgcgctggtagctttgtgtgtttattgtggaattgacaggcttcacaccgctgaaccatgtcgcaggcgtctttgagggcgattggccagaaaaacccttgtcgaaaagcttttctgactaatgtccgaccgacggcgtgtgactcacagatcccttcatgtatgtcgaggaggagatgtctgccgtcatcggacgagacgcattttaggagtatcccgttaggcgtcttcttgtatagatcgttgccgatcatacagtagatttttgctttacgggttattttctcggcttctgcgtcgtcctcgggcaactcttcgctgcctatgaatttaatgagtggggtgtgccagtcgtctgtggtctcgatatcggcaacggcgcgctctgcctctatagcccaagagctgatgttgaggacgatcaggctatctttgccgcttgcctctttcactgatggccttgtcaggacgtctagaaaggtgccaggttcgagtggctctcgtctggacgcacgccatgctagatcatccggctcgatgttgtccttgcggtatacatgtcggatctcgatcccatcgaaccttttttccagcttcttgacttctacgagatacttggataactcggggctagagcacttgtaatctttatgcacctggttcacaactagtttggaatcccctttcacgaccagtcgcttgactccgagtgcagctgcagctctcatcccggcgagtagtccttcgtactcggctgtgttattggttgccctgaagttgagatgaattgcatgcttgaattgatttcccgaaggtgatgtcaagataaatcctgcccctgctccttggctgttaagcgcgctgtcgaacgccattatccacgtttcgttgtcgatttggttgtctgacctgttatcaggcatagtccaatcggctacgaagtcggcgagtacctaggacttgatggctgttcgtggcacaaagtggacatcaaattggcttagctcgactacccattttgcattgcgaccgacaacgtctttgtttctcacgacttcaccgagagggaaggaggatacaactgtgaccctgtgggtttggaagtagtggcgtagctttcttgatgtcatgattaccgcgtagagcagtttttggatctgtggatatcttgtctttgcgtcgtggagagcttcgctgacgtagtagactggtcattgcaccttctctctcgacaacaatgatagtgctaacggaatatggcatggcggcaatatagagaaataattcttcattaggttggggggcaacaagtacagggggatttgataggtagcgcttgagtgcaatgaatgcctcttcggcttcctgtgtccatacaaatttgtcttgcttcttcagcagagcgaagaaaggttgtccttgctctcccatcctagcgacgaacctacttagtgccgccatgcatccggttagcttttgtacttcatgttctcgattgccttgatcttctcaagatttgcttttattcctctgccagatacgaggaaaccgagcagcttgcccgatggtactccgaacgtgcacttctctagattgagcatgaggcgatatcgtcggaggttgtcgaacgtttcccgcagatcgtcaatcaatgagtcgcttgtcttggtcttgaaaacaatgtcatcaatgtaggcctcgacattgtttctgatttggtcgctaagtgcgccctggaccgtacgctggaaagtgtttcctgtggttattagtccgaacggcatcttaacgtagtaaaataccccgaacggcgtgatgaatgttgtcttctcctcgtcctctttcgccatgctgatttggtggtagccggagtaagcgtcgagaaagctcaacaactcacaaccggctatcgagtccaccagttggtctattcgaggaagagggaagtaatccttgggacacgccttgttgaggtcggtgaaatcgacacacattctccatttcccattggccttccgcaccatgactgggttggctagccactctggatggagtgtctgtccaacttgtgtatagggcaccatgttttcttcgtgtcgctgccttgtgggtctgggcgcttgggagggtccgcgtattctgttgcgagaacctccgcttgagctttccttttcccactgttgcgatttttcttcttgcttgactcaggtgcttccttggctagtttcttctctccttcggtcttcggtttgtcgttcttgcgtctcagtgcgtcgtccgcgtgagcgcatcgatcgacaatttcgaataatctccgagttgtcgtgacgcgcttcgttgccaactcctgggtagtatagcgatctctgacactggacttgaaggtgcggattacagaagcgtcggtgatttcggggattgtatttctacactcattaaagcgccgaacataatccctcaaggattcacccgggttctgtgtcaacacatgtaggtcgtcttcgatcgcgtggcgcttgtaagttccctgaaagttggcgatgaactgctgccacaggtctgcccatgaagaaatcgagtagggcgggagatgcatcatccatgaacgcgtagaacctttcaatgcagttggcaaataattcaccaacgcgttgtcgtccactccggcagcgtagagtactgtggagtagacctgaaggaattcttctgggtcggtactcccatcgtacttctctattgctcctggtcggaatctctcaggccatcggacatcacgcagcgaacgactgaaagctctacacccagcgctgggggcggtgggttgtcggcgatcgtacgtccttcgtggatgtctatctgatgatgaggatgaggaagatgacgatgatgacgacgggtcacttggttctggtgtacgattacgagggcgtcggccaggttctcgagaatcctgtcgtcgtctcctgttgttgtcccggcgccgatctccatcatcgtcgtcattatggcggcgtcctcgaccagtatcgcccagcacctgccgttcgcgatcatcgtgatcgtggcggttgtggcggttatcacggtctcggtcttcgctcgaacggcctcctcgttcttcgttatcgggacgtcgtgaagagacacgatgtcgggaactgttctcgttgtctcgtgcgcgtcgcgcctctcagcggccattcaggtgatcgcggagatcgccggtgccgcgaggtggaggggtggctcgatgaggcgattcctgctgttcagggttttcgccattagcaccgccagttggtggctgttccgagtgcgctgcagcagcggcctcttcgaacgcattgctgaggttggtcactgattcccgtagtcgttctgtccaccgtgcgacatcgtcgttcagaacgggatcgttgggggtttccctcagtattgcgttgacggccctgatgtgctgggccaatgtagtcacttgattttccgcttccgaattagcgcgcgctgacgtgctggtccagccgatagtcaatacctcgcatggcgtactcgttgacgatgagccatagtcttcgagcaggtgcaagactgatggttcatggggatcgatgtcgattaccccaacgaatcgatctgtgatcagcgtcgctccttgttccttgtcctcatccctgagggggatacgtgactgttggaccttaggaggtgacgtcttcatggcgctgagaaagaccttgcagcttgagaggtcgtgattctttgtcttgtgaataggacaatagacatcaagagttggagaagtacgctgaattccacgctctttgcaagcacgaatttcagcgtgtacgttgagaaaaacccaacaggcttgcaaggtgtgttttctggttttgtggataggacaccaggaccttgtcacctcggaagtcatcctcgtcgactcatgattcttgtcggaaagacaagatttggccgcattgggatccttctcgggatcggatgtcgtcgacgttccgttctccacttcggcgggaggatctttcgacatggagtcgtcctgggttgtagccactgcgttctcccttccggtcattgatggaccagccgagatcggcaccgtggtgtaaaccgggaagatgatttcgccgacttgagtccacaccagcattgttgaagtaggaactccttggttgaggttggtgttgacgctgttgtcgacgaagctggatgacatggtagtagaaccttgagcaccaaatccccctcttaacgaccaaatttggtaaattctatcactattggcatcgaaggtgaagatcagatcgaggtggaatccaagatgaagatcgttgcggaaacagagtaagaatcagctgcagtccaaatcggctaaggtcaggtcggcagagttcgagtcggacggggctagccgatacagccgattccgataatatgactcggtgtacgtcatcgggttcaagttgatgtgcttcaagatgattgccatgcatggatagagtcctgggaaggcaattgtatctattaattaggatattctatttaatttccttagagatatgtttgggcaaaagcctgccgtaaagacttatggtatcttagagtttgttagagataatagtcgtgtctgttatgaacgtatcttgtaattctcgggtataaatagacccgagtcctatgtaaaaagaacaacacatccaatacaatctcggcgcatcgccaccctttatgctttacttttatttcgacgagttcgtgctctcgggttgagctgcatcggtttcgaacttcaacaagaggtaaagcttgtcatgacgacttatgttcttaggattagtgcttccatctttatgacactctaatcttgtctatataattcatcgagttatcatatatctcatataatcttcgataatatcttcatctaatctgtaaccggctaacatctgttaatggaaggcagccgattaggttagacaatgatgttaacttagattatgtgatatatctaccactctatgaaacttccagcgtcttgattgtctagatattgttcttcttttcatacttaatgctgcatcagttgagtttgatttattaagtcgtgcttagaattgcaatctctagcctgctttctggttgccgattagggtagtatcggagtttcagccgatcttatctgatttaactacttttattctatatgcttgattgacatgttaaatctgccctttatgttaagattttaattgcatctaagtatattaagctactgtttggtatattctacctgctttaacatcttaatatagagtggtatcggagtattagccgatacatgctagatccatttgatcggctatgctataaatgtatataatcccactattaatatatatttcgatctaagtgatttatactgtctcggcaaggcgaccgatctatcccaatcacttgatttaagtatatatcgatataaggattatatatcattaatatctacagccgatcaagtagatttagttctgatttgcttattgatatttgccgatcgatgtacgcatgacatcggcttgaaataaatgatatgtcatcggcacctagccgatcggctatcatttataggattaactgtggtttctttgttctatttcttgttgattgtaggatcaaatcaactggcacgctcatacacccgaaggagagttttggacctgcactggagttaagcagatctcccaggcctcgtgttttctgtcaacaccccctacctggcgcgccactgtcgacgggggatacccgtagaccggatatagagggtactggggtacgctggtacgaggatctacgtaatacggcatgcgcgcgggccaccttcctagttttatctaacgatgtataatattggatccaccaatttaactgaaaataaaggggtatgtcgacgtttgatgtctcgactacagtatttgcatggcatagggatcgttggtactagggtatacgcgagactgaggtaaaagagatggagacgaggatttttatacaggttcgggcccctgaattgttaggtaataaccctacatcttgttggccgaagccggtattgctcttattcatgataatcacaccagtacaatgtttggggtagcctatctaactgttgtcgacatggcagtctgaagatctgactcgtagtcgacgataggtagcctttctcctcgaatccgtgcccggcgagatcagagatagcgctttcatctctcctgacagtatccagagacaccgtagggtactagccgtgcttatccctgaagtcgatatccggcggcgtgtcttggcttatgtaggcttctatgttgtggcttctatgtcgattgtgttgggtgttgattgtccgtcccctctcctcctagggggccttgtatttatacccataggtatccccttgtccaagtagaactagggaaaccaatatggatacaatccgagtagtcattgttgtttccatgtagaactctggttgtctttccttatccagaactccctcgaggtcagtttccgtataagacatggtatgtggtggatcctgccgagatttagtcaactactattaggtatgtggtatccataaccctgacaggatatatgttttgcttttttattataatttattggattttctttaatttataagagtgtcacatggcggctcgagagcgtttatagggagtttcatggactttactatataaaggatagatacctaagtatcacatttgatacctacggagtatcatgtctgatgtcatactaaattcgatactttcggtaccatactaacatgagcatgatatctaagtattggatctaggtatcatgtttggtactggaggtatcaaatcgggtatctacggtaccatgctggtatcagttattccgttgtcatgctgacatcagctattccattgcgacggtaataccgttacgtagtctgtctacctagtaaactttaggcccacgaaaactggaactgggcctaagtaggtcgaaaagttgcccatccaccgtgggaataagttcatctaaggtcccttaacttgtcaacgaatccgattttcatccttcaatggcaaaaccagatacaacgggtccctcaactatcaaaaccgatgcagattaggtccctcggcggttttggctgacgtggcacttacgtggctaatttgactcggtctcgatctgatgtggcgcttatgtggcaattcgatccgaaaagataataaaccccgtgggacccacatggtaatttcacacacaaaaattataaagaaaaatagcggggcttacatgggccccacatattaatgggccccctttttttcctctttttccccaaaccccctcttttaaattttttccctgtcctattttactttggagctcaccccggttttcttggtcccagggcttttttacttagggaggtttccacg

SEQ ID NO: 28850 - DNA, 10138 bp, Oryza sativa
gtgaagggcgcattaaatcaggttctgggggttaaaggcggaagatggatttggttgacaagttaagggaccctagatgaacttattcctccaccgtgacaggcctagccgctaggcccacatattcagcaattcagataggccgatccaaccgcgtacgaaaggacaagtactcgtggtgtctgtcgttctcttctctgatcataccaaaaggacaaaaacttggattagtgctgagctggcgctgttcaaacgcgcaaccaagcagatgccacccaagccaagaggaaaaatccaggtataactagggcctcgttcattgtgaacattattgacctctgctgtctttgcaaggagcaggtgatgcttataatttaaggcgccgttcggaatttttattcgggactctagcagaaatgagaaacgtatttatattttttttattctatcagaaataggactgtctccagtgaacttggttgtgttcgttcgagattgggaaaaccttttccgacacaaaacaaaacgtcagattattatataattaaataaatattatcttaaaaaccacaaaattagattagtataatttttaagtactaatgcactgtttagcagtctgcggaacacgcacgtgagagacggagggggtagaagttggaaaagtgtaggatagaactcagccttagtgaaggctgataaattcacacgttccaaaatggcccaaattgaacctagttgggagtaaataatgagttggactgtaatttggagggaaaaaaataatgcgaatgatgctggattttcgtaattggatttccgccgaaatggaacggtgcaggcaacgttgccaacccatcatcatcatcactatcgtcgtctgtgcatcctttggggtgtttaaatcggatatacagactcatatttaaagtattaaatataggctaatgacaaaataaattatagattccgcctgtaaatagtgagacgaattttttaagtctaattaattcgtcattagtaaatgtttactgtaacaccacattgtcaaataatagactaattaggcttaaaaattttatctcgcaatttacccgcaaactgtataattagttttttttctatgtttaatactctatatatgtgtttaaatgtttaatgtgacagatgtaaaattttgcatagtaactaaacgtttaatactctacatcctcctgagacgcagcgcgggctgtccatgtcagggaatgttgagttagttgtgattggtcgctggcgtggacgccacaggccccgcacctaaacatttctggcacgcatcgcatcgttcggttcgacccgcagccgattcgcgcgccacgtacataccgactcgtcgatgatacgagagccgtgttaggcgctgtcagcgcgtggcccccacctcacatgcatgctgctctcccgccttgtggaattgccgggcccgtctgacctcagccggtcagcaaccgttagagacggagctatgaaagccgatcaaaaaaaaaagattaggtatagcttattttcatcacacgtacatttctaaatataaacttaaacatccacatcggtttaaatttaatctaaattacagtaaagtaaacgagtgataccgctcttcacatctgataattgatgttactgtttacttaatcatcatcattaacaacagcagcagcaaccacaatgctaacacccttattgatatacatatacaagcctgagagatttcaaacaggaacacacccaaatgcttgcttgataaactagacttggttaactaggctttgttgggcagtgcaaattgggaactaatcttatgcacataaaataaaatacatggttaattaagtgttagttaaaacccttaaaataatatcaatatgatttttaccaactttattatagaaaaattttgttaaatatacatcatttaatagttcagggaacatgcgtaaaaaaaatgaaggagtgaaagttagataaggtgagtatcgaatatacatccttaggtcatcaccaatgcgtagcctcgggtcgtcccctcgccgacggatgtccagctccgtttgcccgtcgtccccccacgagagagcgcgtccctcagctgggagacgtgtccctcggtcacttttggctgacggacgacacgaagcgacgcgttaggggcgatgggctcctgtggacaccgtagctccaccaccaaattcccctttcacccctctctcccccccccctctctctctcctgttcccctcaaggtcgagccggaggaagagtaggaggcggcagcagctgccgtggtggaggcgcggcggtgacgctagaaacggggaggacgagggtggaagttgggccaaaagggagagagaagcggtggcgcaccagatctggcgacgacccgcgacatcaacgggcggagggacggccgcgccgtcctcctcgtcctcctccgctggtcagagtcggagcgccgtgccgtccttctccgccggcgccgcgcccgccaccgccggccccatgcccgcatccgccggtgccgcaaagagggagagaggccttgagccgacgatgggagagagagagggtgagaggcgtggagccggtgacgggaggtcgaaggcgtcgagccggcggaggcgtcggtcagctcctcgcctcctcggtggatgccacacgcggtagatgggagggagtaaatgaggggaagagagagaggggggagggaagagaagggtagtatagtaaaatatctacatgtgctttttggatagggatactgaggggagtttcccagggagtaccctcagttagtgagggcacccatagagtatccctgattagtgatgcccttaggtttcatttggcagtgctgcttagattatcagcaacatgtgaaactatacgagctattaatgtagattaattgaatattaagcatcacatacatacaaaaaaaatatttgatttttgagagaactaattttatgtagaaagtatttgaaataatataccgcttaataatttaaaaaccgtactcaccctatatactccgtatgagcgagttatcaatccaataagcacttttactgcttgaatcaaccacaaaatctctgattccataaagatgcccataactgcctgatacagacagctggcgtacgagattatgagccaaaacattttttttgtcaaatggcatacattaagtactactgttagggccaagattaagggactagcttggcttaaaataaaacggagagaaagaaaaggaggtatactccagctgctagccacatgatcacagcttgtgtacgtacgtacaggccgtctcccgtgtttcaaggcgagacatgcttaatttgctaatggactcgacgcgtctaagggttactcactccattactttgagacaaagattacttgctcgattagtttattaattaatgccctaatcatccaactaacaaacggctaaatacagtttcaaaagcagacgaacctaattacgaatcacaaagagagatgcctcacatatacatttgtaatcatgattggccggtcggcgaaaatgaaaaaaaaagataatgtgtatctcaatttctgtgtgaaatcatcagagatgtatcatggagagggcgaaatgagctataattgttaaactaggtgaggacacccactaagcgcgtcggtatggttcgatgtatgcacgttgcgacggggccctcactactgatcattctcacagattcaggtcttcaggacagcttaatttgtttatgataactcgaaagacaaaaatatttgagattattatcgaatacttgtcatatttgataaatgtactatgtttatattgaactcattttaagtttaacaaagtctatgcgaccggttggaaagtagacaacgcatcttgtagtgagcctattcaaatgccaaattaaggagattctgctagttccttgaaaaaatagaaaaaaaataatctatctttctaacatgggtttcttttcgatttcaatagaaaataaactgattcatgttaaaaccttcacacaaaaaaaatcacattataaaggagaaaatcccaagaaagaaaaattgaattgtcaaagtcggatgaaaccatgtgttccctccatgaaacccgtaatggaaggcaactcagttcatcttttttttcccctttggccagttgttcatcatcaccgctggttcgatcagacggacacgcaaaccaaccaaatccccgcgatcccagccgtccatttcccccacaatattctattcccgccctgcgaccatatagcccacctcccctccttccttccccgcatcaaacctctcctcctcgtcacacaccccgtctcgccgccggcgatgcgcagacgccaatgacgacgacgacgacgacgacgaaccacagcgccaagagcatcctcctcctcgcgctcctcctcgtgccgcacctcgccgcggcgtcgtcgggagatgcgctgatcagccagcgccgccgcctgctcgactaccacggcggcggcggcggccatggcggcggcgacgtgtacgtggacccgtcgtacacgttcccgaacgcgcggctccgcgacgcgtacgtggcgatgcaggcgtggaagcgcgccgtcctgtcggacccgcacaacgtgacggggacgtggatcgggcccgacgtgtgcgcctacgagggcgtgttctgcgcggcggcgcgggacgacccgcacctcgtcgtcgtcgcctccgtcgatctcaaccacgccgacatggcgggccacctccccgacgagctcggcctgctcgccgacctcgccgtgctccacgccaactccaaccgcttctgcggcgccgtgccgagcaccctcgagaggctccacctcctccacgagctcgacctcagcaacaaccgcctcgtcggcgcgttcccggacgtcgtgctccggctgcccagcctccggtacctcgacctccgcttcaacgacttcgagggccccgtcccggccgagctgttcgaccgcccgctcgacgccatcttcctcaactccaaccgcctccgcttccggatccccgacaacgtcggcaactcgccggcgtccgtgctcgtgctcgccaacaacgacttcggcggctgcctcccggcgtccgtcgccaacatgtccggcacgctcgacgagatcatcctcatgaacaccgggctcaagtcctgcatcccgccggagctcggcatgctcaccggcctcgccgtgctcgacgtcagccacaacagcctcatgggcgccatccccggcgagctcgccaggctcgagaacatcgagcagctcgacctcgggcacaaccgcctcaccggcgacgtgccggagggcatctgccacctgccgcacctccagaacttcacctactcctacaacttcatcaccggcgagccgccggtgtgcatgcacgtcaaggcgttcgacgatcgccggaactgcatccccggccgccccgaccagaggccggcggagcagtgccaattccaaaacacccaccacgtcaactgcgacgcattcaggtgcaagaagttcgtcctcccgtcgcctccgccaccggcaccatcgccgccgccgacgtctactaccaccgccgtcaccctctcctccaccaccttcacctcctactccatcttcaccaccaccatgtccatagcctactccaccttctaccccgacggcggatacttcaccaccatcgacatcgacgactccaacatcttcaccgactacatctcctcctccgccatcgacagtgtactacagctcgccgacgccgccgtactacgaggtttcaccggaggacaggtacctctcgccgccgccacctccggcgtaccacgagggcgccgccaccgccgtactacgaggtgtcgccggaggacaggtacctgtcgccgccgccacctccagcctaccaagaaacgccgccgccgccgccgcagtacgaggtgtcaccggaggacaggtacctgtcgccgccacctccatcaccggtgaagtggaagctgccggtgtacgagtactcatcgccgccgccgccggcagcaacatggaagccataaaattaaaatcgattctttcgggattttttttttcacacactatgatcatacatattgttaaatttgttgtatgttgagtaaaaaaagggatgctaaatcttttctgttactacccctccttcctgattttcttttgcttgaactgtatgtatttttcttcttttatttttttctccttctttgaatgaacagcaggaaatctgcttttcctcccattgatttgcttgatttacagataatccattgtgaacaaatggccatattctgatatacatagacagaaatgaagaagaaaagaatgagagattttatattctcatttgcattatgatggtgtctatgagttggcaatattatcctagaaaagttaagcatatactagtactgacaactaaataagcattggattctgctaactggaacagctaagattctgaaggctccagaaaagtacaactagcaatttgaacacactgaagaatggccaacagcttcatcctcttcaaaggttgccagcagcgacgcaatgttctaagcaacaaagtcagcaaaagttagcatagcaagggaagtgccggggaccatgtaatctgttaggccaatttgttagaagtcatcgcatcagaacattcatctgcatgatctctctagtatgatagcagcagtattattgcattgggacaggagaagttgacatcacaggataaatgtataggatatatagaacaagaagatttcatcagagaatgagaaaagagcaggaaaaacatttgcctggccggccatgcattcaggttgttggatggaatattttcaggaccagctcagagtagtatctgcattgatatctatcgttgatggagtgtataatgtaagtatgtaatacagtaaaaaaaaatggagctattgtacttgtactgttcagttacttcagtacatttttgtttatctctgtgttgccgtacagtgtactactacaatgcaaagggtgtcaccggattcgaactgtgttgatttgtttagtgcagagacttaaaaccgttgattttgacttaacccacgtcttgcgcttggcgcgtactaattaaataaactagctggatgattctaaaagaacttcgatagataatcgcctacacgaacaccaacgtgcatagaactttcgtcgctgccgccagctgcagaacagagtatgcgctgcacgtaactaattggaagaaaagaaaattatcttgctgtatgggagtatatgagtatatatacgagtgtgcatatgttcttgctttgcaggcagacatgcaaactgtcaggctaatcgatccctctcactgcacaaacgttgatatgcagaaatcagaatccaccagttcttgatttactgaccaatcaaaaatgacgatcaaatcaagactgcccttccaaacaaacaaacaagaaaaagttaaatcaaattcaaataaggggatcgagtatgcatgataccaaaagaaacagagagagagagagagagagacaaatgagtagatatgcagagagatggctgcctcttgccttgcagggcaaaaaggcaagcagagtttggccgtcctggcctgtgaacgaatgaatcatctgattaggtagtagtaccggtgtctggtgatcatggcgccgcgaggatgagaccaaatggttagtaggagtagcaaacgtagcgagcgatgaccaggcaacaaaaccaaacctcccaatttcccaaccaaccagcggcagcgccggcgcgcatgtgcggaggttgggttcgcatcgcctggtgtttttgtagcctagctagtagttctgacttgctgcgcgcgcacgcggcggagtcgccggcgccggcgcgattccatcattggggcttcgtttgctgttgcccctctctctctctctctcgccgtggctccgtcgactggtcggtgttttacatgtgcgtcgtcgagatttttctttttgtactgccacgacatatatattgggtagcggcagtacgtcgttttgctcggtcgggcgcaactaacaactgccgatgccatccatgtgagtgtttgacctcgctgaaggtagtgatattcatgtgcgactatagtatttattttactagtgtgctgaatgtgcggttgtatgctttaggactttgttcagtctcggttgcctggaacttgttgtctatgttggatcttaccgtgtgattgttggttttttttttttttgagaagatgatattcttctgtgattgggttacattccctgtcaatcaaatatgggccaccttgttcgttggttcctgctcggtgtgggccgtatgtggccctttgagagtccaactagtactttacgcattcgacagtaggaataagtccattttgcctccctctattcttgccctttgtcgaattacatccctcaaccacgaaaccgggtatattatctcccctaaatgttaaaaccagtacaaaacaactcccttggtggtttttgacagtggttttgttgacgtggcatcctagtcatcgaaaaaatttaaaaaatacgtgagggcccacatgtaagtggcatttctattcttcctctcctccaccactctcctctcttctttcccttctctctcctcgaacagagcaaggcaaggagaggcgccggaggcgcgggaggtgtgggaaccgccgaaggatgtgggcgcatgccgcgagggagaggatcgccggccgcggcgcccgcacggggagggttcacctgccacagcgtcgatctgctcggccggcaacgcatcctcccgctgtctattcgcgccgccgacctccggcaaaatacataagctcatcaagctacctttcgaagagcatgtcatgtgctgactgtcgagtgcaaaagattgagctttcacctaaaacacttggagggggataaaccggcaaccatccatggagcagtaggagtaacaactgaagatgatcatgatccatcccaacaagtcgccggagcaagtagtagcctctttcgagcttcgacaccacacgaggaaaaatcagacataaaaacccccatgaagaacaacccagcagtaacaaaagcatcccccctccattagctgcatgtccctttctggaattctccttttcttctccaaagagacaacgtgagacgcatggatgaacaattggcggtgcgcctactactgcccggactcctcatcggactcgccgtcatcgcggtcatcctccccgtcctcctgctgctgttgatggtgttggtgatggtggtgcgggtgtggcagttgaccagtggcactggcgccgccgacctggtggtagaactggctgagcgaccgggcgaagagcacgccaatgtggccgtcctgtgagtgtcctagctctagccccggcatggccgccgccacgtgggcggcgaacatggtcgcgaacccgatgtggcaccggcgaacgccgcggcggcagcccacatgtggtggtggtggtggtgcaacctggagagggcgcagtttggggaagggagggagggtgcgacggatgtcagcgccgacacccgtccccatggcagtgacgattgccggctccgcctgctggagcagccactggacggtttcaccgtcggacttgtggccgagctcccgcgttagctggaagatccgggcagcacacaacgccggcatccgaatccgttgtccctggccgtccaccttggtgtgccggtccttgttcgagctccgcttcggacctagcccctacattcttcttccccccccccccgacgccgtcggcaccacctgcatttgttgctgctgatagcggatcctttccctttgggcgtgcccttcattcttcgggcgtacccaatttttcggcccttcggggctctcctttgtccgaaaaagaaaaaaggtggaggaaaaaagaaaattgttgaggaaaacgaaaaaataaaatgccctttcatctgtggccccttatggtatttgtt

SEQ ID NO: 28851 - DNA, 4873 bp, Oryza sativa
  unsure (1)..(4873): unsure at all n locations
gaagaggcccggcccacgacgggggtaagtaagaggtgagacngcaaaatcctcctccccccccccccggacgccgccgccaccacctgcatctggtgctgctgaaagcggatcctctccctcggggcgtgccctcgcatcctccggcgggtccccacatcttccgcccctccggcgcctcccttgtccggagaaagagagaagggggaggagagaggagagtggtggaggagaggaagaatagaaatgccacttacatgtgggccctcatgtattttttttaatttttttcgatgactaggatgccacgtcagcaaaaccactgtcaaaaaccactaagagagttgttttgtactggttttaacacttaggggaggtaatatacccagttttgcggttgagggatgtaattcgataaagaggaagaattgaggaaggcaaaatggacttattcattcgacagtatgtccaatatgaactattctggcaggggaatacctatgcatctttcgaaagatttttatgatgatatcacacagatttttaatctttagattaaaatccaatagacacagtagaaggcaaaaagcaactaagaaacaccataatagacactaaattgccatatcttcaagaaaaagaccaaatccaatataaatttcaaaacttgcatgtgaagattcaaaaattacactataacttataaaagttacaatgtaagtttcataaattacagtgtaacttgcaagaaaatacactgtaaatttgagtgagagataagaaaaaatctctcgagtgagatatagcaaaatcgttcggggagatgatcaaactgaaccaaatttgcttctatccgctagttatgtcagctagcttttcacagcggtcaatttgttcctatccgttgtccgaacagaggaggtcccccgttggtctcgttcagaacacaatttgttgtcaatgcagagaaggagaagaaacaaatgagcagtgatatctcttgactttcgcttacacatagatagcaagcagtctagttgtggaccaatccggccttctgcacgcatacagtcactcacacgctactacgctatctttacatggagaacatatacatatattgcgacatagaagtgcatatgacatataattagtgtgcacatgtgtgcatgctgctgctgcatgcagcgctagattattcgttcgcagcaggtagcgaagttgtgtgatcagttttgtcaggcgtggtccggctcaccaggaagagcagcgagaacatcaggaggagcagcgaatacatggcggtctatgtcgtcaggtggactagcgaacacttggtccggatcatggtctacgtcatcatgggggctagagaacacgtagcggtggtccggatcatggtctacgtcatcagggggactagagagcacgtagtggccggcgcggagaggcctcggcagtctggccgccgccgtggtcttgcagccgtcgtagcactgcccgaagcaggcctccacggcgcccttgccgtctgcaaaaccaaaccaagaattagttgccgccactgatgtgtcacgatcaaattaaagttattgcgtgcttagttacccggaaggaggcggtggcaggagcccaaggcgcaggagagttggcactccatgtcgccggcgaggcgggacgacgacgacgacgagtacagcgtgggcttgtccggctggcacgtcttgtcgcaggcgtagctgcagtagtcgaccatgttgttctccctggccatgcagtccttgaagcagaagtcgtagcagtcggcgtccgcgccgccggcgaggaatgtcagcgccaccaccacggccaccgcgccgagtgcaacaactcgtcccgtcgtagtagccgccatcgatcgcttccaactccggacttccctgccacgatcgatgacaccggacgctgcgggcgccgcggattttgtagcgcgcgccgcgggcggctgatgctcacgccgggcgcgtgggcgtgggggagcgcgcgcgtgaaggcgagagtgcaagcaagcgagcgagagagcgagcgagttggtgcttcgatcgagtgggcggcgccgcggtgtgtgcgtgggtgtaagcagtgtgtgacgcttgcgggcaacgggcagcggcgcgcagcggcagcgcgtacgtttgttgttgcgggcggttgctgtgtcggggttggtgtgccgttgcgtggcttcgatcggggagggagcgcggttgcagccttgcaggggcggaaggcgtgatatgggcggccgttttcggtgtaacgttaaaattgtaaggcggtgaagggattgaaatcttggattacggaaaaaaaaggaacgtggagatctaccggcgaaaacagaacaaactcaagaaaatcgatggctacacggtacaagtcaaattgaggatttgccggtttcctaagcaactgccgagcaacgggaaaaaatcgtttataggtggcaaacaattcctttttttcccccaattgcacggcttacccacaccctcatatgcgtcccgtaacatactctcaaagaggtagatattcctgactacgaggatttgaaacatagtgcatggagtccaccaggacattcccaacccaataattagaatggtgtccatagtattaaataagttgtcacctagaacaaaaaatgacatggcaagtgaataaatgaggaaaaaaaaggaaaccatgtcttgcatgagacatggtttctacataacatccaagacatcatgtgagataagtagcattaaattaaagtatggaatagtggtgtttgcattggaagagtagtgtctagtactagtttcttgataatgtggaatttatggaaaccatgtctagtgttatgggttgagactgctctcaccgcacaattggtgctcccttgatggcaaacaatttatttggatgagaccttaagttcggtctcgggaaaaagttatggtagtactacatcactcgatttttttaaatggtagtcctggccggcatgtatgagctttagttatgaagatttaatagttgtgtacttgtgttggagaaaaccttgtactccctccctaaaataaatacaaggcgtgcatgcatttgaaaatgtcgtgtttattttgtttactatcaataagcttacaatatactcctatgtttagtgccacatgagtggtaccgttggatttatatttgaatatacttttttgagtgttaattttgtagatgccgatgatatatatgaaagatattaatgatcaaagtttgacagtagagaccgtatcaaaagattgatatgctttaggtttctcaacaggcaaataaaaatatgcaagtctgaactcaaaattatgaagtagggaggacacaaaaatggacaaaggccattgtaattttgatccaacggaagctatgtactaaggtgaaaaatcgaagtgtttaatatccctcctttcctagaccccaagccatagcccacggcagcaagatgaaaaatcaaagtgtttaatatacctcctttctagacgtcgcggccatggcccagataataagtacctcgacatataaaaaacttagtgtaaaatttagatacctgaggtactttctctctcgttgcatagttaaatgtcttcagtttataaaccacaacccaaaagtgccttccaagcaagcccaggcccggtcctgtcaatttagtggcctagagtgaaactagaaaaatgggccctttaatccaattataataatataacgatatttctaataaatttaatgcataaaaaaatattcttataaaacaagttatatatcttaccttaaaattttcttctaacatttaccgatgcgaagtcattgacgatggcatcaatatcaattactcatcaatagctcctttttttcaatgtatcaagtcctctatccttctcttctttttttcttttctcacttccagatgcgtgctttttgggcaacatgatttcactgtaaatttagaaatttataagtaatttatggaaattatatcaaactaaattcaattcatcattataataaaaatgagtgctggtaaattatcaagttgagatttgagagctagagaaaatgactattcactgccctagttgcacacttgcacagctggactgtaggatccctaaatcccaaaatcagaatttcagaaatcagaagagaagcaattgaagagtaaaatttgaatcccaaactttaaacatatacacttagtatacatcaaaggggagagcaattgggtacctccagtaactgaacggagagatttgcatgttgcaaccggctgctggcggccgccgaggacgacaccgtcgacgcgccctaaaccctcgcccagtcgcccctcggaacaagacgaggaacagaggaagggcggcagaacatagaagtagcgaacatgaggcgatggcggaaggaagccaatcgacgaaaatttcttcctgtacgtgtctcttcctctcctgggctagtttgggctaatgggcttcctaattcccatgggctattatctacagcatatatggggttgggccccttcacttcgtgggccctgtgcgaaggcacagcttgaccccccccctcaataaaaatataattgtttttaatcacttatgtaagttcgctccatatatacgtgtgtaaataaactgtcttactactctacgtagtcgttcggaacttagatatttaaggccacgtatcaactgtaacgatagcagcgacatgtattacagtaattaaatgtaaggtaattaaagcaaagaattggtaagtaactcacactaaggtataaggaatgtttaaagatatctcagca

SEQ ID NO: 28852 - DNA, 10220 bp, Oryza sativa
tgcgatttgtatgtgaaggaggattttttaggacaagcattgggtttagggcaccttaattgtgaggggacctttgtatgaggtatttttataaacccccccccccccccccccccgggccaggcctgagcaagccaaatggaccacacaaacatgggcttatggagaaaacacaaactaggaagcttttggcgtttttccatcttagttcaatggtatccacaagaccacaatcctcatgtgtgctcttaattagatgttactgattgaatgtgtgctcttgtatgatcatcacatgtggtatatatccagttgaataattcgtcttatagttttagatggattttccatcagaatggctttttcttggtgaggtctatatacctagctttaattaataatggctatatcaagagaaataaggtcctgtatagatgggactaaaacttttaagtccctatcacatcggatgtttgaaaattaattataaatattaaacgtagactattaataaaacccatccataatcttggactaatttgcgagatgaatctaatgagcctaattaatccatgattagcctatgtgatgctacagtaaacattctctaattatagattaattaggcttaaaaaatttgtctcgtgaattagcttttatttatgtaattagttttgtaagtagtctatatttaatactctaaattagtgtctaaagacagggactaaagttaagtccctggatctaaacaccacctaagtgtatttggaagcttaagttgtcacttaaaattaaaattttcgtgtggtacttgcttaaaagagttgtgttaactaaggataatttggcaaggcgtaactggaatggcagcttgaggtgttctttttgtttgaagaatgagtctattcaacatctctttatgaattgtcattttgcgaagttcatatggagagcagttcagttctcttttagttttaatcttccagttagcatatctcatatttttaatgggtgtcttttgggagttgataagaaaaagagtaaactgatacttgttggagcttttgccatttgttgggcaatatggctgagtaggaacgatatggtttttgataaatcaccatcattttcctatatgcaggtcattttcaggacaactcattggctccggttttgggcacaactacaaaggtatgatgaaaatgaagagtttctgaaagttgcatgtcgaaagtcggagactacggttatgtaactttttactaattatggttgaggatttacaaatcatatcttactataaagttatcccccactaactccttaagcttaacatgcaaagatgccacatcatcatccactaacatgatgccacatcatcatccactaattaacaagatgccacatcatcatccactaacaatcatcacatttaaacatcacgcaaacatactatatctttataggttttataatttaagagcttttcaaatacaaacatgttaaattatcatccaacataattcacacaatgtttcaatgtatatctttattatgttttattatatcctatatacttatatagttcattaaatgattaatctatggtccaaattatctttctcctttttttctctaattaagtcatatcacattaattgtttttaacctttagatgattaatctatggtccaaactatttccctacttttcttcttccatgaagtcacaccaccttactttttacgtttgaatcaccattttacatactatttaaatttaaattatcataaaccacttaatttacttaatctgatgttatctagctatcttacacgttattttttttattgttatcatactaaattcccgcagtaatgcatggggttttacctagtagacttgaataattgtgatcaccttaagttaggctggattctttgttattctctacggtgtgttctattcatttggatttacactgtcttcttgagtggtactatgtaataattggctgtagctcttttgaataaaggccgggatattatattccatttttaaaaaaaaatgtggtacaaggacaacaggtttcgttgttttctgctaagattatcatgtccctttttatgctgtaggacaataggagacatttggcatcccttatcttgtgtattcttaggaattggtaagctcgcaaaactttaaggatgaaactgggtgttaatcacccgaagattaatgcatacgtttcttcgacttgcacataggatcgatatgtataagtttaatttggtcacatataataacgagaaacaaaaaaccaagattactaatcctgggaaaaagaaaaaaatgatcgcaattcagtaattaatccactaagtctctgcagtaatccatctatctattactagaaaaaatgcccgtgcattgcaacggaagaaaaaaaaacttatctcaacttcttaaaaaattgaaaacgttaccgtcgtccgtaataatgaaaaagggaaaaaacattaaaacaaaaaaaaaggaaagtccgattcaatttgcttccgtcgtccgtgaaaattttcgtctataatatcaattcttcgtccgtaaatccgatggaaatccaatcggacaatccaaacaaagagaaaaggaacgggaaaaataataaaaaacgcacaactcttatctcaatcctgtgggaagccgtcgacgccactaaatccacccgtgggaagttgccgtcgccgctggatccgcctgcgggaagccgccaacgccactggatccacccagcggaagccgacgctgtcgctcgcggtggggggagggcgccaccgccgctcgcggtggggaaggacgacgccgctgtcgcaagcggtatgagagggcgcctccaccgtcgctcacgcgtcgtcgcagctcgctcgtcaccgggagaggggtttgggagagagaagaagagaatgtgatgtcatctgtaaaaaaaaaagcaacaaaaaacatgctaagaaaaactgtcggaaagaaatgtgccatttttaaaaaatggttaaagaaaaccgcgcatgaaaaaaacaccgtttataaaaaacaagatgcttcgaaaaaaactataaaaaaacaccatttataaaaaaaaccagatcgaaaaaaatcatattcaacgcgagaaaaaactgttgtttctaaaaaaggttcaagaaaaccgtttgactcaacacgagaaaaaagaaccaccatttctaaaacaaggttagagaaaaccgtccgactcaacacgagagaaaaaaatgtcgtttataacaagaaccgctccgaaaaaccatctgactcaacgcgagataaaattgatggacacttgggttggataggatccatcgattttttttttccatctcctacacggtttttgtttccttatctattctccgaccttgcacgtctctgtatgtagttatcagactatttttgttaagtatagctactattcttgataacatatgatatgaaaataatactaaaaaataaacatatttttaattattatttagagaagagtgcacagtgactctattttgtgtagacttgaccagtggcgaagccaggataaaaattcacctatggcgaacttactacggactaagtactagtctagtactctagttgtataagaaaacacacatacataataaaataatggtacaatgcattaattaacatatagatattgtaaaataatgataataagtggatatttggatgattatagtatataaagaagcactaaccaatctgggtagcttttgaaattgggtgcagtcggcgtcggcgattattagatggctcttcctcttccatggcgcaatctgggtagctacagatattacgagctagtttagcattactactcgtaacaactgattgtctgattcaacaggatatagttgctaatgtgtgagagatcgatggaaccaactggtgtatcggagtgattaccgtggcggcgtccggcggtgtcccggcaggagacgattcgactgtcgacgagaggaggcgatcagccgatgcgatgaggcgatgaactgaaactgaagcgacgcggcgacggcggcaacaagcgattgcgattcccagtcagactcccggctgtccgcctcctagtattcttgggcggttgggccaatgggcctgcttcgttgtccacatcggcagcaaacaaaggcccagcaaagtagcaaacatcagcgcacaaagaaacgaaacgtttctgcccgctgctcgccccgcagcggagttaaggcagcggcacaccattgccatagacaacgatcgtaactagatctactgagtgccattgtcttcatcaccctcctggtagtaagcgtagagatcctccgaagcttcatctccgacctctgattaagtttgtatattgcaagggtgagtaccaactcagcaagccaccatagcaacaatgcacatgatagaatgtatttaaggaatagctgtggttcttttgcgtagagcaagttttgcaattcttttcagaagcctaagacctagcatagattgatcaaattttagccactggagttgactatgcgaggcaatgtaagatttaattgattctattattggttgtaaggatgagattaaaatagtatttgtttatttgtgcttgcttagattgtttcctataggataccctgatcttgaagtgttagccgttctgatgttcgtgaacttggacatgctgtacatactttgttggttgatctcattgctcaacatcagttaatgactgaaaactgccatgtcaaattgcccattattttaggaaagaaaatatgagccacctctcatacaagagacaaccttcacacaaaccctaagaaaaaagagatggaagaaagatgagattggacaaactaataaaataaaatcatttgggttagcatgctaagaggtagtatatatgtggtgtattatatatatcacatcttattttatatggataaaattagatgtgacaactacccctagtataaaacttgcccttatgttggcatgagcattgtgtaacccgtgcatcctatttagagttctttatgttgatattttttattcctaaatttattttctagattcttttctccttaatcattccaattatcatcgattgaaagagggcaaatttatataatttcaaggcaccagatagataccactctacccagttgggaagcttctagaatctgttagaggagatgttttcttttctctaattttttctcttatataatctctagatttatctcaaagtattgattgattaaatgattaattgatgattggctcatctcatcactcttgcactagttaattaatgcctgaaaaataccatgtcaaattgcccatcattttaggagtagcatgctttccatgcttcagtggttcagtgaatataacctgctgattgacagcatgattggatcctgtctcttttttggaccatcccatgttgcatcacacttgtgaaaactccagataccaccagaaatatccgtatcatctgacctggtactgataacatagttaagcaatcatatgaaaatcctgtgcattttccttttctccttgacagatatggctgccctgatattgagaaaatcgagagtttcaataaactctacaagcagaaactggatgagataatcgaacaaggcgaaatacccctggacctggatatcgaggcaagtcacccaatcaaatttcttactcacattcctgattagttgcatctgcatttcagagcaacttactgagaaccgatttgctcatttcaggtctcatcaccaggagcagagcgacttctagaggtgcccgaggatctggatcgtttcaaagatatggccatcagagtgcaataccttgttgaaggcgacgaccttgtcctgaagcagatcctgcggaagaatggcatcttcttgctcaagtctgttgacattcaggcagaacattgcatcaggaagcttggcagatgtcaaggagaaccgagctgcagctgggaaaggaaggtcattgaacaggaaacaaagggattggaggctgcaaacttcgtttaaagcggtgaagaaggcaaccctatacttggactaaaatatgatggcatatgtttggatagcagtggtttagaaccaactccagtattagtttaaattgggacgaaatctcacatactctctgatatacttgcaatgctggcaaaggatgttcagttctgtagttagattagggtctacttgatttgtggaactgaatgagttttgtggaggcaaatttcgttgtaaggcacagttatctctgagttacattctgagcagaacacagaataggatggcagatgtacgttctatggaatcactcattttgggtactgaatttttctctactattctcttctggagagtgatgaattctctgcagttgactgcatctgaaagctgttctcatgcaagtgttcatgatttatttatttattattcatcagtacattgttgtgcatgtttgttctctcagtcctcacagtcttacactaagctccacgcttagttactcctcttgttgagaaaccttgctgggctgaacggcgagagatcgaagatgctggcactgccgttgaggatgagctccgcgagcgcagcgccggtggccggagcgttgaggattccccacccgccgtgcccggtggcgacgtagcaacccttcaccccaggcatctctccgatcaccggcaacccgtcactggtgcacggcatgtagcaagcctgctccgccaccacctccgcgccttcctccctcttcagctggctggacaccctcccggcgatctcgtgcagcgccgcgatcgagtccggatcaccggtgatcgtcgccggatcattgggcacctcttcgtccttggttatcccacaaatgtacacctccccctggtgcaacacataattcaatatattaatggtggctagttagttcacatggatcgatttagcatttgagattaaggggcagtggcaatggcggtgcaccggtgggccgcgggtagatctccggggcgagcatcttggcgccgggctccggttggtagctgaggaacagcgcgtgcggcgtcatcttgtcgggctcacgcggccggagcacgacgctgtgccccttgagcccggacacgtcgaacacctccctgaccatctcgaacccccgaccatggcccgagcgcgaacaccacggcgtcggcgtccaccacgccgcggcccttgacctcgaccccgatgacgcggccgtcccggacgacgacgcgcttcacctcgccgatgaccacctcggcgtcagacgcggcgaggacggccttggtaaaggaacccgggtgaacctgcgcggtggtgtccgctgtcgcgagctcccgtggcggcgcggcggacgcggccgggtcgacccaatgagagagcttcgggtgcggcgccggagaggcggcggcggcgaggtccgggtgggtggagactggggtgccgtgtggcaatttataaggaaatattctaattgaaatggctatactgcccctgtccgtttggcttgcatatatggacgcggcttgccttgctccatcctcccatccgtactcccgcatacgtggcagcatctgctccgttcctagcttttttccgttggcccacacctgaagtacgatccctgtaaatcccgtgaatcccgttccaccaaacaggaaaaaaaaaagcggacatttttcttcctctcccagctacttcctcttccagactcctttatccccttgctgtttcccattgagctccacatatgcccattagttgccagggaagataaatctaatcctcatagttgatgcgtcagaggcggcccaaacgagaaccgcgccctggccgagccagcggccacggtctccctaaacaagtcgacgataaacaagagctcgttcggtggcgccctcaagctatggagcgacggtggtagtgcgtggacgagttggcgagctggtcggtcggggtggacgcgcgggaaggcacgctgggcgtcgtcgaggcatgcagcggccggagacgacgttgctattgctggtagtcctgcaagtgagcagtacactagcatggatgtgttatacctactgcactgcaagttcgctgctgagtaaaatccgaggttaaacgagagaattgcaaagaacacgagtaacttatcttacgttttaagcgtccgatgcatcaggtatgttggaaacaatatctgtcgttccttagtactactattttggggtggatattggtgtcctgatggtgtatgattaagtgaaaaaaaaattgttggggatgatgcttctgttgaaatagagtctagcgactaatgttggcgtcaagtgtaaatattatccatccaaaacacattcatatatagctataattaaatggttagttacctaatggatgatgataacccaccaataatgacggtattcaacgaatcgtactctcaagtgtgggacaacggaaaaaagctacgaacgggacagatgccgccacgtatgctgtagtacggatgggagcagaacgagggagcaggcaagccgcgtccgattgtgtcacgcccggaatttctatccaaaattccaaacgcttacatgtgtgtgaaccctcgtccaggaatcagccgaggcacacaataacaaattgataatagagtacaaatattactctaattaataagcgaataaaatgtcattacagaggtagatagttcctctcaatcaataaagatctaagcagcggaaaataaataaacggcgcagacggctccactccacaggcagcttgaccaaggctacacctaatcctccacaccatcagcctcattgtagaactcttcctctgatgaatgattgcaaggtgagtatatgacatactcagcaagccacgcagcaaatatgcaagtgcacaggataacaaaggatggcataatagggttgcatttgcaaaagcagcatttagcaaacatttgagaatttaataaacagttaagtaattaaacaatattaattccaacgctatacaacataccctgttgtataggcccaaccattctgaacaaccatcccggctgcacagttctatctccaaaccaggaatgtaccattccaaaccaggagctaatcaaattattaccagtttaagcatcttttacaatgatgagaggtgtgagactaatcacgaaagacattgttagacccgcccataaccgcgggcacggctattcgaatagttttactctgatcagaggtgtaccactgtacccacaagacacaaccccacatcatgtcaccatgtgcctcaataccaccacggtatctcggaaaggagttgtgacaatacccctcgcataacacaatccactgcagcgcaccttcctggatcataatcacccccttataaacaaggcatggactccccagcgacccccgtgggtttatctccgccacttctcagtctggtgccccgcaatgaaccatgctatacaaaagataaagccgttgcccatgctggcttgtggttggcacagttaatgtttcacaaccgaaactcgtgaaccggtccttaattgtcatgagcacgaccaacaaaaccatgtgctcacaacccaccattaccaggttttagttggcacattaattaattaactaatcacgattgaccatcgtgaactatcatgaaaccatcatgaaatattagtgagtcattagttatcccgaatgtgtactaatgtttctaagcagggctaagcaattatatctaatatctagttgaaccattataaataaagctcaactagtcaaattgtaataacccaaggtatcaaggaataaggtaatcaaatacaaaagggccataacaaagaataggtcaattccacccaatgacattcgaaaatagatgcaatagttgaatagaaacaatagctttaaataggatcaacatgctcaaagggttgtttgggatctgtgtgacttgccttgctggccttggaactcttcaaactcttcttctgcgaaaacggactctccggaaacgacggaatctaagcagaaaagagcaaaattgatgaactactgtaccagtgaaagtgcattcaaggctctg

SEQ ID NO: 28853 - DNA, 1343 bp, Oryza sativa
  unsure (1)..(1343): unsure at all n locations
agaccgggcgcacgggctacggttcacaagaacggacggccgagatcgaaccaatccaaaacggacggccgagatcgatcgggtccacggcggctcacggcggacgaccccgatgacgtcagcggtgacgtcaccgacagcggcggcggctcggcggagcggacggctcgggcggcgcacactcaccggcaaacggcggcgctaggacgcaaacggagggcaccaagatgtagaggacaacacggcgaactcaccggtgaccaaaacggcggcggaagaccaacagacggcgacggcgacgaggaggaaacggcgggaaccttcgggtcgacaacggcgaagctgctccggtgatctccggcgacggcgaaggggcggacgaggacggcgacgacttggcgagcacgacggtggtcttcccgagcgacggcgacggctgaaacgacgccggcgcacggctggagcggcggcggcgacggcgaagctagggcacacggcgctagagcgattccgacgactagaagcgaaggcaagggtggcgacgggtagaggagacaccgggggtccttttaaaggggctcgaaggcggcggcgaaggcccacgacggcggcaacggcgaaggaaactcgcggcttgaaggaaagaggtcgatccgaatcgaactcgattccacgaacttccaaaacgatttagccaaagattccaaaggagaaaaggtagaggagatcccggagattgtttcccctcaaacaattcggccggagaaggaaaggaacggccggatttggaaaggaacggcggcggcgcgaaactagggtttcgggcggcggcggccgaaggtagacgatgggtccgacaggtgggccccacctgtcagcgagcgagggcgcgcgcgcggccggctgcggactgggccgaactgggccgaggagagagagaggggttttgggccgactttcggcccaaagccaaaagagactttttaaaacctttttcaatttaaattatttcttaaatgcaattccatttattaaaaatacttccttagctcaaataaatcccagaaaaatctaggaattatagaattaagcaaagtatttaatgaaattttatctggccccattttatattggaatttattaattaaaacaagatcttctcttcaagacttttaaaattatttctagaaattccatttaaacaacaatttataaattttaaaattttcagggtgtgacagattggctttggccatttggtggcagcaaggagctagcttacatttttgacatttcaagctagacatattgatgngctnctgtgcgatctgcaatcaatgcca

SEQ ID NO: 28854 - DNA, 7269 bp, Oryza sativa
  unsure (1)..(7269): unsure at all n locations
atctaaggttaggcgaacaaatttggcaccacactttagctaacaatctataacattgccacatttttctaagataatgacacgtgggaccagagtgctagaaagagaatcttgccacaagtgtggcaatgaaccaaacgcatggctaacttagtcaaaaccgcctaacttgaggtgtggcaaagtgtgacaacatgtggtcaccaaccaaacaacccctaaatttcataaaactgcaattgttttgtcaattgctacaattttagatgggaatttcaataaactgcgacaatagcaaatgattttctttttcactgggctgactgaagatagccgagtaaagtttgttaagaagagagcaggaacagaggattacaaattcaacaacagagttttataatgcttaattgattataaggagagcaattcgacgtcaacaactacgaatggagctagcaagatttaatccatttagttgtacaaggtagcagaaccaaagcataaactgtacaaactatgataaacatgctcttccattccttggatcacggcctgactctggctggtcgcagtctttccgaattctgacgggcaacgtttaattcttgcgatggtagccttctatggaaaatcagaagacatggtacacctgtaaaacaaatcaacaaaataataaatccaagccatattagaaatggctaaactattatgcttcttcaaaaggaagtaattcagctaccaagggaaacaattaaatattaaaattgagatggtttgatgcactattgcctgatagtacaatcagaaattagttgattcaatagctcatcaatccaaaaatataatgaactttcaatcatgtaaaggccaggttttatctaaaaaaattatccttcaatcatatccaggtcaagtacaaagaaacactatactcaatgttctgccccgattacccagatactatactcgtctgaatcataactaagtgaatccatcagaagtcagatgcctcacatcatattcagcttgaagtgcaaatgaacttagcaaatgcccaaaaaaacatatatacactcttacagaagcaatgcataaacatcattgaagagtgccctgcaatgcagaatgcaccgatccatctggccaacacccaacatgggttgattgagactacaaaaaatcagcagaacagcatactgaccagcagctgattaaatgtaatagtttgcagcacacagccacaggtgcgaacagtagggcgttatcaacacagttggatttctggtatgttgttcacgtggattgcttacgttgctgaataatattattagaacaaaactttggttggacattcaatattgtatattctgatgacagtcaaaagtggtctagccatctaattcttaaatgcaagatcatggatgtaggtacatcattttcttgctgcttgcagcagtaacaaaaaattgcagcaacaagatagagccaattttcccaaggtatactaagaaccaacaaaagctactgcatactacagaagtataaaaggtgcaagtaagatctacattctgcacgatataaaagttactgttaatatatctccctctcatatcttgatggtcacaacaaataaagtttgatcatatcacacgtcagtaccatggaaagaacagtttttgaaatcaaaaggctcaaccattcaatgcaaggaggcaggtttatccacagatcagcatggaatgccataggtggagcttagattataaatgtaaccaagattgacttcagcagaaatgaagtgtttattgattacaactgccgcagccacaacagcttcggcagcaagacgagcaagcaaatgggtcactctgcaacatgttgctggctctatggaaattccaaggataagacttgtcatgactctccacaaccactgtagcatctgcagacacacacccttctgaagacaaatgactcagcacgacaactctagaggaaccatcatccacaaaaataagcatctgctccaacatttgggctcttcccattacaaactttacaaatgccagctcactgtctttgcctcgagcagcttgaaacacaaacttcctcagatgtgaatggacacattccgtgtagcctactagatcccagaactccactccaacattaactggtgtctcagaaggaactgactgtatttcaggcaaacaagatgattcagtcaacaggagcacacacatattacaaagtgaataatgcagtggcttaagattagtaccatgatatacaatgtttctaagcatgggaagcatctaagcaacaggggcaccagtttcacttgctcctcgacaccaaactgcaccttcaacgccaatgtcctgagggtccgaaccattgcacttggcttcacctttatcccatcctacgacacaaaaaaaagcagttacacaaatgcaatttcacataattgtgaaaaacagcaaggagctgccacaagaaacagccagcaaccttgatgacagtagaaccgatcttgagctggtgcagaccgacatcgaagtacccaagaacctttagccttggcgcattgatgatcttgacgtgcgtggatgctccggcgatcggctccagaagcagccgctccatgttgggggcatcatcgaggtgcacctctctgaccatggacatccatagcaccacgcaccggaggctccccgaccagatatggacgtatcttgggtagtcctgtgtaagcacgagcgcgaggctctcgagctcggggcagcgggggagcacggcgtgaagctcgcggtcctgcatggaggagtggacaacaacgatctcctgcaggttggcgaaggctggagggaggccggctgtgtccgggaactggcagaggccgagccagaggcggcggagggaggcgcagccgaggagatcgggtgggggacgccactcgatgggccatgatccgttcacgacggcgagttcaccgacctccttggcggcgagggaggcgaaccaggacgcgacgacgtcgggatccacggttgccaggtgcgcggaggcaaggcgcgccaaggcgactgggcccgggtgggcggcgagcgccccggtgacgtcgcccggagcgaggccgccgtcgtcaaggtggaaagggatggaggcccaaacacggcgccagcgggaaggagatcccggcggtgcggccggcgtccttggtgggaaggcgcgaaacgaccctgcgaaggagcgcgtcggggagccggctgatgcggtcctcttcgtccagcgagaagacggcggccgcgtcggcggcggagggagaagaagggtgagagttcccggtgaagaaggtgggaggcgggaggtaggataggacgacggcgagggtttcgtccatggcggcggctgcggcggtggtcgacggcggcggagggaggatggcgagttggtggggtcaggaaagggaagcggtgaaatggcgtgacgatgagtggtatgggccgaaaagcccggcattggtccaacaaatcgaggcccaaatagtgtgggccttaatccaaggccatctatatatgggccgaaatttcagtgaaaatcctttaatggatcaaaatcttactacttgttttcttccggcaaattcaaatttaaaacaacctacttggaattcaagccagataaccaatcagggctcccttcatatttgactttttttcgagacaccttagaattgtttgacccgtatttgtacatcgttatctaaattagaacatccttcgtagaaatgctttcgaacaaacgtcctaagaattcaaaatatcggatccttatccgaaaccgccaactaccaactcaatccttatccgaaaccaccaactaccaactcctccaccacacattccttttttttatctcttcttctcttttgctctatctctatcctcggagcttcagcactaccacgttgtcagaagtcgggagagatgacgaagccatcgtcgccggtggtagtggtgatggggtacgtaggacatcacaggatagggatttgtaggaggcgttggacctcaccgccttgccgatggccacactgcagtcatactgcagtagctgagcaagacaacatgaaatagggaggagacgctcgacttggcatctgacggagatcaaacgcggacgcgactggccctggccaaggttgcccgtctcacgccgtagctcgtccgtgtccttccctagccaatacattttccccgccgcatcattcactagttccagtggtcggagtagaaatagatagaggtgggttcattttgttagagtgtagtgatgttatactttattgtattaaggtgtttcattttgtttcgattgaatgttgcatgtatttattcttcgcattgcaattggtatgtttcgaatattgcatttggttgaaacacttttgttaaagctatgaaacattttcctccgatcgatgaaatgtataacattttcattaagtggtgtaaaatgtgaaatattttacaataatatagggtaacactgtccgatgttgcggacatcaagccatagtcggctcccatccttcatccttgcttatatgtagcgaatcaatttgcttattccaatcagagaggttgcgttgtccaagacttcgaaaatgtcggcttgcaaacttgtctatcacatatagcaacctgacagtatgtgtgatacaaacatatctggatttatgggatgttatgatttgcaataaactatatagtacaaacgaaatatccccgtcgctaaattttcccaaaattaatgaaggacaacattaacttttattctctccgtcccgtaatataaaggattttgaaaggatgtgacacatagggatgaaaactgtcggaagcctcaaccatttccgtaatcatatttttctcggaaacgaaatcgaaaacggtgaagtcggaaaagaaaacgatatcggaaatatcgaaaaaccggaaacggaacaatacggacggaaacatgtcggtacagatcggaaaccgataacaatacggaaacattaaactataaaaacatatattaaactttacataagtatgttatatgtatacataaattcaagcttatactatataaattataaattaacttcgttttagccatgttagagatttgattgaagagtcagtcaatgtgtaagttgtgggacatgccctataaatatcaacatatttagaatacggtaattaccatattataagaaacggtaattttcacaagaatatggtaaatacggaaacgataggtataacaacaaaaccatttctgtttttatttccatatttttttaccattttcatttttgtttcggtcaattaccatttccatatggctcggccggtagaaagtcaaaaacgaacgctggtcggccgggaattaccgttaccattttcacccctagtgacacatgtactacgaattcaacttcatactccctccgttccctaatataagggattttgacattttacttgtactgtttgaccattcgtcttattcaaaaaaattggaattattatttatttatttgtgacttactttattatccaaagtactttaagcataactttttgttttttatatttgcataaattttttaaatagacgagtggttaaatagtgtaagtaaaatgtcagaatctcttatattaggggatggaaggagtagtattaaaatatatcacgtcccttcaaaatcccttatattttgagacgtatgaggtacattttccaaatccataaacgattaatttatcgaatttaatatgaaccacgtacatgacgacccaaacacgaacatcaagtaatcttatagccgtcgttgaccggctggcaccggttaccggccggtaagcatggaacaatggaagtggcaagtggctagctatctacgtggccacatcgatgtcgcccttcacctccacctcgccgacggcggcgaggctgcccctctcctccatgacgatggcgacgccgccgtccttggcggccgcctcctcctcctgggcgagcacagcgtcgagtatccggagcatctcgtcgggcgccacgagctgcgggaagtggccggccgagtcgacggtcaccaaggcggcgcgcccgatgcgcccctccatgtagcgcccgacgcacggcggcgcggcggggtcgccggaggcgtgcacgagggtgcacggcgcggcgacgcggcccagcacgccgcggttgtcgccgaggaagatcatgcgcgccagcgcgtccgccacgcgcgggtccatggcgaaaaaggtccgcgccagcgtctccgcggcggaggggttgtcgccggcggcgccgacgatgagcgggacgaagcccttggcccaggagaggaagtccgacgagatggtggccagcatcgcgtcgatctccggctcgtcgaagccgccctcgtagtcatccgagttgatgtacctgcaaacaaaattaccaaagttgaaaattgtaatccggatggttccttgcgcggaattaagattgaaattaagaaaaacatctagattagaagtcgttaatttcatcattttgatctaatctaagcacgcagctggtgatggtcaaccactagcctaataattatataagcattttaagccggcatagacttcagataagataaaatgatagcttaattccatggttaatttattacagttacgaaactaaatatttgaaatttcagggtctactggtgggtactgttagctagaatattctaccggttgaatgttttaatatttttttataaaaaaatagcatgaatttgttcaaattttaaaattttcaattccaaattttcggaacttcgatcacccctggtaggtttcatgcattccaaatagtaaacctggcttaactgaaactcgagatcttcagcttaactagtttttgaaactgtgttcggatgccccctttctcaaccactctttctcgttttccgcatacacgcttttcaaactgctaaacggtgttttttttttgcaaaaagtttctatacaaaagttgtttaaaaaaatcaaattaatttattttttaaataaaatagctaatacttaattaatcatacgctaatgaatcgttctgttttccgtgcgttaagagatagcgaacacaggagtggttccttttgccatgatcgaattaatgatggngtnctgtnccactggagagcattcatgcctg

SEQ ID NO: 28855 - DNA, 31802 bp, Oryza sativa
  unsure (1)..(31802): unsure at all n locations
tgaccgtcccaagacctatatttgttaaactgccgacagtgaagagaaactagttggcagaactgccgaaccaaaaaaacggataggagggctacttgcttctattcaaccatgtactgatttcgatacatacactaaactatttgagtgccttgcacgcaagtataaatgaggcagcaccctttccaatttttcctggccaccgcaatagcaatgggaaaggnanaagtgccttctccccacacccaaccactcttggattcagtggcggcatctctcactagcttagctagccaaacaagaccagggagagaggtggtgtactggtagtatattgctagtaccaatgcatctagtatttatagagccgcaagtccatatagttgtatgtctcagttcactctcgcgtgcttcgtcctcagataaaatttaagccgacatagacctcagataaaatgatagcttaaatccatggtatttatggatttatataagacaatagaataatgatattttgattgttgcatgcataaatacatggtcactagtatgagagaaattgaacataaagcaatatgatgtaacaggtgataaaaacacaaaattttagttcacaaataacctatatattgcggctagacctactaccatgcatttttgttgaaaagctccatgatcctgatgtctctctaaacatgtgattagtactgtttggtaggctaatttgtagacaactctgaatttgctgccagctaatcaagctagaccaaccacgtctgtaaacatatatatgcagagtacctattctgtgagagccaaatgtatatacatgtactagagattatccaacgttttctagtttagcaattctatgcaaaggaattataagctgaccagatacatatagatcttttgttttaattagaggctgaattaattttcactataaaaaaatatctctcccatacacgttttatgtgatactctctctccattgtctcaaaatatagctacatttttagctagttcatacagtttaaatttaaactataaagatagctatattttgggacgaagagtgtacatcattatacctatcaatgtgaatttgattataactgtgtgatgaggaacttagtacttacaatctgtggctggcagcaggagagcatgtggatcaccaacgttgccttcaacagaggacaactcgaagtggactcatgtatgggtgtccaagaatagttcaatcttccagtcaaatgattgtctttataacttgttagtataactactccctccggttatataataattgacgttttgaacaaggatgaggataaacttttataactttgaccaactttaaaagtatttagtttcaagaaactagaacaacatatatagatttgtatttcaaagcactataataaaagtaaacatgcatttatttaatatatatatatatatattctaatagaaaaataaggtcaaagatatattttgtagaccgtgccattgtccaaaacgtcaattaaaatgagaccggaggaagtacaagtttgcattcaacggatgtcatcatgtctagttgcatttaacacaaaaaggtatctacaaggaaatagccaaaatgtgtggtgtggagtggtctactttttttcttatggaaaaaaaatataaattagacctaattatttttttgacttaagttagacctaattattaatatattaggaataatttccacaaataattaatgaggaggatcattctagaccacggtacatgactcaaccaaacaagcaagaacaaaccacctttcccgtcgacacggcacacgttctcttcaacaaatagtatcaacagatatatacagcgggtataaacacgtgtcattttgagcatgttttaagtcaaactttataattcagcttttaacatcagtatctttttcaatatttaattagatttgatgtaggaaaaaaatatgtgtagatatttgctccaagaagaacttccaaaatagtggcggagccaagaatttaacccagtgggattaattactactagtttatatttcagtggggcaatttctctaatttttctgaacttatacataaaaatcaagatctataggggtgttttttaaaaagttgtgggtcaaaacacatcatacatgctaatctttgtatggattatctccgatacaatgtgcaactagaacaacgaagtagaaagaacgtatagagagagagagagacaacgatgccatttcaatgcgatatattgcattttcatgaaactaacatttatatattgacatgcacatataaatgatgatttgcatgtatttgaatgaaccccactatggtcgtaaagaacaatagagctttgtggatatatgtgtcgcgctctgctagctggctactagctaggaggatcatggaaaagtggtagtttgtcgtttggcagggaaggtgtgaactgcgtggattccaaatttgcaatgtcgatatgcatgcactaataattagaaaacaacaaacttggcacatgcagcgctatcattgatctccactggtgcttactctaacattgtcttaattagacaaaaaaactctgcataattgtagatatcaagctatatatattatcttactttgctagtcaaacctagggataggccggatatgtttcatttttgcattatctgatgtgattgtacgtgttgttgaagcgtggcgcatatgtgtgcacctccgcgatcgctctgtcactcgtatttcttaaatgttcttataagaaggtactgaatcccttgatcttgtattaatgttttatacgttttggtaccttcccgtgagctgaagtatcgatgtatcacgttataattatatatcttactgtaaaaagtactccctccgtttcacaatgtaagttattctagtatttctcacattcatattgatattaatgaatctagattaatataaacatgtacatatataggagttttttttagtgctacatacatttttttatttcatctattctatcagctgatgtttttgccaaaattgtctttgtccaacgcgcgattagttgattaaatcaaaatctgtgacccctcttttctttcatggcaggtcagattccgataagaacgcagccacataatataatgatgtgtgcacctcatgatctcaaggggcaagatatgcacaaagattttctaacgatatcttattggtagcgatgcatgcctgcatagtctaatttggagccaaaaaggtcatccatggatggcaccgtgtacctaagatacaacaaagagatgacgttcacaagttgtacaactgataggagtagtagtagactggtcagagaggaggagctgggcaagctaggcaaggccagtcacatcttcatcacgtggacagcttgttcatgttcgatcagtccagcataagcgtccaaagcttaacttttcgggcaattaaattagtagtcggcatcaacgtgcgtcataccatagtcatatgttaggtaactactctctcggttcttgacctagaaatgtagctacatcttagaatggacgagacatatattgaattgaatcgtgaggatgctaaaaataattcggagtagctagctagctagatcgaacttctgtttgtgtttgtaactacttcgttttagcatgtcattataggtcgaagtgtcgaacaaaagaaaagtttatctctataacatgtagaccacaggtgtatggcatactaccaaacattattgagctaataagctgatcaaatcattgatctgacacgaaatcgtagcacaacgtggctaccaaacatatatactatcccctttgtcccaataaatttatttttggttcctttccatttatctcaaagcaagtttatttttagaaactattatattagagtttataaaaatagagaataattatatattgggagtaaataaaataagaaataattgtactgtgatttaaagtaaagatattttatcctcttcatttaaatttgtactaatatataggtataagataggtcaatattaaacttattttgagacgaaggaacacaccctttataggcgaccacgacgcacaactacaccacaagcagctgatagcccacccagccatatcaggccgaccgccgcgccgcctgtcgcgtcaagcttatagctacgcgacgccgccgttgctgctgcattctctcttctcagtcttctctccactccctccgcgccgcccctcgccccctcctccctcgcagtcgcagcctcgcgtacgtaccgttgctgtgtttgcacgtacggcgatgcgcgccgttggcgccttgcttgctgctgcatcttgcctgccggccccgcgcgcgcccacctgccccaccacctgctgcatgctgcgtctaccgcgcgccacggtgacgcaccggcttgcgcaacaacgctcctcgcgatgcgtacgcacaagtgatgtggctgccgcgtacgtgcgtgcagcgtgcgctctgctgctttcagacgacgagtcgatcgatcgatcagcagcgtacggcacgcgcgccggcgcacgcaatcctcaacagggccggcaagcggattgcaagttgtcagattttgggataactgcaggcacaaaagatttataacgggattggagattttgagcacacatttgatactccgtatcatctttgtgtgcaggtgcaggtgcagtcggcagtcgcatcgatcagttgcttaagagtcataaattaaacgtcgggccgggcaggaggattacttgcacatttttagctcgatgtgaggatccagccaaggaaaaggacatggtgtagacgtgcacgtgcaaagaatcgagggacatttattcggcggcgatcacgcgacgaaattagacgtcaattggacaagatatatctttctccttcgagattttcgatctgcttaattgaccaacgcactcgctattcatcgtgtgactgaaattagaagaagtttcagtcatatttttctttgataatatttgacggtcaggacattgtcttcaacctctaaattaattgggagaggaaggaagagagaaagggtggactgacccatggtggtgatagtgatagtgagccttgatgccacatgtaacttaaattacggtagataatctatagattagtatagggggtcgtcggcagggaaggggtaaagagacaatatggaagcgtttttagaaagatgacccaaggttttgcagagatgggtaggcggcgaggcgtcagagtcgtgaggatgaaggagggcctaggggagggggatccaacagttcaagccgccagagataaggaagaagaggcaacacgagatatcgacactggatttgaggaagaaaaggatggtggtagcatgaatccaaccaatatacgtataaagaaagagggtggtgagaagcggtagggaagtagtagttgacgtgatatgaagagtccatagtggtggcagctaaattgggagaggagagtgaagagagaggtgtgagcagtgtcggaggtatgatgcttacaatggctataaaattactcaagaatatcattattactgtagaaggtaaagttttgtgtcgaagaaatatgacataatagttgatcaaatatgctttaagtatagcactagattaaaactgagctttttgttggaaaaacaattagagcatcaccaagagactctcaaaatcaatgtcgtaattccaaatttttgatgttttttttcttaaagaaccaaatcctacaatgcccacaaaataaaaaaaaaccaaaaaaaaatgaaatcccatcttcgaaaatctcgctctccacaagtatggcactatgctcgtccccaatctgcaaggtcgcacgtgatcgtgtggagaggcaggtgaccgatcacccgaatgggcaagcaagagcaatcacgcggagggagaagcaaatgatttttgttggtagttttacagggttatccacttttttgaagactcaaatttagagtaactcttaaaaagaaaaatatttccataccttcaatactaattacagagtctcaacaaaacatttaggggattaaatttgagatagctcttggtggcgctcttatttagaccgaactacaacaaatacctaaagtgattccggcggttgaaaaatccactgaacagctgaccccgttgattaatcagtccctctatgttcttttccaccactcgctgcatttcgtccaatgcagacaatccacattcaaacagcaggcgaccgcagcgcgattgagagggggaaaaaaactgatgcgttgcacagcggctcagcccaactcgaacatctggttcacagagtcaaaaacggttttgatctgtacctggtcgtgtctgaggcaacatatatattcggcgccccgagtctttcggactgaaacgacgatacatggacatgggtaacaactaccaacacaactagtgggtaccaattataccaactatatagaaggtatagatacaagagctacagtacgcattgttctgttccactttgtttgcgtggggcgactggctgaacaattcagcatttcagccttatacacgaataattacagacaggtgcgaagaaacagagaacactgaaagcctgaagcctaagccgcttcatgatgccatatcaaggaatagacaccaggacctgaaaaagggaaaaaaaacgatgagattcttcgttaatccatttaacagaagcacacctcaagttgctgtcagctaaattggtaattaatcagcttgtttcgacagatttccaagaaattgatccattggaacgtatccttcaattcatatggctatcactgtttgactcgtgtgctcccacaattgcttcacatcactgagccctggtccatagccaatgtttctttcagtgtgtatgtatagtatagacacagcgtgagcttccttgacttcaaaagggtgaaacccaaatgtatctttcgttgtgaccttgtgggtttttctcttaaataacatccacacaatatcctgtcaaagttaaaacaggtttcccctattgaaaagtaagtttaataccatccacacaacgtcctgtcaaagttagaacatgttacctctattgcaaagtaggttaattgaatgttaacttggaaaaaagagaagacatgttgcatacgttgcttacgcacgaaagcagataatcggacatcaataggagctacacaaaattgtgacactactttatccaagaaaaaaacaatacaatagcattgatctatatccttatgataacaaggaaatcacatgaactctactgaaatacactgttaaagcaagcaattcaaacaagtcaaaaagaacatacataatcagcaccctgcaaaccaaatctgatttggtctaaccccaaacctagaaattatatactattgttgtagactgttgtttcttttcactaaaattcatactaagtcaaataaagcggtagtagtagaaggatgataagtggaactagtgaacgagtttgatgtccacaggacctgtggccaccaggcatgctcgttctatagcaatcaaagttgatcgtcagcaattaaatctcacacatagtgatccttgcccatcacctaacatgaacttccccaataatagtgattcatctacatcatcttgatctgactcctgagactcccaggcataccaacaacagctactctgtagcacacaaacttactctttatctagttgaaatccaaagcaagccccttcaaggcatcaccacactactctactgcacttgccacttttatttccaagatgcacctgctagagcaatcatcctctactacccaaataacaatcgtgtctgtcagtcactaatcaattcataaactaaagaacactgaccttacttcatatgcaaactacatgctgtcatcagttgcaatatcagcatgctcgtcagtgtcactactccacgatatgtccaccagaccaagctgttgtcagagtagaaagcccacagaagaccagaggaaagggttttgaacgtcaatcagctcactgtacaatgttttctgacttcaagcagtggcggacgcaagtttaaaatacagatggggcggcagagctagccctaattaggtgatggtacaacacatacaaaccatagtcgctggttcacggcattggcgcaacagcgcacggcacgaacatcgagaaagttaacaacgaagattggtagtcgaacaaacgtatataacttatatgtagagagataaaaaaaaaagagaaatgttgttagacaataaggggaaccactttcaatagctcggggggtataaaacgagatgaaaaattatttaggggtttaagtgcttcgctaaaatagttcaagtgagtaaaatggatttttttatatatttaccaatttaactatttactgtagactgtattatacgctaaagaaatagaaagaaaatcgaattttatgtatggtcaaaatggtactacttatacacgaattttcataagtgtttttttcctattattcaatagtagactaatgactaatgtgttagaaataggactaaaataaggttttggggtgtggggcgacacggactgtagctaggccggccgacccaccctgcccaatgggtgtgtccgccactgacttcaagtaggatggaacgaatctactcaggacaaaacacaagcctttatctccatagcattttgaacctgttcttggtccttttggtgatatagcttgtacaatttcaaggtcttgaaagcactaagtttttctgtttccgataatataagtgttatttttagagaataggccagaggcccagctttttatagaaagctattaaggtttcgctggggtgagaccagcttacagggcagttcagaaaggaaaaagggcacaacccggccagacataggttttcaacctccagtagcagaactcaaactacacaggtccaactctaaacaacagaaaaagctacaaggcgaacaaacaagctatggaataccacacctatccaacaccagttctggagggtctaaaggcagctacaccagtataatataagtgtgcctctggaactatatttataccgccttttctcataaggtacattgaaaactggaggtcaaattcagtatccaatttgtgggtaaatgtaccccaaggccccaccttgaatattttcatacttggcatgccaatcaagtatattcatctacttatcaaagttagtactgcacaaaatctatccacaatcatcgagggacattttgaggataacaatcacttggaaatccctcagtgatgtgaaattatgaatacacagagtctgcatatcagacagattctatatcataattatgcagctgacagttgatgtacaacactgcgtcacaatggtttcaattatcagtgttgaaagattcagttggactataaactacaagctccataaagatgatttgcagaaactggaactaatttacaatcaagtttggcagctgaaattgtaataaagagagcctatattgtatttcaaacgagtaacctcgtactggagtagtaatattctgtttgtattccgttataactttaagttctcctaagtccaaacggtagggaccattacagcataaaaacaacagaggtcttggaactattcatttccaggcaagacaatattaaaacttcactcttcaagtaattggaatcagcacttcatattcttcaattaagtggagagattatcatcaatcccatttgtcttttaaacaaattctcccgaacaacaaagaacatgaaacaattcaaagctattatactaaacaaaacaataacatagtgatcgtgtcctaagattacatcgcctaccaagccaagccatgagacagcgacaaaaaaaattgaaataaaaaaggaagcaaagtggtagattgctagtacctttacctttgtactaagagtcggctttggcggggcactcgaggctggcgttgaagtggcgggcggggaacttggcggagacggagccgacctcgaagacgagctcgtcgccgtcggcgcggatcccggtgatggaccaccaccggaagaaggccctgacgcggatgccgctgaggccggagatgcggcggtcgtcgagccggcccgtgaggcggtcgctgaaggaggcgaggtagctccccgcggggagcacgatccggcagctggaggcgaggtccacggcgaagtcccccgacccggagtccagcgtgtacccgcgcacgttcgccggcagcaagcccagcgggaacccgcggtgccggagctcgtcgtacgcggtgacgtcgccgtcgccgccggcgtcggagcggacgaccgggagggccgccgacgcgaggagtaagagcgcggcggcggcggcgaggagcgccccggtttgggcagtgggtgtcgccatcgctggctcgccgctgcttggttggggagttgggatggatgggcgcacgcggagaaggagggggtgacgtggagaggtggaagagtgtagagcaccatgacagttaggagagagttaggccagtcacaatggctagtgtcattgcacggctacccaaaatattataccatcttctctcaaatgaaatcttttatgaaacaatccccacagtggaggggtttcactttgacgtttccaagactaagcaaagcatttaattgatacaagttgctgggatcatttgtacccaaaatccggcgcggcgcgggagaatgcggaggtcgcacggcggaggcggacgcaagagatccggtgaatgaaacgaatcggcctcaacgggggtttcactctgttaccgaggacttggaaacgacgctgacgagtttcaccaggatgaaactctttccttctctctcatccccatttcatgcaaataatcattttttattcagtcttacccctattaaatgtgcatgacacaccagtgaaacccccattgtgactggccttatagcgtgtgcggcgaaaagtcaaagatttttttcctttaaataatcgtttgcaacggtggcagttggcagttttggcactgagcaaagtaggcccggctcggcccgacctaattaggcccaaaaggtaaggaccagccagagtttttttttttaacttgtgcatcgatgtgtttcatactttcatgtcagagttgttcaagtaggaaaatgttgtgctagtagatgtacacgagaatatgacccgatcgaaaacaagtgaaattgcaacagcccaaagaatccaaaaggctttttctgaagacaaaaacttctgaattcagagagtgcagactgcagacaagacagcagaggcaccagctatgcccaaaaagaaatgggtggctcgaataaaacttttaagttcctattacatcgaatgtttggacattaattataaatattaaacgtagactattaataaaacccatccataatcttagactaattcgcgagacgaatctattgagcctaattaatacatgattagtctatatgatgctacagtaagtattctctaattatggattaattaggcttaaaaaattatctcgcaaattagctttcatttatgtaattagttttgtaagtagtctatatttaatactctaaattagtgtctaaattccctggatccaaacaccacctcaagcttaagagttctgaacgatagaaaacccattcaaacaatgattcccagaagctaccatgtttatggcaaacaaccatgtagctgaaagttttctactgtctattttcatagtttgcaatcagttctccctagcccattttgtgatcaactaatcccaggtaacagtcagaagcttaactactatttcctggcacatatttgatatttcagcttttggccaacagaaaaaacaagatgtgaaactaaaaggattcctagaacctctgtgtgtgcataaaacagtaaatatctaatctgaattagttgccaataaaacaactactcaatactaattcatacataaacaatatgatagcaataatctaatgtcagtttcgtaacgaacacttcttttgagaatgtccaagaagatgacatcggccacattgaacgattcgttttggccgtttcaagctttctatcttaagaatcttcattttgggacgaccaggaggcctccggatcttgggcgggcgaagaaccgcatatgctttgcttcctgcaccttgtgcaaaagaaaacgggaggttccattggcttctatctggaattgaatagattggctgggagtaagtttcccgatacttcattatgctgaagcattcatgtgcatacaagcgaggatcttcaccacaggaaagtagtgcagcaacagcatgtgcacatggaatgccatatatttgccaccgacgacaagagcagcacctggcttgcgtatccacaatgtttgttcgctcagatgagactatttcaaactccaccttgtttgctcgaaggacttgatagcatcctgaatcagcgatagcttcagaaataagtttctcggctgatggaacaagaattgagttgtatgatagcgccaagttttgccgttcaacaaaccagcaggtcagttggtgtttgatatgctccacagtttgcactataggaaactcatgacactccatggcccagttatataatatctcagttatcccaagattaaaatggccatatcggataccctcaaagtaagaaactgcccagagatttggtgggaaacgttggaaccatggcatgacatcttgaacttggaccatatcatttacctttgaatcaaattctgctgctgttagagcataaacagcactccagaaaatgttcagaagtttaggatttttgaactcgtcacggaaattctcactcacatatctcaagcaaaatccatgaaaagcagtggggaagtttacttcaacagcttcaaccacttgtgattgcctttcagatagtatcgtcaagacaggcatcttatccgtgttaactccaagcatcttcctcagttctgaaaaaaaccacatccagttttcatcactttcagcgtcaacaataccaaatgctagcgggaacatcatgttttcagcatcaacagctgacgcacatagcaatgtcccaagatactttcccttgaggtctgccttgtcaatttccaaaaggggtctacatgcatttaagaaaccatgaatagatgcatggaacgacacgaacagccgctggaagctattatctggtccagtccctttgtatattgcaacactgccaggatttgtctgtacaatctgctcacagtaggcaggaagaaagcgatatccatcctcaagggtgccatgaacagcagccatgcttctctccttcccacgccatgcctgcatataagaaactgctactccatgctgctctcggatatcctgcaatatctcttttggcttatactgtgggttatctcttagcgttgcctcaacggacctagcaacccaaccaacggtagcctggtgatgatgcaagtcacgcacaccgtcgcacgtgtgctccccgtgcaatgtgcgtacagtgaaagtcgggacaccatggcactttgccacatgcacacgccacgggcagccttccctcgcgcacttggcgatgaaccggctccggtcagatttcacgacacggagctcgaaatgcatagcaatggccatgtccttgacggccctccggcacgcgtggacatcgacaaactcttgcccgatgacaaggccttgctctacaagattctgctctaactcatgcgtgggatctacaagactctgctctagctccgccgccaggtctggttcaactaaaatctgatcgtcttccatcaatcatccacaagattacaaaatcacttatcgcgccacatagaaagtttgctcgcaattcgaccgctgcacaagattaacacaaaacacctagtcattcaatcgaaaagaaaaaatggcaattcaaaagaggtacagccaagttcaaaccaaattagggcaggtgagttcggttgaaagttgaagcctactccctccatttcatgatgtaagtcattctagcatttcctacattcatgttgatgttaatgaatctaaacatatatatccatctagattcattaacatcaatataaatgtggaaaatgttacaaatgacttatgttgtgaaacggagaaagtactttatttacttcctattttttcttcggaggaaaaaataaactattcagtggcggatagcgtggagcatgaggttgagctgaaccaaaagtgctacaaagagtccaccacgcatccatgaaatccgcatgaaacttaacgattgaaatgggatgaaacttaacgattgaaatggaggaaagaaatcaatcaagtccccgtggatctccaacctactgaagtgggcgtggacaagaaccgagtagggatagtagaagaaagagatgaataccttcaactcgattcaagttgaaggcgggggacgaaagccccgcttccgccgccgctccaaacccgcccccaggggcgtgcgcgctaggggaacggcgaagggggagtagcccgccttccgcgtgtctccgggactagcaggcgccggcgctcggaagtcggcggaggcgggggcggcgaggagaagaagaacggcggcggtccggctgggcagatcggaaagacgggtggagggggtggggggcattttggtcattcgatgtttttcagccttttttttcgaaattaaaattcgggacaccgttcaagtcgaaagtagcgatgtggttttttttttacaatttttatttacatttttttagcatacacatatatcaatgcaatctattttttaaaaaataaaatgaccaaaatgctactagttaggtgggacaagtattagaagtttctaaatgcatatgtcaactaaatttcatctagtcccacaaagataaaatggaattatgtgggttttttttttacaatttttatttgacatttttttagcatacacatatacaaatgcaatcagtttttctaaataaaatgatcaaaaatgcccctagttaggtgggacaaagtattagaagtttctaaatgcatgtcatttcatctagtcccataaggataaaatggaaaatagaatatcacacattaggtacttcttccatttcatattataagactttctagcattgtccatattcatatatatatatatatataccatttcatattataagactttctagcattgtccatattcatatatatatatatatatatatggggtaatgttagaaagtcttataatatgaaatggagggagtagatcgtagtgacaaatagatgacaacaaaattattacttattgcacattaaattatctaggctctttattttcattcaataaaaaatactacatgaccaatgagatcaagtcctatatgtaatcactataattaaccatagtacagaatatactgtgttgtaaccatgaatccctacggtttatggcaaacatatatttctactcacaagtcacaaatgttctccagttgcttacttgcttgcgatctgaatccatttaagaatcccatttgaaacaagcagattcaaaacactacatttagtcaaaatatatttatgtttgacttttttattaagctccaatttttcactgtctactattttaaaaattatgatttattttcagaagtatttgtataagctaaacatactctgctaaagaaaaaagaattaagtgagatcaaacgaaaccatgcgagcacaactctcgggacattttactactctctacttaacataatgaaaatgttatgttaagttattgagtctgtgcaaatgtattactccatctattttttaatatattatgtcttttggcacgacgtttcaatattctccttattcaaaaaatgtagataagtatcatttttttacttgttttatcacttaagaaactttaagcatgacttgtatcctttacatttatataaaaaaaagttgggtgaatagctcatttagtccttcaagtttcaccgaaggctcaatttggtccttcacgtttcattttgtccacataactcctctaaatatttgttttggcttgacatcatctttgggcccacttaatatgccatatggctatttttagtcaatatttctattagaaaatgtcccttttgcccttaatttatatacaactatatataaaaaggagaaaaccaagatgaataaataacattgtagatatacttcccattatttcaacatgtgcacatgaaacttaagccatttctatcggatacacttgctagtacataatttattttcgttttacataatttactatacattatctataaaaaaaatcaagcatacattttttctcttatatatgtgaatgatgggggtataagtgtcatttatcaagagagttgttagttcaaggataagtttgaactaaaatgaaaacttgaaggaccaatatgaatagattgaaacatcaaggactaaactgagtctcaggtgaaacttggaggaccactttggctattcacccaaaaaagtttatggtgttgtcttacaaaatagagacagtatatcattggttatcggtataatccacggttgagcttagtgctatcttcataattatccatatcatctagaaactacaaggcatgtccggctgtctgttctatggctgcagcacagccggcaccaacagtgctgcacacacacggcgcccaacagggtagcacgcacacggcgcagccgtagctgccgcagccagcttgccgaacaggcccactaaagaactcgtgtttttctatgattgcctgtagtgttgtatctacagtagatgatattggcatacagtcatccattgctgctaaggggcagtgctacagaggatccttgtcccttttagggcatctgcaaccaaagccacacctagagtgccctcactaactaaggacactctcaggggcactcatcttccaatggaggatacacctaagtagaatcttcaaaatctgaagcaactggataaaggtactctagcccacagtgggtgtcccaacacaaaagtccacactaggtattttcccatactaccactctcttctctttttcttcgtgcctattcttcttcgtcgcccctcttctcctccttttcttcgcctcgtagcctgtccttcccgcctcggcgccgttgccgtccttcccacctcggtgccattgtcgtcctccctctccctatctcccccgccaccgtcgctcgcctcactctccctcctctctctctctctctctctctctcaccgctcacctcactctcactccccctcactctctctctctctctctctctctctctcccgtcgccgacggctacgaaggtgatgagggccgtcgccgcagcgtcggcgagcggacaacggtgagcagcgcgcggatctgttcgtcggcaagcggcgcgcggatctattcgtcgcgccgcggatccgtcgacctcgccgtcgaagctcctcttcgccacctctctcctagatctggcatgacggcgctgcctactccggttctgccccatcgcactcgtcgttgactccgcctcaccgcatcgaggtgaggggcaagaaggggaaacaaagggggaggaggtaggggacagggcaccgggtcgctgcaatgtgtaacctcgagggagtggctccggaaaaagggagctgaagagtcagaggcgtgcgttcccctcgtgggggtcgcacctccctctagggacacgcctcgcggacggagggcagacagcgtgaagcgggggcacgcattgtacgtggccttataagtctttggttacagagaacatgtaagcagatatggttgtgtattgtgtattggtggacgttgtcgtttgttgtttgcattttgcgccccaaccatctcttcgtgaaaagacaattccttcctctccctttccttctctcatctaagtcagcaaaataatcattttaacaggactttacttcctagtagtattgagttatatgtccaaacaatagctcgtatactcgtttatcttaagattttcattctgaacatttttctgcctttgaattgaagagtcgtgagaaacgccaagggtcttccgactaactccacgagatgatgggctagacgatctgggttcgaaaccttacctcttctaattattttgtattaggtcatttcctaatatttgcatcttttttaattgaagaatcgtttctcttaaagattacaatcgtgatcggaattcgtccgataaacatgtactatgtatgacacgttgacaaaacaaaagtactagccactaggcagccgccaaaatctgtgcagacttcatcaccttgcagatgctctccaggacttccatggggctgacattgccgaccacggtcacctttttgttctccagctccaccttgaaggacaccactcctgatcatgtcaatcgagtagagagatcactatatcagagtatcagctttcagtaagatcgatgaacatagtgtttaccagtcacattcattcatgtaccttccatcttcaaaatttgcttctcaaccttcctcgcgcagcaatggcagtgcatagacaccttcagtgctactgtctgcagtgcaccgcagcagcacatgcagaaaaacacagcattaagttactgacagagaaattagagaggataaaatctaaaggcaagaaatgctttcgatttcagaaacaactatatgcattttttttttctgaaatgatgatttcataaacaaggtagtacgcacctttggttctttcacagctgatgatgatgcgttcggttcgtcttcaagatcagtgaccggcacaacctgttccaagtggctcctcagcaggccgcgcctctcgctgcttccctcgtcttcctccaggtgatgatgatcttcattggaatgcggaaaccaacggaaagccttcttcagacctcttgcagccatacggaagccctctgattagacaccaattaaccagcttgatcactcttcaaatattagcttatatagagaattgacagaagtcacaaggtagaggcatttatatgagttgttgatctgcattcatgagacagccaatggcagtcctgcagtactattaacattgtagcttaaccaagacaaatatgcctgaaggaagatcctgtgagatcaacaaacaaggaatccataaccataagtccttacaacctcactggtagtctggtagatctatccgtccaaccactcaccagttgatagaaagttagaaatgattagacaactattatgtaccaggttaccaaccagtactgcatctcgatatcacactggactcctgtagaatggctgggtattaggttacctgatcgatagatatttcatctgaatgacaaaaattatttgtaaactggccctgcaagacagtttcgtacccactcgaagatgtcttttcagctgtacgcacgcgtatttgatatttcagtttacagaggatacgaaaaaaaaaagatttcagtttacagaggataccaaaaaaaaaaagatggtggtctgttgtagagggactctgggccagaagcgggcccaaggtgcagcagcctgttatccttccaccgatggaagcgggcagtgatcgctgctctgtgaagccagcctcacgctgtgcctgccactttagggccggagaagcaaagcaaaggccttcgccaaagcccctccggcccactacgcaacttggaacgggcaagccagcaagattacaacaacatggggcccaggatcagaatccacaccaaacatccgcagccacctttagtgcccccgcttgggttacaggctctcgctactgagctcggcgaggcagggtaggcgagctgaatatttaacttggtttccctctttgtaaactgtcgaggtggtactaaagaggtgaggaataaagctgctactcactaccgttttgtcatttgtgggtgtgtcttttcatggatttggacccccggcagttcttcctcttggaatttgtggcctggttcggcctctttcagccgataatgagttttcttttgtctcgttcgaaatgagtttttaatttttcatctttacagattggttattttctgccgtgctgcacgtaacccttgattctagtaagttttacagaaataatcataatgtaaaattcaagtgttcttttttttttatcattggccactggccagtttgcgcaggtaaatcttcagtcctgatttttttttatcactggtcatctattcgctaattcggtccagttctcataaacctataatttatgtttttcttgtaatgtgcactgtgcagctcagcgactgatcgtcaggggaaaaggttgctcggtttactacctttgaacattccaaatcatagtataatggtagcatagttaccgttttccatgatactcctatctcggcctttcagccagctaaacatctccctcaaaaccagaagtgcaatggacaagaaaaaatatagtgaaaactgagagttttgttgctaccaagatggaaccggactgactcattcaagctgtaaacttgtcacaaatcgcacccaggtttacacattgttcaagagatacaaactgcagctataaagccacttgtgctaacaaataccactataagaggataggtatatcagatcgacacaaagtacagtcgctaaaaagatgtactaaaaaacccaaacttttatcaaccaacgcagatcattattccaagctctcttcaagaaccgcccacatcttcagacgcaaccaacgaatttgacatttctcaacgcatcacaaccgagcaaaacctaaatgttcatgatagagtcagtcacctatattatcatcaaaaactgaatgcgttctctaaatcattgctcttacaaaaggcttaccacaattcaagcaacaaaggccacccctgagtctgctgtgaagtgacaccagcacaaacaggcgtttataaccttcagaacagtataaatcaagttaaagcagacagcttttaccagtttgtctaaaaaaggagagatacctatcaatgaagttaagaaaaaaggtgcactagaatggttagagagtatagtactactctagtataatttagatccaagaaaaagtgtctgggttgtgaaaatacatgctattgtcatttcttgaggcaaaataccctgtaacggttgctcatgtagaagtgttaaagaaagggataatgatatggagttaataggagcagcatgcttttttgttatatgacctaaaatggcatctaaatcaagaaaactagtgtaacattcacaatcattgtcccttacaaatatgctttggaatcaatccaaacatatcgctaaggtataaacagaaggattgtaaaaaagacaatgacgttcatgaaatagggcatgtagtgatgttaaatttacaagttcatacactagattgcacccaccagaaaagtttgtgtaccaccaatgcaatttactcttaaatttaatgttaggagtaaaatgagcagcaaatgcataccatttgctaaaatatattgtgtgcaaattagtaagggaattgaaaatgtcaaaatagggcagtacctaacataacttaggacaagaagccacccaaagtgctccagatcaaaacaggagatcactaagggcttaaaaatatagcctgcataagcatacaccacagataagtttgcaggacataaggaaaattgtaggtatatcaaacaaatatataaataactgaccataagcagcttattcagatgctattcaccttacatggtgcttcactgactgaagttcatctctgagtatctgcattaaggagtaaatacatgagctgaaaatcatggcatgaaaacagtatacaccaggtgagattcaaaatgttattagagaatacttgcctcctaggcttgttctgacgctgatcaacctcttcattgacaatatctgcaatgcaaaatgtcaaccaaatatttatggaagcaacttacaaattgtaatataatataagagtcaacatcaataaaggtagtatgatgtaccatttcgaggaggggaagcccccttgttagcaatagattccctgtaagaatgaataaatatttttaattcccactttcaaaggaaaattcatggatgatacaagaacacagatccaggtaggttacataatactaatgcctttatatgtatcgcgcccaaattcctccaaagtatattcccattcttatattaacatttctgaatcaaatgtgtatccaacagtaatacttcttttagccattcgagtgatccacttcatcagttcatcaatatacatacacattctgaaccagtacgtagttgagtactttgaattgaaatacaaaaatgtacatatatcaagctgggggctatcacaactgcatttgcagctaataatactagtcaaaacaagtgataatgtttttgaagatgcatacatggtcagacggctaagtctaaagcagatgttcagcactttagtttacaccaagaggcgcttttcccacagaaccagagcagcttaacccatgtatataagctatttgtcgattatatcctttacctggaaggaactgacgatgaggtctgtcctgaagatctggagtaaaaggctggatccagagcaatataaggtggatatgatcctccaaaagcaccagctgcaccagttaacagtggcaacctaccaaaccaacatttcatgtgttataagacagaataatataaaaaatcatgcaaataaggcccaacagtcagtatatagtttataaagacaaagaacaaaagcatcatattggaatccataggaaaataaatcagaactaaataaataggagaaaggtattattacatcttcaacaaaacaaaaatgacgccccaaaagagtttatgagcgaatattacttgggaaagcaagtttcagctataaaatcccataacatattatattgaaagataaaacaaaagcatttgtaacaactatcaattcctgctatcatagtttaattaaacaaaagctagacaaagtatagctagaaatcaaaacaagacgtgctattctaagaacaagtgaaaatactgtttggtgtaatattgtcttatattcaccccttgcagttaagattacatccagttgttacaccacagaaaatattattgtgaaaagcaaatctagtgagacaatgaaatataccatgtcatttcgttatttcccattcccatctgctgttgagccacatagccagggagggccataccaacagtaggaactccaacaccaccaggatgctgactgccaaattgcatgactgcattaacgatgaaaacaggaaagacaatgagttcaagtgatggcattggaaattagaaagtcaaagcaatccgattattacaagaaaagatctgttgaattactaaggaagcaaacctggaaggagagctggagtgccaggaaaattttgttcgccctgggcaagaccaatagccccagcagccccaataacctgggctccaccatacataaaggaaccccttcctgcttcctgactgttggtttttcctgccccagatgatgcatttgatttgttcgaactaggatacagaccattctcaacactttcagttgatctaacaggtagatgctgagtggttgacgggttgccagtgcgatggttcaactgctgagttggtattctcattgcagattgagtttgcacttgccctgacttctggtgcacgactgatgtgtgactttgctggtgtgtaggagccctaggattttggtgaagagacgaagtggactgattgtttgaaggaatcccatttcctccttgagttctaacaacagaagattgaccatgattaactgtcgatgctgcaaatcctgatgaattcaacgatgttcctccactccttggagattgtctaacaggaccatcagcatgttgaaacctgtcacgtgcaccataatcccttctaactgctgggccagattgtacctttgcattgtcatccatcttcatagaagatggaaagactttattggaaccccctgcttgcatattgtcccttctttgagctggcacagagaaatctgggttggaggcaccagagggataaaatggtggtgacgctgaatttaagcttgaattcacaacattctttttaggaggggccatttctgactgcgcatttaaagtttggccactctctctgacggctgaagcacttgcagcagactctcgtgatcttgcaggtctgaacaagtaataataagataattatgtaaggcgaaaatcacaagcaaagctgtgcagccatgaaacctatttacagtcaagtgtccccagtggtgtgtgcagtattgtgtttttgttgggtagttgggaaggattcaaaataataatcacttactgtttccgctggaatccaacaacatctcggttgttctttgcaacagcttcataacgtcgaggtcctctccctctaacaaccttttggggtcggttttggtggttgttgttgatatcttcattataaccgcgatactttccacctctggcaaacccatgaccagtgccccgagttctacccccaccaccacggcctctaaagcgaccccttgacattcgcttatcctgcaatgcagaaatcctacctcaatactaacattgaagaaaaagctatcatttgcacattaaaggaattggacagatacctcatagtgctcctcatgcaaattcatttcctcaaatctgtcatgcacccacgcttgatcatctttagcgtcccataacttcctcccaccaaacattctcctgctttcagaagaaagtaaaaaacaaaatcagcacagttgaagagcaagatctcatttagcagccactactatccaatgacagactgcagcagggtcaaaatataacgataaccaacatgagccgatgctcaatagattagctgtagctactatatatttagcagacgcttgccaaccagagcatccatttgcagaggagatgcaaaatataattgacccaggaagctaaaacatatggtggaagaagaatgatgaacatgctctattgctgattgcacattgaaaatcgttagcatacaaacaaaaggtaagctcgcagctcactcttcccatgttggtcccaacaatgtggcacagtttttcatcatcatggaatcaaatagagggggtgacaaaccctctaatgaatgcccgtggatatttacaggttatggggttttctgcaaaatagaaattactagcctgccatcatgggttgcaacaggtgtgttgcaagctgacagtgacatgtcaccggtgagcaccatgtggaatcattttgcttctatggcctgtttgacccgagtccgcatcaactaagcaagttgttgcaccgaaatgagtgttttgtaggttattgcacctatttgcagtccatgcaccatgagtacaatttactcttcttatagctaaattccaacattctatgcccaaaaacgatcattaggcatttaggttctactaaatatgcagtgattagccttctcattatattaaaatatgtcctacatattgcatttctaaggagtattcataacggccatctcatggcaaaaaatgaatttattcaattcacaatcagcccaatctaatcccccaacccctcctcttttcttctccggtgttagctaaacttatgcattagagtacatgcttaataaacattggctcttgtcctactaaaaccctagcattgaaggaacaaacaaaattctatgtagctaacctccaggacagcatcttaagcatcaaaatttaagcacacacaaatctgagttactgtcaaaaacaagtaatagcaagaaccaaggttgggaaaatgtgtctgcattagctcccaacaaacaagtatctagcacgagtccctggatttcattgtaggaacatatttcatgtaggactccctgaaaaagtggtttcactggacccttactgtggattatcatttgtcattataacctcattcaaacttttcacgtttcctgatattttatcagtttacagcttgatcactatgttgattttagtttcgagcacgacgacccaaacatattcaaaataaatgagttcagatgctctggtaagttatatccttcattttctacatagttcattttcaaagtttaaaatttatactaagcttaaagttcagttttttcttgtgaaaggcttttgcctgaattgcatgtgataaatccccctgcgcttcctcgcctacctttggcatcgatgcctcaattcacagattcactacgttttgattatgcccgttttactttgctgaagtataatgcagctctggcttcctcgaggccacagccacagcctacggttgagcaatagcaattctaccaaaactatgggtacagcagataaggcataagtttttcaggaagaactcacctgcggcggccacgactctcctcttggaagcggtcatcgtgcatgtagaaggcgccggacgtgggtaccgcaaacggctcctgctccttcttctcttctccatccccttccaccgccgcctctccctccacgtcgcccttctccccatcctccccctgggcaccggcgacctccttgggcggctccgcgcggccgtcgtactcctcctcgaagccctcgccgacctcctcctccgccaaatcatcgtagtactcctcgtcatcgtcctcgtaggcctcgtcctcgtacacctcggctgcgccctgcccgtcgccgtcgtcgccgtcgccgcggtcggacccgatccgcgccctcccctcctcggacccctcgtcgtcgctggcctcccggcgccgcatctccgggagcagcgcgtcgtcggggtcgctcacgtactcctcgtcatccccggaccccgccgtctccgcctccgcctccgcctcctcgggcgtcagcggcgccgcggggggcttctcggcggcgtgggcctgctccggctgcgcgtccgccggcgtcgtcgggtcggccatgggcgggcgggcgagcgaagcaaccctagatttggctgcggcggtgtggtgagattttttcttttttttttctcctttttcttccctctctctccgtgggtttggtttggtttggttttgtgtggggaagcgagacgaaagagttcgaatcgaagggggagagggggggaggcgtggaacggaacgggacgggattacggacggggcagggtgagagcgaggcggacggggcgtggaacggctacggcacgggagggcaaagcgcgagttctcgccagttttttagatgtaaacgtctacagcctacaggtttctctttggtttttggatggatacaggagcagacggttgctcagtgcggatttataattcggcattgctagtcttggtgttaaaatattatagggttatgattttatccgtgccactacaaatttatttatttagataaatgttatatttaaaagggggtgcgacgtataatgtggtgagaataattacatcgtcgaattatccttacgaccattagaccgagtgattatacggttagaaattttctatgcacgctctttcttttaatcagtgcatgtacctacgttgtaacggggtccatataagtaagggtagactataagtgtgattgaggataaaacattgtattcggtggttacatacatacgctatgtgtgggtgcatgttgagagcgtcgtggaagaagtggacggaaggaagatgagttggcttttaagctagtagagatgtaggtaaaatatttcagtcactttgcattttactgggccatgtacgagcggcacctacggcctacaaggtagtatggcgcacaaaccaacagcctatgttggccgagctagcggcaattcaaggaataagttcacttttcatccctcaactttacgtcaagtttgtttgacatccctggtacaaaaccgtgtaacttgtatcccatggcagtattgacctcattttcccatgtttttgctcatgtgtcagttgtccggccccacttggtcaggttgcagtgacagtgaaagatttgtgcaatgacgacgatgcggagaggagtgtaggcgcaacaatggtgatgacgaggttggacggccaccacatcgccgctggctccaccatataccgccaaaatatttccacccacctgaacctaagcacctaatcatccacaagctcgatcgctttacatgatataagcaacaacatgaaacaatcatgagtcgatcaaatgatccatggtcgaagatgataaaaaaaaagagtcacttttgatctgtcatggatggtagaaactagcaagaaaggtgtgtggaatgtgagcataggacgacgaagaaggagatgtgtttgccatagaagacgaggatggcggtgatgacataggtagcgtacaccgtgctggcaccaaagttggcaaagaaggagatgaacacgtgctccttcacattgagcggctccgggttgagggtgaactctaacggccgcgcgcgcgcagaagaaggcatgctcctacagtaccaccgccatgaggcagccaagcggcacaacggcaatctgcaaggagatagcagtgatggtgtgcggcttcgggtagtaccagaagaattggttgagaaaggagagcaccgcgcacgacgttatccctagactgcacatccggaacatcagcaccaacaactcgtgggtgaagcccacgcatatcaaccgcaattgatgcatgttcttaaataataaaccatacctgtgtcggagacaccaccagggctgagggagcttaggcttcgggaggtcgttgacctcctcaattgttgccgcctcccgcgataggctcaccgggtatgtcagccgccttaagcccccttgcgatcttctccatgccggcaagctgctagggaaaagaggggagagatggagagatgggcaagaaaggggataggtggggagaggtggaagtctacttacgcgtgggctctatatgttttcttttttctttttgctaactaggatgtcacatcagacaatacttaacttaacttggcacatcatattgccttagacaaacttgagtagttttgcaaagataaggggtggagatttttggtattgcgatttcagggacgtaaattaaactcgtcgtaaagttgagggattggcaagtggacttattcgcagttctactaccgttaccaggcccctttttgggccgttcggcccactacaccccaatgtattgtcgtgggccgtgagaccaaccggatcagagaagcgtgctgcggtcagcgtcacaccgaaaccatgacctacacggctacacgcgcgcacgccccgcctcgcctccgcttttctttcatagcttcgtccatccatggcgcagccgtatcatcctcagtcctcgctaagctagctgcctccatgcctgtgacaagggagatcatcgccggagccggagccggatcggcggcggcggcggcggctgtactggcgttgctggtcgcggccgccggcggtgacgaattagcggcggcggtgggtagcagcagcagcatcatgccgccctgcttccacgcgtgcttcgaccagtgcgtgcagcgcgaggagtactggttctgccagttctcctgctaccgccggtgcggcgccggcgccatcgccatcgccatcgccgccggccgcttctccggcaccggcgactgcgagcacgcgtgcgcgctgtccatgtgcggccagatcgacccgggcagcaagatgatggccgtgtgccgcgacacgtgcggcaagagctacgccgccgccgggtgccgccgccggccgaccagccttacggcggcagtgtgattcaatatttcgaccgcgacaaacaggattgccttaagcatgacgaacatctcgaattaattctcgatatgatgttaaaacacaaatccatgcacaacatattaacacaaatccatgtataataatactcttgagatggctaaattattgtcggagttgtgctccaatttgtaataacgcaattaattacgcaaggtatatatacataccgccgttcgatcgaatcgaattaacagtcttgtcttgagtcaactatgacgtttgtttctcgctgattatctgccatacaaattaccatgcggctgatctactaagtactgacatggattaatcaacacggtggaaaactaattaagtgcccagttactgtcacttgaacacggattactgccttgatccctagctacttctgtcagaccgaataccataaacgaaaatgtttaatgattctgtatgggctgcttggtgctttcttgtgtaagtgttctctcatcatgacagatcaaaacaaactggatttaatcgattcgaactgatcagctgaccacgaagagagatcgattacccgcgcgagcgacgcacgcgaatctgttccccgcgcgacgccgcgacgcgaacaaaagcgtgaattcgcaagctgcatgcccagctgcacctctctgtctctccgatcgctcgaaacgaattcagttttcgaacattccgtgcacggcgtcgaatcccggagccctcgccatcgcccacgccctcgcgcgcacccggaacgcgtgaccccctcctcctcgccgccggcgcggcgcgcgtgcaatgcaagcgctaatgcgcgcggctatatataccgcgctctcctcaccgaagcaaagccaacccgttcacacctcaccgagcgagcagctagctagctgcggcgatggcctccagagcggcggcggtcgccgtcctcctcctcgccgtggcggcggcgccgctcttcgccgcggcgagcgcgcatggccgaggctaccttggtgccaaggtacgtaccgacaccccgacaaattaattggttgtccacattaagaccaaatttactgattaattgtatctgaattcttgtgtcgattagtcctggcctcctgacggcagcttgagctcatcaagctccggcgaggctgcagcggcggacgtcgacgacggccacacggactggaagtgctactcctcctgcatgagcaagtgctgtcaccgccacgacgacgacgacgacgacaaggccaatgccaaggccaacgccaccgccggcgccgccgccgtcgggctcgacgatgactacaagtgcaagaagcagtgcctcggcaactgcttcaaggacgtgccggccgtttgctaccacaagtgcgtcgacgactggtgcgcgaagctgccaccatgtacgtaataaactaacacttcgcaacgtgatgnggtnctgtgcaattgaaagtcaaaccaaangcccactggggggggggnggnnggtatacagataggagaattgaaanaatgtttnnnanacgcgtcnnntatattnatgagatcgggtaattgatagatataccgtacantcntttatatccagtcgacgttcggt

SEQ ID NO: 28856 - DNA, 621 bp, Oryza sativa
aactgcaaattacaagtacaaggaaaattactttttctcatctggagttgacaaaaatttaaataaatgtaattcagtgctggagaaaaaaaaaatcatatgatcatctaaacagatgcagaaaaagcatttgacacaagtcaacattcttataaaaactttcaacaaattaggtatagcaggaatacttctcaatataataaaggttatatatgacaagaccacagcttacatcatacccaatgatgaaaagctgaaggctctttcctctaagaccagaaacaagacagggatgctcactctcaccactgctattcatcttagtgctggaggtcccagccggagcaattagacaagaaaaagaaaatgcattcaaattggaaaggaagttatgaaactgtctctgttttcacatgacatatatcttatatacagaaaattctaaagactctaaaaagactgttaaaactaacaaatgaattccgtaaagttgcaggatacaaaatcaacatgcaaaaatcagttgtttttctacacactaacaaggaactatccaaaaaagaaatttagaaaaccatactatttacaatagcatcaaaaataataaaatacttcggaata

SEQ ID NO: 28857 - DNA, 785 bp, Oryza sativa
agtcttagcatatcaatttagctatatcggctgcttctcaatttagctctaaatcgcgttgctagattagattagcttagacatctaccaccctgaaaactcagtcaacggcttgattgtctagatattgtgtttcttttcatacttagtgctgcatcagttaagtttgatccactaagtcgtgcttagaaccataatctctagcctgcttcttgactgccaataagggtttcatcggggtttcagccgatgagttatctaggcgttgcatcggcttacaaggattgcatacatattggatttagccgatcgcaacatagattttactgtttatctaatcctgtggatttaatgacatcggacctccagccgatgtatgctttaaccttcggatcagtgcttattatatcttgtttctagccgattggtttatactagattatattgttattttattacatcatcatcagccgattgactttatatcattatctacattggacatatagccgattgcttaaaccctatcgctatcggctggtatcggcatcggctattatcagctatcggctggaactactccatcggcttgtcagccgatcggttgttttgatctactatttgcacatcttgtcagttgcaggatcaaactgactggcacgcccgcatctcatcaaggtttggacctgcacaggagctaagcagatctcccaggccggtgtgttcgattttttttcgtcaatagcggcacatgaccggtgataaaaattggttctcctctctca

SEQ ID NO: 28858 - DNA, 2386 bp, Oryza sativa
agattattataagtaatatataagttattagtatagttttctctattataatcttcccacaggattaaataaatacgatacccttgtaatactctcgggtgaaatgctacaatggtatatccatatgcttgcagatgaaatgtgtaaccataatataccacaagtgcttttgcgccattgctgggaattatatttctagtaatgtccttaagaaatagcaacaagcatttctggcgccgttgccgggaaagatttataaaagagattactataagctaatactttatatttacccttgtatagtccctgtcctttgcaggctaaccttggttgttttcactgttgttgtgaaaacagggtagtgtatgactggtttcaacttaccggaaaatttcaaagaaaatccaaaagttttctttcggagcgttaagccgcaagtcgtttctccgcagaaaactctcccgacaaagaaacccgctatcctagcgtcaccaagcttcaagacaatggctgaaaggactctccgcgagttcgctgccccctcagctgagaatgtgctcgttgggccgcaagttagcttaggagacacagactttgatctgaaatcgagccttattactatggcgcaggctaacgatggatgagtcgatccccaaagcttgggaacgactccaggagtatgtggccgcctgtcctcatcatgggatggaagagtgggtgatactccagagctgctacaacgggctcactcccatgtcctgcgaccacctggacgtggcagctggaggagctttcttctctaagacggtcagaggagccgtcgacctcatagagaagatagtctccaacatgggttggagcgaagaatgactccagacccgtcagcaagtaatgcacaccatcaaggatacggagatgctcgctgcgtaactagacctcctcaataaacgactggacgaccatgagaagaagccccaaggcaccgtctaggccttgcactcgcacatcacgtgctaggtctgcggtagcacaggtcattttgggaacgactgctcggaaacccgtgaggaggcaatgtacatgggcaacaaaaacaacaatgggttccgtccacaaggaggtcaagggtggaaccaacccagcccgtattaccaagggggcaataatggtaacttctctaaccagccctccttaaaagatctcatcttttcacaagctaaaactactgatgctcttagcaaaaagctggctgccaatgaaaagatcttaaaaaatataaatgtcaagctagacggcatttcttccgcattccaaaatcagctaagctttaataagatgatagagacccagctggcgcagctagctgcctttattcccgctaatgaatcagggaggattacgggccacctggtacactctgttaaaaatgttaaggcgatcacaacaaggggaggtaagtccactcgggatcctccatatcctaaccctgcaggaacaaggagcagtagcagccaggaagcgctgcctaacaacacggctgagacagaggaggtagctcagcccaaaggaattgtgccacaagagtactgcgacacgaggttgctaccattcccacaaaggtacagtaagccgtcggtggacgagcagttcgctcgtttcgttgaggtgatccagaatatccacattcacgtgccactgctggatgctatgcaagtgcccacttatgcattatatcttaaggatatcctcaataacaagaggccactaccaacaaccgaagtggtcaagctgacggaagaatgcaacaatgccatactctacaagatcccgaaaaataagaaagattcgaggtgtcccacgatcacttgctcgtcgggatacagaaattcgaccaggccctctacgaccttgaagctagtgtcagcattatgcccaaagaagtcttcgacaagcttaacttcacggtgttggctccaacaccgatgcgccgggagctggccaattcatcggtccgttactcagctgggatagcggaagatgtgccggtcaaaatacgggatttcttcatcccagttgattttgtggtgctggagatggagtcagacaaggagacgccactcatcctgggctgtctgttccatagcaccgcaggcgccaacattgatgtgggaacgggaagtatccatttccgtatcaacagaaggaatagaagttcgagtttcagccaaggactaagcaatgctccatggtgagaatcaaatacgggccaaacccatagaacatccaagtgatcgaagtggagcgacctcagacgaatagcctagtgaagttcatatggaacttcctgtagaagggaacaccagtacctagatcctgtgaaaggaag

SEQ ID NO: 28859 - DNA, 5947 bp, Oryza sativa
tctaactaagcaactaagttatgttttgcaatcctagggtgaaagtggctcaattatatcactaggaaagtaaatcacactttctaagtctagtttagcaatcctagggtgaaatgatctctagtatgtctctaggaatgtaaattgcacaaatgtaaatgcaacaagtaaatgagacaaggtgacaagagatttttcaccgaggttcggaaactcgccggtttcctactccccgttatggcgagcccaactctaccgctcaaccacgaagccaccgcacgcccccttcgtcaaggggtgggcaaggcgggagccggcccacggagaggactacccaagcttcgatcgctcggggtagtttttccttcactccaaaggtggtgaactccaaaccactcacaaaccggcgccgggcctccttcacaatcttctcggagaggtcaccgggcaactcctccacaagccgtctaggaggcggcaacctccaagagtaacaagcgatgacccggcgtggagatgatcaagtgccacactagctctacaatgaagcaatgcacttgactcttggctaatcaaccctcaacactacaatggatgaacactaagctcaaatatgtgtgagagaggtgcaaggggtgtatgcaagtgaatttggtgccaagagagtccccttgctgctggtgggggagtatttatactcccaccaaccaaaactagccgtcgtagggctgtcattgggccccacagccctggccggtcagaccgacatggggtggccggtcagaccggcctcggctaggtcagaccgccctcagctcgctctgaccgaatacggctccagccgctcgggatcggccatcccagagcatgccatcccggctatatggccggctggtcagactggacaacacttgccggtcagaccggctgtgtggaggcggtcaaaccggccgtgaccctgtggtcagaccagctgcactggccggtcagaccggcacttgggccgcggtcagaccggctctggtcaggccacacagtgaatgcacaaattgaaatatggggagagtctaaatgcgagcacaagtctaaatacataatgacctaatgtggcaattaaaatcatctctttgctaggtcattacccctcttaatagtacggcgaggttagaatttaactagcaaattcgatcgccctacatctcgatcaatttaaatataaagcactagtttaccatcttctcatccttcgtttgcgctgtcaattttaatccttcggtgatcatccatgtgcacacaataagtgaacctaactcaaataaatatctcaaagacaacggttagtccacaattagtgcttgtcattaattaccaaaatcaacaacgggggcctagatgcttcaatcttcccctttttggtaattgatgacaaacatctcaatcatatataatcaaatttatatcacatggatatattgcaatgaaaagcaaaagctccccctaaacatgtgcatatcaatcacaatcaacaaatatagagccaatgcacatttcaatttcacatttcaacaagcacaaacacataagcaatatttcaatgttaacttcaagaaatattcatgagcataagatggtcacacatatatcaatatcacatttaccatccatcatagcacaagatcacatcactaaccattcaaaacacataagtcacaaatgatcctaaaaagggctcacaaataaacaagggctattacaagaccacgaagggtccaaaagacatagagttcaacaaaacaaaaaagaacacataatatagagtaatagcccatatccatacataatatagcccaaccgccttaacctattagatatgaggtaactaacctcactaccactagtcccaacccacaggacatgaagcacaccaaatgacatttttctccccctttcggcatcaagtaccaaaaggtcttcattcctgtggaggagaagaaggacgtgccgaagatgaaggatgaggagcatcacggtggcgatgatatacaaaagcttgggtgctctccaacacttggacccgagaatccaatacacccactctagtgtgcaatcttcccacggatgcattcaaatttccatcatccgttcgcaaaccacgaacattctcatgcatcgcttcatgctcggtggtcaagcgttgaatgctctcacttagggtattaatagccccaagtaccgggttgaagtattcattgagttacattccaaagtaagcatattgtggatggaagaaagcattggtatcatacccatgaggaggaggcggggttgcacttgagcttgcgccttgatcaaatgttggttggcgcacacgaggagctctaggagtggagagttggagacgaggcttgtactccttgtgttcttttaagttgttaccaacttgtcccaacttgctttgaatcaacctcattatgtagggagcatagtaaattccttgtccaattgtccccttggaaatggctatctccttcatcataaggttgatgaaatgaaaccgacgaccatccatgatggcatcaatgacatgccatgcaacgccgcgaatgtcatcattgttgccacatcttgggagaatggtggccttcactatgcggttgatcacactagggatgaccctcaaacccgccacctttccataggtgtgcctccccccttcttcataaaactgagaaaagtgatcaatggggaaggggttgtggttgtgctcatcatgtaggtcatccccgttgttgaaacagatgtgcaagagctccttgaattcacggcggttgatagatcaccgaatggtccctgacatccacttcatagcatcacaatcgccggacacccacacggtggcatagaattgccagatgaggtcttcatcaaagggttgcttcatggtgataatcctatcaatgccaacggccttgaacaacccctgcaaatccacaaactccggtgtctcaccaatgtgcctccaagaaatccacttgtgttcggtgaaggctttgtttgcgtatacttgctcatacacggccttttgataccgtgtatggaaccttgaatcattacaatcattaggcctccggaattgatcgtgatgacggaggatagtgtattgctgggcattccttaaattgagcacaaattggatggtgggatcgagaggactcccatcatcacttgcctcatcatcctcaccatcgccactgccagtgtcatcaccacttacttccacctcatccccctcaacattttccgtaatttcatcctcactactttgagcatactcctatccgcttgattcctcatgcgcacttggctccggcgtgggctcacgacgaccatgacgagtgcggggaggcatagctgagaaacaaggataaaaaagatatgagcaacaattttagaagacactaggttaggtggaaggaggttgtatgctgctgttaggagcggtaagaccgagtaccacagaccggtcagaccgccggccacttgccggtcagaccaccggccatcagccggtcagaccggtgacatgcacccggtcagaccggcggcatgcgcccggtcagaccgccctttgggctggtcaagccgccactgacaggagctaaaacaaccctcttaaaccatcacacaaatgactctaaaaaatatttgctacatcaagattgcacaagatttgagcatggatatcaaggtgtaggtctattacattaagattggaacaaagggggaaaactacccttaaccctagagattgaaatagatagatttgagagcaatgcacaagagggagagtgatttaccggttgaaggagttgaatcacaccaagaaactaccctctattggtgcaaaacgaagaacacctcgtgcttcacctagggttccatgccatggatcaaaaactcaatcaaaacacaaatcaatccatggcatacagagaagaagcaaaggagaatcacttacggtgtaacctgagtgattttgacggttgaactggatggattttgtggagggaggtggctagggtttgggagaggagagagaggttgttctcgagttgaggaagaagagggctgaatgggaggaggaggactcggttaggagaaggaaagagaggaaaaggaacaagtcctgggcccactagcttggccggtcagaccggccatatgcggccggttagaccgcgcatatagcgccgatcaaaccgcctggcccccagccgactgtgcacagcccttgcacagttcggctacccccacacaataaaaattcaacaaaaattgtatttttggagcaattttgaaatgtgtgagttgaaatattgccaaccgttcataacatttgaaaattatgaagatttgcaacaaaactcacttaagtgctaggaggtgacctattatggtctataggggtttttgggccaatttgattttcaaacaacttttgaaagatttggtttttgaaataggtttgaattccaaaaacatttcaaatcttcttctctaccaactttgttttgaaacttttctcaaattccttctcaatctcattttggggataaatctcattttggccaaaactaataatctagtttcttcaaaagtgggccaaaagggcattttcatccaaaattcatttttcttgcaatgtgaggcttggaaaacatataaggaaccttttgacacattttccaagagatggctttcaaattacattgattttgcaaacgttttgacttatgttgacttgggcattttgaaaatactactagcactactagttgatttgctcacatataaaaagaagtagagcacatgcaagagttaaaaactcccccttaatgtgacatgctccattttcacaaagaagaaccaaatggcaataaatccaaagcataagagcaaataggagcaaatatacaatatgcaaaagaagcaaccatggtgcacaatgtcaagccacatttgagaaatctatgacatttaactcattcctcaacttgcaaaagcgggtttcatcaagaggcttggtaaagatgtcggctagttgatcctcggttcttatgtggctaatgactatgtcactcttggcaacatggtctcttaggaagtgatggcgaatgtcaatatgcttggttctagaatgttggaccgggttattggctatctttatggcactatcattgtcacataggagtggggttttggtgaaggatatgccatagtccaacaagatttgtttcatccaaagcaattgggcacaacaactacccgccgaaacatattccgcctcggcggtagagagggctacggagttttgtttcttggatgatcatgacacaagggatctaccaagcatttggcaactaccggatgtgctctttctatccactttgcaaccggcataatccgaatcggaatagccaacaagcttaaacttagtaccttttgggtaccacaagccaatagttgaggaatgctttaaatatcttagaatccttttcacggccactaagtgacactcctttggagcggcttgaaatcgtgcacacatgcaaacactaaatatgatatccggcctagatgcggtaaggaaaagtaagctaccaatcatggaacgataaagctttaaatctaccggtttacctccctcatcaaggtcgagatggccgttggttgctataggtgtcttgatggacttcgcatcctccaagccaaacctcttgagtagatccttgatgtacttggtttggctcacgaacgtcccatccttgagttgcttgatttgaactccaaggaagaagctcaactctccaatcatggacatctcaaattccctagacatcatattaccaaattccttgcaaaatacctcattagttgaaccgaatat

SEQ ID NO: 28860 - DNA, 521 bp, Oryza sativa
gcaacaataccttcagcggcgagatacccataactttatcaaatctaaccaacctggctattttgtacctatggggtaatgaactttcggggcctatacccccaaaactatgcatgctcgccaagatgcaatacattggtcttaacaataacaaacttactggtgaacttcctgctagcttaggaaaccttaccaggctagtgacactatccctccatgataatcagatatctggctccatcccccaagaaatcggaaatttggtgaacctcaatattttggattttgaatataataaaatttcaggctcagtaccaaaaacttgtaaaatcaaaggtgtttttgattattattctgtgatgaacaattggcatcggaggttattggttttgttatttggaatttattcacgaagtgttttgagatgattggatttacaggtgaatcgcacgttctattatttcatgtgaccggtcaaaccgggcagtgtgtgccggtcagaccggcgtgtatcgcgcggt

SEQ ID NO: 28861 - DNA, 1530 bp, Oryza sativa
tcacatattgtgccgccccaaggaacaaggggattgggaattcatgatttagaaattaagaatatggctctaattagtaagtggttgttcaaattgctctccacggaaggggtttggcaacaattcatacgtaataagtatctaggtgataaacctctttctcaagctcagtagaaggccagggactcacacttttggtctagtctcatgaaggtgaaatgtgactttctccgttttggatcctttataattaaagatggctcccaaatcaggttttgggaagacaaatggttgggcaattcaaccttgaaagcacaatatccttgcctttacaacatagttaggcgtaagcaggctacagttgcacaagtcttcaaaaacaatcctccatctttttcatggagaagagaccttataggatcaaaactagtggcgtggaataatttattaccacgtgtaacactggttttcaattaactcaggaacaagatgagtttcattgggacttaacctcaaatggggagttctcggtgaagtctcattatctagctctaattcacagcatgttcctaacattaataagcgtctttgaaaattaaatatacccctaagagttaagatttttctttggtacttgcgtcgtggagtggtattaacaaaggacaatttgacaaaagaaaagggtgaatagccaaagtggtcctccaagtttcatgcaaggatcaatttagtccttaatgtttcaatctgtccatattagtccttcaagattttattttaattcaaacttatccttgaacccacataaccaacaactctcttgataaatgacacttataccccctcattcacatatataagagaaaaaaatgcatgctatgaattctttttatagatactgcatagcaatttatgtaaaacaaaaacaaattatgtacttgcaagtgtattcgatagccattaggcccaagtttatgtgcacatgttgaaataatgggaagtatacttacaatgttgcttattcattttggttttcttttttctagtgtatagtggtatacaaattaagggcaaaatggatattttctaatagaattgttgactagaaatagccatatggcacattaagtgggcccaaggatgattttaagccaaaacaaatacttagaggacctatgtggacaaaatgaaacctgaaggactaaattgagccttcggtgaaacttgagggactaaattaactattcatccaaagggaaatggcaaagcaataagaaccgttgtttttgttgcaatgatgagataattagacatcttttcttcgaacgtcgttttgcccattctgtttggtccatcatccaagtggcatctggacttcctccaccacattgtgtagcgcatatgtttgggagttggctcgatggaattcataataatttgaaagcacatgttctgttaggagcggttgctactatttggttgctttggctatacaggaataatgtggtttttgattaaaaaaatagtcat

SEQ ID NO: 28862 - DNA, 17286 bp, Oryza sativa
  unsure (1)..(17286): unsure at all n locations
gccaagccaggcctaagctcaacctgggcgttcggtttaaaccgacaattcggttcggtttattcggttgctataaaattcggtttacaggcttcaccacccgatcggttctccaaaaaactgaaaaccgcaaaattcggtttcggttttttaattttggttttcggttttagccgaattaaccaaaagttactaccaccagccacaacaatacagaattacataaaaatgaacacaagcaacagcatatatgatattatagatatatcaaatccttaagcaagcaataaccagcagcacagctgcatagaattacacaaagtagtcacacagtacacaaatcaacatgtctcaagagtacagttacatagattcaagagttcttcattattcaaatagagaaatataaagtcccaggtagcaccgtagcaggcacccaacaggcaacaacagcattgcatacaccaaaccaagtgtccaagactccaaatgatcactgatcaggactgaattactgagttgcagctggagtatcttccttggaaatagataggtcaccaagttctaaaataatagatgatctcagttagaacagtcaatagtgtatgaatcatgaagcacattagaatttggaaggaaataaaaattttctatgttaccttcctcaagcaaagccatttgttcgctgtcctcttcaacactaacatagtttcctccacgaagccaatcattagcacaaacaagacgctcaaccattcttggggttagtgaggtcctaaagtcatctagagttcgcccaccagcactgtaggctgattcaaaggcaactgtggtgataggaattgccaaaagatcacaggccaaatgagataatattgggaatcttgttgaattggccttccaccactttagaatgtcaaattttggtgtgtccggctcattatcttctgatagatacttgtctacctcagatttgatagttccacttccaccctcactgttaagttgctgagtaattactgacatccacctacaactcactcttttgctggtttcagctgtagattcagattcagtaggttgtggtgccttatcttttggggtatacatttccttgtactcttcaaacaaagcacgaaaataggtattcactgtttcccatactttttctcctactgtatccccaaacatcaccttaattcccattctaatgcaatttgatagtttgtatctaggatcaatagcaacacagaagaagacagtgaagttgagtagttgatcccccttatctttctctcctctcttctctctgtccccttgcctctcaccatacttctctccccaatacttgtagtacttcattagcattcttgtacccatttccttgctcaacttgtcttcactatgagaccattctctcaacagaagtaatacatcagcaatctcatggaaataagtgtgagatgttgtacgactttgtacagaaacacggagagtgaggtcataaaagtgttcaagaaaatcagccatcttcctagccttctcccaatctgctcttgttggtacccctggaccattctctccttctaattctaatttgtagtatgggtcttcatcactatatctttcaaatgctttttggtacttctctgcagcatttaacataagataggttgagttccatctagtgcaaatatctaagtttagaaatgctttgctctgtaccttggctaactcagcacatttcttaaattttaccaacctagatgttccacatctgataaacttaacagcagcacggacacgttgaattgatgtaccaatttccttcaagccatcacctactattaggttgataatatgagcagcacagcgcatatgaatgtactctccttcagcaacacaaccttttgactcattcaagacccttctcatatacttaattgcattattgtttgcactagcattgtctactgttattgtaaaaaccttgtcaatgccccactcagccaagcagttctctaatgattttccaatgtcctcccctctatgtcccttaaccaaaaaaaaaccaataattttcttctgtaggttccactcattgtcaatgaaatgggctgtaacacacatgaagttttggctgttcttagcagtccatgtatcagttgtgaggcaaactcttacacaattgtccttaaaaaatttcttaagcttttctttctcatcttcatatactttaacacaagctctagtgattgttcttctagatggcagaacaaatcgtggacatgctaaagtcataaatttcctaagaccagaacgctcagataggacaaatggttgttcatcttcaattatcatctcagcaaaacaccttctaagtttatctggatcaaatttccaagtggtcacagtaccaagagtactattgccatcacatggtgtcagttgcaaagttccttgattatcaactactggtttgttaggattctttttgcaaatctttagatgagctttcaaggatgacgtaccatttgttcttgagccgcaatgaaatagcttggtacaccacttgcacttggccctctcgtccccattagcaagtttgaccttgctgaaactttcccatacatcagatcttagagccattggttttctttttctggattcttcatcagctttctcttcatccttggactgctgctgctcctccttgtccttgcttgcatctaccactccagtagttgacactccggttttagtgtcttgagattgagtgtgattaatctcacaagcaacagtttcatctgtgtcccccatctagatcaaatgtttcaaatcactaaatcagaacttaccaacatagaacagcaatacaacactcattcactcaacatggactcaactagaacaaacgaacaagaagtgaagaacttacataggaggactgctcggtccgcgccgccgttgtcttggtcggagaactccacgagggtgttgccggcccgccgccagcagcccgtttgccggccgccgagttagggtttgggtctttgggcgcagggggcggtgtgctcgcgggcggctcgccggggcctacagctgctgctcaggggaggggagtgtggcgctgcggccgtgcggcgtgccgcctcgagcccgcgacggcgaggtagggcagcggcagcgctgcggcggcaccctgcgcggctggcggccgggctagcggctgcgccgagtgacgagtcgggggcgtgacgactgacgagtcgggggcgtggcgtagggttggccttgcccttgatggcctgatgggctgcgaactggtgggccgtgggctgcgctgccgcgggatatgtcggtttaatcggttgttcggttcggtttctctataaaaccgccgccgcgggatatgtcggtttaatcggttgttcggttcggtttctctataaaaccgaagctgaagccgtacaccgaatagcacaaaaacagaaaccgaactgacaaccgaaaaccgaaaaaaccaacaattcggtttggttcggtgcggttcggtttgcggtttgcggctaaaaaatgcccaggctgacctcaagctaccttagatccaaacgtcttcttactgtttcttttttttttttaccatacaacaattttgcaaactctaaatattcttccctctaaatattcttcccccaccatttcctttatccttgaccgctatctgtttgaaataaaatataaatatcaaaaaatgatgcaccatcaaaatactttgcatggtaaatataacaatacttatcaaaacatcattaaaaattcttactgctcaactagaaaatctcattggattaaaaaaaaagctaacgaataaagcatcagccattttgaatatatatatctttcgtttcaaatacgaactaaataattcctataaaaaacctgataatatttgtatgctatagaggatcgatgaatagtactaatgggatataaaatatccagcgtgccacgcgccattttctaatcataatgttagaacaagctcgaaattgttacaactcacatgcaaattaaatgccatcgactagtgaactttggtttagtgatcgtgctagtctgcaaattaagctgcatttttgttaatatctcgatggaaggatggcagccacgacgacagcaacgccgaacatgaggatggcgagaccggtgaagttgacgacgaacgcttcgctcggatagccgtggaaggggaagatgaagcgtgctatgccggtctcggcggtgcagatggccatgaggaagatgacgatgcccaacaaaatgtgccatggcgcgtagtcagccctcatcgtcatcaccgcccccgggaatacaaagtagacaaaacccaccagccactgcaaataattttagtcaccggatttagtgaaatacaaccgcctcaccatttcgcttaatacttattataagcggaaacagcttatcaacggtcaaaaaaattgtgaatttagtttaaaaaaattgtgaataaatcttttatatacgtgttattagtattttaaaaacagatgctgaaaaaaaaataaaccaatatgaaaaaaaacccttaaaatcaactctgaaaattgagtcataaaattcattgcctcaatcaatttgaaagtcctctggctcacctgaaaggcatagagtgctgcagtggttatcccaagccaagcatggagggagcggatgtcaggggcgcggagatcatggtggaacttgaaggcggcgtacaggccgacggcggcgaaggcgagggcgaccagatgcagcagcaggtgcaccgccttcttcacctcccttgaccccagcatgatcctgtacgccattatcgctgcgagcaaccatcatgaagtacttccatcactgcacagctaatcagtactactaaagctatttcttcacatatctcctctcgatcaatcacagccattttctttcatttactttgtcttctcaacgaatcacacacttcatctaattattctcatctactacctccgtcccaaaataattgcaattctatgttatttagcatatattaaggtttgaaagaaagactacggtgcccctcattaaatggtgtttatgtgagagtgggaagatggttgagggtaaaatagggagaaatttgaatgagatatgattgatggggcaattagtactctagaattacaattattttgggacgaattttgaatcctagaaatacaattattttgggatggaggtagtatttttttaattcccgtgccaacctcaaaaatactccctccttccaaaaggctaagtcctatttcttttttcaccaaaaccaagaagcaattaatttgtttctatgtgacaaaaccaatgagcatgcaatcaataagcactaaaatagcttcttgggtttctatcaacaatttaatttagcacataataactacaaataggacttagacttttggaaaaaatcaaataatgaaataggttttatacttttgacaaggagatagtaatgtatactcctactccctatgcccgtggattactagttcattagctgataataattaatttaccttctcccgtgcagatgacaaggccaatcaccatgaagagaggatgtgcctgaaaaaaagcacagcaacatataacgttggttgcttgtaattgattataattaattaagtaagctcaaggtttggtacaaacacaactacacaggtagattagacaatttgatttgacatcaccgtgtaaacgagctgaggggtagagctcctatgccaggaccaggagacgccaccccggaagtgcagcacccagacgagcgtgagcgtcagcacggcggcggccagcagctgcgcgaccaccaccaccggcagcgcggtgagccggaagctggcgctgctcttcaccggcatgactatgcctctctactcttcttccccgacccgccgcccgccggctgacacccacgtcgagctcgccgccggcaccaccaccaatcaccaccagcaaccacggagagatggcaatggcatacaaatgatacaatgctgcagtacacgggttataagggctttgttctggtgatgcaaccaaggagtgctcaagtaaataagaaccgggtcaatgcaatcgtaaatttatttgatagttttcaatcctgctaagctagctattggaggagatgaattagggtgcgacaaagccaaggaaaggatgataaaaccggaggaaaggtctaagttttggactgtttcggatttgtccggacggcagaggaaacagcttagattgaaatcatcccagctgggacagatttagctgaagttactacaaattgcccattcatcagggatgctggagtaaaaaacaagggacgttattatgattttatattcgtatcaacctgcgcgtcgccggcttgcttcaagcacatactaatagcttgtccgttcctgctggtccatatgttgtgttgttgtgttgtcggtccccctcgcaagcttgaaaagtacaccacaccgggaaggcaaatcaatccatcagctcaaatgcggccgtccgtctggactactttgcttgtcattgcaagaatttctgcttgtttgcgccgagcaggttcttctcatctccagccaaactgaaactgaaattggtccacaaccacctcaagccccacttctcttcttgtagtatgtacgtccaagacctgatgattataatccatgcttctggtgagaacagaaaatggataatgtaccaaaaccggttgcatttttttttgtttcaacattcaagtatatacagtataccaaaaggatataaacgcagccaagaatatgtatgaacataccaacatagccgtcctatcttgtcctatgtcctggcatcgaccttggtaaccactgcattcaccaatagacagttagacaccacaggccctgcacataccgcatcatcatgtacaggggaagggacagcaacaaacaacaccggcaagcaaaacttaagagcccaggaaaaatgctaaggtgagggctagtacaaaaaatgctgacctgggatctcagatgacaaccatagaaaccagcatccaggctgcttgcaaaatggaagagagaaccagcatcctcccaaacagcaggaattcagatatagaccaagcctgtaacagaatcacgaccgttcatcacagtttcacagcaactacacaagtaacaaacaaaaccagtactatatggctgacatacagcagacagaaacatcatgggcttaactctgcttcactggaaaggatcaaaactataacacagaccatcacacaagcactattaataccaagagaacacaaaatcacgaaaaacaaatacagcttaaaatatgctggggacatcttttgtgagcttacaatatatacacaagacagcattcgggaacccatgggcaacagaaccagaggcaaacatgacagctgaatcaaataatcaacttttctagatgcggattttgtatacagagggagcttatgtcatatgttacaaaagccctgcctatgttagcatactaatcctacaggacatatcaagcatgaatgttcgctgcagcagcaatcttgcaacaaaagcttgaaacctaacctgctctagagccagtgagagttgtttttctcccggcatgttttcaaaatgaaaatgcccatgcatgtatatctatgagatgataggttctgttaaagcatgctaaaaagcaagcattgcaatgtcaggcataatctgtccagctgacaccttgctcaattctggtcactagatatggaaatcctgtgatgtttcgaaacactgacgacatgaagcaactttgttccatgaggcacccatccaacaaaatgccatctctaggtacaggcacctgaggcttacaacccattgtcactagaggcttggtttcataatcaatcgtctggtgttgtgaataccaacaccttcccatcaccatcccatccaccggtagagccaagtgcacatcttctgaatagacgccaccttgtccatccaagactgtccagggctgcacagaccaagcaaatgtacagttacagcagtgcattctttacacttctcttcttgaaccattcgacgaattcggcctcctaggcattccaaaaggcaaattatctctagacctatcaccaggacgtcccagatcatccaaatttctgtaactgccatttctcggaacagagttagaacgttcatcctcatcaggcctcatgctaaccctggaatctggaagcatttccaaatgcctcggtcttggtccaccagtcctcatgttccttatgttatttgaagtgttccttcctggagtgttagagatcttcatggcaaggaagtccttgggaatggtatcaagatccataaaacatttcctggcctttgcatctgctatcagtaaagcccagtcctcagactgcataagagcaccggcattaccaacaacctggaacagcaaagattatcatcagtacccaaatcatagatctaaggtcatacaacatttttttgaacgaattttgaataaggggaagagacgtacccatagagctctcctagctctagtaagagcaacattcatacggcgtatatctgccacgaaacccacaccatgatttgaggcacggacacatgacataataatcacatcacgctcctgtccttgaaaagcatcaactgtgtttatgtaaatgtccttcccatcctcagaactcataacctcctcgaattcccgctgaagacatttcaactgcaacttatatggtgtgattataccaacagaagctttcttgccaccattagctctcaagaacttctgaagattctcatacaaacgcaaaacaaactgtgcttcatgaacattctggtacgaagatgacccacctctatgagattcacgaccatgtgagacgtcatagaatatgtaaggtgccattaatgcatctctataatatgcctcgncaggcaatttgacaacactttcactatctgtaaggcgcccttgatagaagtgtcttgatggaaattcacggatctggggatgcatccgatactgcaccgataacaaaatggtagggcaaccagacaactggaacctctcaaagagactcctgctgtacattaaagtcccagctgctttgctgataacagttgcagggagctgttgtggatcaccaaccaagacacacctagctgcaccgagcgaaagtggagggaggactgctacttcactagcctgagcagcttcatcaattaccaccatatcaaagccatgactaaggcgggaaaataacttgcgaccactgcttgaaactgttgtaaaaacaatttctgcttcattggcgaaacttgcttctagactagccctagcatcttccatattgaagttgctgccaacacggaacctgctttctaatatcagcaggcgtgacatctccaccaatactttatccctgctttctactgaagcagcaagtttctgaagtagaaaatcacgactacgatctctttgagcgagcacatcagggtctactccaactgaaccctgcgatctgccagccgctgcaaccatagtaagttccctttgtagaagggctatctcctgtgataattgctgctcacggcattttagctgttgcagccacccaatcacttcatcacggcccttcattaaaagctggtcagtccttcgctcaactgaaacagcttgagcagcacgagattgtgaatcaactccaacacgggcaacatcaggacgatagaccttcatttcaccatctataaaaccacgatcaagaacgcgagcaagcagctcatctgtggcggcgtttgatggagcacatacaagcatccgtggtttggggcaaagcttgggaagagtgcggaaaaggttctgatccatactctgtaaaacttcatcaatggaccctgcagcaacagtctccgagctgttgcttgtgttaccgctaacttgcttgtaactttcaggagcaagcttcttgagcagagcagcatagtaatgttgatactgaacaagatggataacatttagcatcccccataccgtatgggtttttcctgtcccaggcggcccttgcactaatgtgaaaggccagggttcttgtttcttcacagctccgttgcttgtgccagcagctgtatgcattgcagcccaatgaatcgctgatagctgaggcccgttgaaagtacgatgcagatgatcagcaaaatttggagtgaaacaatcaggcatagcaggtggctgctcttcatacttggggaagtgctctggacttggctgaagaatagcattttgcatctgatggaaagatttttgttaaaacaactggaaaagaatattaacaaagaaagcaaaatatataaaatgcattacctgaacattgagtctgcggaatgcatgcaaggcaacatattccctttgtgttgttgctagggaaccaagactagtcagataccaggtgctccgaggttggagtttcctcaaaacattggtctcactgcttcacattcaacacaatagagtgataagataattggaagtcaagtattcagaacaaaagcgtagacaatagaaaaaacattataatattatttgtccatcaagcaggaaatcctacaggtcataagcacatgaataataacaggtctttttgctacaggctaacaaatgtagtctagcaaatgtatagttaatctgagcatgttatgcatacatgggcaactgtttaatgcaactgtgagtgtaccagtgtagtgctcaccggctcacaaatgaagagttacttaagtgctggactgaactcactaattatctttacttttgggaatttggaaggaatgcatcatagaacatttcaacatagaaggcaatgacacaagttgtggctatgatcaaggatgacacgcatgcttggaccctggcaggagtctactggatacacaacaagcctcccatcgtttgccctacaacttataagccgcttttggagttgatttttgtggtttctttgttatagttatattccagcattggctttcaaattgctaagggcacatacataaaagttttaccctcaaatttccttttgttgttgataagccataaagcttataatcagcattagcccaaccaatggcagatctatactcatttaaagaactccgatggtggtggtggatggtgagtttgccaccacacaccaccattgccatataggacccctaaatactgagtaggtggactactctatagacagatgtacaaatacatattaaaaggcaacaacgtagcttgaaataattaatattgattacaatgggaattttttattatgacttttggggctttagagcgcatggtggggttctctagctaaattatgatgcaaagcacaggcatttacctagttttggtagatagacctgcttgtgtaggacttgcttgcttgtagtttgttccatctaatttcctacttcctccattatcaagtataaacatactttcctaagttgtttggcagagactaaaactaagtgttttacggtcgtacataacctagaacctgttgccttcaatcccgcttaaagaaaaaaatggcaggccttctgctatcccccccccccaaacccccaaaaaaaaaggactcgacagtgcatgcatgtaagcgttgcttattgtatcaaccaaaacaatctgtatgtcaagcaatgttatatattgagcattgcatgctctaggaatgccatgtctaccagaattgaacaaatcctaatcagcagataccagatatatgagcattcaagggacaacacaactctaaagagtacacattcagaataataaataggtttgcaatgaaaaaaaaggtagtagaattacaattttgccaaatactagcgtacctgctagaatcaaatgaatccccaagatagaagtgaatgattgccccaatgggatcgcgtgtatcaataggcgtatggcgtctgactgtaccaacaagccgtccacactctgactcagtgtcttcatttgaaccaacattccgcctattagatctacttgattgggaagctgacaacaaagaatagataaataacggttattaaaatatttccttttcagataaaaggaccatcagggcttaatacaaatgagaaaaatcaagcatagctacctgaaccaggcctaggaaaggacaaaactgcaacttcaccttctttgaaagtccatttatactcgtgcattggtagaacaacaacatcataccatcctgaaagcattgcacaagcattgacaggtgattgcattgcaaccaagacatgtttgtataatagcttcatggaaaatgacatcaacaaaacatgctggagatcagaacatacctctttcacgcctctccactgttttcacccgcaccataacatgtgcatcccttgatacagactcaagactctcctcataggaactatataactgagctcgacattcctcaaagagcaaaggctcgaaaactctaatgtactcctcagcggattcaaaacttttaggaacacattgaagttctgcctcctctgttcaggtaaaaaattacaaaacatgaaacacgcaattagaacatagacaatgtgattaagaacatatacagcttgttggaattttagaatgaaaacagaaacaggaaagattcatcagtcatgtataagattcgtatgagcccaacaaaaatatcagagaagaaagagttctactttgagcaaacttcgaacagccttaataacaaagcacaagtgctgagcattaccctattatttaaaaatttaaaacatgtatttatagaatttcccagtccttgtggcacatggtggcacttctagttaatagaagtcactaaaaacagggtaaaagcattcatcactagacagttccacaatttcaagcaattgtatgcattttcccatagaacatcttattgtttttcaaattgagaaatggacaacaaagaacaaacctggattgtgccagaacttgtcacttgtcacctcccgtataagtcgttcaacagaagtgtcttggtattgcatgttatttgctggagtttgttttttggaaacaagagacctcttgttgactggtttctgatctacagtattctgtcctgttacaaccgatctctgagaagaaatttgtctgccctttaactgtcttggcattggttgttgataaccatctgcaggggcttcttcagcattcattttctttggccggccttgagatcccgtctcagcatcaccattggattcagaaatttgatcgattggatctgcagaattacttcgttccgaaccaagcatttcagattgcctctgatccctgatggttggctgactttgtctttctgcagctctttcagcaataccaccaccactgcgaaaagcttccttcacagtacgtgtgacaattggtgctggaaaggatgactgtcttctgggtgttgatgtcttcattgtgccagcttgctttgcatcctcaacattaatgaacacagtttgcctggctctctttttacctagcattgcctctttgtgttcatccaacttaggtctctttgaagggttacttgcaaacttcaacgcataattggcttctacacctctaacatcctttgacttgttggacagatctgaatcatccccaagctgatttcctttgttttctaaatttttcgtgctctcaagtcctgtgggaccacgtaccactggatccttaggcacatccatcatttcggtgtcactgggctcagcggcggcctcatctttaatcatgttaccagatttgacagcagtaggttcactttcttgggaatcccttttcacttgtgtagttgcagtaccagccaactcttctttgttgctaacactactccctgcagtgtcagaagcaacatctgcatcagaccactctccttcctctctttccactgcatgagaaacctgattggaggacccaatcattttagcaacaccatcagagctatggttcattaacatagatgtagaggctatgctagcattcaaattatcttctgccttgattggctcctttgtaatttgtgaatctttgctcctcacaaaaggctgaaaacctgaaccggacggtgcgtgcttaaagacattattgtttaatatcccctgcgactgtgttacttcctgttgcggaaatatagagggccttgttgtggaaacagaaagggtcttttaaggttgtgacacaacaactgcggcttcttcttcttcagcttctgttgggagctcattaaggtcaaataacatccttccacgagaccccatgtcatgggtaaatgcatatagtttgaacctttggaaactattggactcgataacaatcttctggggtaacagaacctactttttgaaagctataattgaccttttgtagaaaatatctgcaaaaacaaccagcacaagataagtaatatacagaacgaacagggttctcaagggatgcttggatgcttcggtccgctagtgagatggctggcccacagaaggccaggagaactgaacaagtgaacaattagagcagagtccacatcgcatgatactgcaggaaaggaacatttcaatcaggtgaagtgacctgaaaatcattcttcgctggattccttttgtgctgtgaccctgcccactccgtcctcttgttgtccacttcctacccatctcaagaatttgggttctagcaatacaggatctcagcatccaggcagacccttttacagataaagtaaataagtatgcagaacatagctaagaacaaaagaatgatgacacattggtggaaatgtttgacatagctacttaagagtgcaagctaggctctagattcttcgttgtttctaaaggaaagcaatgtaaacaatagcaccagtactatagtgtccaacattaaggtttagaaaaggaagaagtaaattaaaataagaatgatgttggactttaacatgagctgcagcaatgtcaggcttgccgatattaacagagtactaaataaaagaaaaacacaattaaagcttgcataaaacagaggctacctaaataacaggaggagaaagagtgctcaactagtctagaaactttcactagcccaacccaatcctagatctaatccggcactagcaatctcctttgcaatcccttagtccaaccgtaactgtgttatgattgtgcatgcgacatttgccgaagaaataccctgccaaaaggactcatgacagaaaattatcaatgccatcaccaccaaactacaaaaccgtaactgtgttatgattgtgcatgcgacatttgccgaagaaataccctgccaaaaggacccatgacagaaaattatcaatgccatcaccaccaaactacaaaagagagtataaacctaaaagaccatcgagatctttgccaaatctaaacaactttgtcccacatgaacaaaaatacacactaaaaccgacaaataatcccttctacggaatttgccaaaacatcaaccgtgagtgacagcctactcccaatcaaaagataaataacccatagctactccaaactatagtcggaactaaaaaagaccacttatctacaaatgctctcccaatcagtgcaaatgctacattctacagctgcatcacaactattgagtttaaaattagaaacaaaagcagatattactgatctacttaactctgattggaagatattgagttctagctaccccaaattaaaagctaattacaacagaagaaacagcttctgctaaacatgccccataaccaaaggctacatctttttcagcagcaatgcaactcttgaaaaagagaaaaacagcttcggaatctatgtgacaaataatcccattatgcaacttcacaagatatagcaacaatctacagctgctcccataaagagctacctatgacatgagtaccttcgggtaaacacaaaccaacccctacacgatttcagacactaagacatttactaagtaacaaaaaaaacagggcagccagcatagcggcagataaagcaatagctttaaccttctagtggttgtgacctctccacaaaacctagcatgatgaatactacaacataccaggactattgaaacttggaaaatacaccactgtagtaataacttaaaatgcttgtttgatcaacctaagcagagaaactaagaaactctagacagcaatagcagcagcagctgatgacagcaaaagcaatgcagtgactaactctagtcaattgtcaagcactagaatttattacgaaaatttataacagagcattcaacagacgcgcagaacagcagcacatggaccattcgaactgaatcatcactcggcatttcattccactcgcaaaaacaaaaaggagaaaacgtactaccatccctttattaccacaactccatgacgcaattccccccgttgctctgctcgatctaccaagcacccccgtgtatttaaacccacccccagtcttaaatcagcaatctggtggaaatttttcgtaaagcgagggggatcgttaccaccccgcaaacagttactagattcggcaaccaccccctgagccccctgatccccatttcgtttctagattcggcaaaatctcctcgagagaagtttctcctcaataaaagccccaattcggcagggcaaaaatattaaaaaaaatcccccgccgcgtccagtccaatcaaatcaaaccaccaccacacatcacgcgctatctatctactatcaatcaataatctattagggttctatccgttcgccgttggtcgtcctagggttggttgggagcaggggaggcgtgaggggaagggggggatctccgtaccaggcgatcggcggcggcgcggccagatccggccctgtgcctcgtctcctcctcctcctcctcccgcggcggcgtcggcggctttgactagggtttcccaccgagcgctcctcctcctcctcgtgtgatgcggtgcggtgcgatgcgatgcgtttgattttttttttctcaagttttttttcttgccccccttttttggtctgggtggtggtgtgtgtctcctcctcgcctcctccacgagcgagcgagcggtcggtgagcgtga

SEQ ID NO: 28863 - DNA, 11511 bp, Oryza sativa
aattattgtcatcacaaagcttgtttatacaagagaaacagcagcaaagcgctagtgctattactgtagcaaggaacatgttatctgtctaaaacttcgatggcagactagcatttgagaaaatcatcagggcaaccgaaaacttctattataagcacatcgttggaataggacgtcatctattaaaaaacggagggagtatgtcataaaagaaaatggaaaatagtactctctccatctcagtttaatcatctcttaagtaaaaggcataaaaaccaaagacaccaaaatattatcattcttaaagtaattctaatcggttaaggtgctccatcactttgtgacccgtagattactcgtgctttaaatattgcatgtcattgcatcaatagaaattaattttgattggttgcatgcaacacatttaatgacatccatttactctctgtacaaataaatgaaaagacacctttttttagaaaatggattaaaatccggcatctacatccacaatggatgtaacgaaaagacacttgttaattataatcattttaggaagacctaaaaaaatcttagggcacgatcaaaatgggatggatggagtagtaatcagcgaaaaaattaaagcatatgacataagagtataagaaagaagtgcaattcttaaaaaaaagaaactaaaatgaaaaacgtaaggttaaaaatattgcgtcctcctcgtgtccctaaccgtgagcttgctggtaacactttgccacaactttagcaagcaactttgatcaaccaagtctaatgtttattttattgccatatgtttgctataccatatcttttggtttcacttgccataggcatgcatttttgcctaaacttgtctaacttacagctaataaggattagccacacaaattgtgacatgccctttttgataaacttaaacaatataataagagatatatatgcatcagtgatgcggtggtgcacgacttcacccatctagagtttaaatcctggtatacataaatattacgcacattcaggtaaaacttcgatgggattttaatgagattagggatgtgccgtcgtgctgatagtttctatctctttgagtgtgtgttatggacacatttgtaagatgtgtgaatgtgatgttgtatgtatagtggtgtgtacgcgtttgttatgtcataaaaaaaagaaatatatgtgccaaagtcaaactgtcagagcgtctagcatgggtatgtcatctgggatcttaccagattttagtttgatcaatattgtgttgagccgtccgtaccagccattcacttgcatgataaagtgttgaaagagaaggatattgcacttcctaaatagtagaaattaattactcgttaggttggaatgatctttgtttcgtttaagctactgctaatgagttattaaaaagtaaaaaaaataatttcagttataatttttatatctaagtacgttattaatattttaaaagctaataccgaataacagattaagatgaattctaaaatcattttaaaatttaaattttgattacggctaataaaaacttcctctatcctatataaactcaatctggatatcagagaaagttcttttaaggagaaagaagtagactctgttttcatcaggcagctagtactgttgcgtgatgatttgagatttccaaggagaaggaacatggacggtgaccgcactctcacgtatgattggaggcttgacagcaggtataatagaaggctataagccagctataaacatattttaaacagataaaggaagagagagaatagcagcgggctatagatctgtagccagctgcagcacggacttcaagacgtgatgtgtgcatgacaggtgagaccagatattaatagtatagtaagcactatttgatgaattgactattacattggctaaaaatgatttaaaactagtattgagctgtactattaaacttgctctgaccaccattctccatctttcagacgattccccattcgttggatgtgtgactatattgtttagatggattacactcaccatcgtattgcttcgttccataccatttgctgtgctttactttcatgcccatcaagcacgtttatgtgaggcggctgacacttttgttcatggaaaggtgctttctataatatagttggttgtgttaggaagatcgttacaaaaacgctgaagaggacgataaggtatagctggcaaaacattatgtctaaaataatgaagataaatatcttaatttgggatttagccaaatttcgctttttccattctactgtctacattcactgtactatggagtatcaatgtgtcaaagcattgatgagtgaggagatgagtttccacacaattaatatgtagtactagaaaaattgtagatctttaggactgaaaatgatgttgttgcgtgatatttcctccgggttgataatacttgtcgttttggaaaagggcacggtctctaaaaaaacaactttgaccattattttctattataatatgtaaaaaagtgttaacaaatatatgattttattaaagtacttttcaagactaatctatacatatagctaccatatttgaaagacaaatgttttaaaaataattcaaattcaaagattctaaagtttgaccccacccttgtctaaaacgacaagtattaccagcccggagggagtagtgtagaaactatttatgtaacacaacagctgattgttgtcctgaaaatcattttatcaccttagtttttttttttagaaaatcatttgtcatcttcaggatgggcctatccatgtaggccagtcatttttgtgagcggaatatgttcacaccgagttcgaaattcatccctgaatcacaaaaccggatacaacacatcgctcaacttacaaaaccatgcaaacgagatcccttagcagtattatcgtcggtattggttgacgtgacgcctatgtggctcctttgactatgtcctcttcccacgtggcatttgacgtgacgcttacgttgcaatttgatctggaaaaataataaaacccctgggaccaacatgccaatttcacacacaaaataataaaaaatattggggcccatgtgacccatacatgtcatcgttactactcccctcttctctttatcctctctctcatctcttctctctatcctctctctctagtagtaagctggttcatctcatagatgctctaatggcctcacttactgagacggcagagcggggcgggcggtggctggagtggcggtagatagagcatgctggcagagcagagtgaaccatcgtcgtcaaccgctgtcgcaccagccacagctgccgcgctcgccgacaacctcaagctcctcctctggacaccttcgctattgttgccccctccgccgcccaccccgcttcgacggccagagagagagaggatagagagaataggggagagaaagaggatagagagaagagggaagcagtgaggatgacacgtggggccacatggggcccactatttttattattttgtgtgtaactgacatgtgggttccacaggtttgattatttttccaggtcgaagcgccacgtcaatgtcatgtgggacaaacacttagtcaaaggagccacgtaggcgccatgtaagccaaaaccggggacaatactagtgagggatctcgtttgcgctggttttataagttggggatgtgttatattcgattttacggttcagggatgaatttcgaacttttgtgacaaatttgaggtaactaaagtgaacttattccgttgttaaagttggatcgcaggcccgagctgcaaaggtagttgggccagtattgatgggcataaaccacggcctttctttgctcaattttgttgctcgtggtttctctcaaattgcctagattttcatgcactgttggttaatggttacccaaattgtgctttgtagcctggattttattgaatttcatcctacttcgctttgcatccccttgtcctaagaaattaatttttaagacggagggagtaggtttaaaatgtgtctcgacgtcctactcactactacaaaaatggttttttctggcggccaaaatcagtctttgctgacggttatgctagccgcctgaaagcaaaggctagagaaaataaaagttttcacaaacggaacttaaccgctagccaaaacggattttcgctggcggctctattacatgggccggcagtgaaaacggattttcgctggcagttgtcttatgcgggccgctgacaatggtccattttcgctggcaatggttctcttctctgcatccagatccatcatacgacgcttgtacagctcttggtcaacatgcggttgcaggggacgccgatccatcaccacttttgcgtaggagcggtgatctcgcttcttctcctcaaccctccaaatctccctcgcactgtccccaaatcgatgaatatctgaggaggaagcagggaaccctagctccggatcgagacccctcccttttctcacccacagccagcggcttggagacattgaggctttcgggaaaaggtcatcgatatagaaacccaaaggctgggctgagaacgcgggacggcatgggtgtagcccaaccaaagcgttgggctcccaggcagcccaggattcccctccagggtcagggggacgcgaagcaggccgcgcagatgggggtatctcaccacgctttagggaaaatttcctccaattcgagcgcttttccttaggggaaaagtgttgaacaccttgcgcgcgcgcgctccaatgtcgccacgctgtggcgccctcgtgtcgccacgacaccactctcaccgctctcgccacgacacatttttcccttcaaataagtttttaccccagaaggtcgccatggaactggaactgcctggctgcttcaggggaagaaaaatactagtactccatcaacaaaacaaaggagggaaggggaaggagcgctccatcaccagaggaaaaaacttatttatcttttttatggctaaaatataatgtattttaagataacattttacacgtatatgtaatattattggaaggatgtgactatttttttttaaaaaaaatcgcgacattcttacctgaataagagatattccatctatcaaatctattttagcagtggtatctttttttttttttgcggggttagcagtggtatctttgactaaaaccactcgtgacaatgacataataatgtcccgctccccgaccagcgtcctcaccgccgacctctgcaacggcgaggtcgcgtcgctccgtcgccgccgttcccttctgccccgccggcgccgggggtggacccggatgcattcccccaaggacatcgtcgccaagaacacgctctgacgagatcgaggtgagtgggaactgggaaggccccctcccatggtgaaccccaactccatggtgctccaggccctcgcggcggcgaatcgaggaggaggccgagaagaatgaagaggaaggcagggccgccgcggcttcaccaccaatgcttcttcttcttcttggtcgtcgtcgtcgtcgtcttgtatgtatacagatacagctatacacataattttaggatcaaaagacgtacagctatatgtatttctgggggctaatttcagtgcagagtgaattaatgcgttgttgctaattggattgctagaatatgtgtagcagagtgaaagctagtgtgaattgagaccattgaacaaatggtttagagataataacttagctgctttctttgaattgccacatgttcagttcaatcacctaattttatctgaaaagaaatgttcgatcacccttgtctggatgaatagttactcttgtctttactttctagtgatattctatattgctacgaaagcactggttgtccttcattatgtttgtaagattgaattcgataacattttttgtcgtctattgcttctttagacaaagagggtatgtatgtcagtcagtcaaacaggttttccatggttgtaaatcctctcttacaaagttatagccactaattccttcccagaaattgaaactatgatcatggcataagcagtgtagggtgatcttaacataaccagtagcatactatgcgcatcatgaatgtcagaaacaggaacataccagtaatgcgataacatgctagaggcatcatgtagaacaggaacaagaacatagcgcacacagtatagcgctaacaatgggaacaggagtagcgctaacagcagtagaaggagaagattataccccgagaatggccctccgctggatggtgaggcagaattgcctccgttgttgtagtcgttcatggcacctcctcctggcgcaccagctctggatccagctcctgtcggcggcgcagctcctgtcggcggcggcgcaccacctccgccaatagcggcggcagcaactccagacatggcgatgagcagtcgtgcaggaggcactccccaaaaacctgatcacccgcctacccgatgcagatctcaggcgaaggtgtggtttcggaggcactacttcttccaatctctcgtgcgcgcaagagatcagaagcggggaagcgagagcaactcaggcgcggagaaggagaaactaacaccgggaaagaagcgaggaactcggatcggactcgcggcctccttatctatcaggagaaagaacgtggacgcgctgttgcggagggaatcgtgggaacgtgggttagtggctgcaaaaggatagcgacgtgacgtgacgcacgcacgccggccagcctcgcccacggccacggccacggccacgcccggcccggcgcgcgcgcgcgcgcgcgtgtggcattccgacccccacctcaactggtcaacagggagcctctaataactccctatttaggttgagatatttctcgcttaaatccagaggtggtattattatcctcaacatttattatgggcctttgagatttaatattataagttgggcctagcccaattattctaacaatccccaccaaatttcaaggctcataagaaatgttctcaaggctgtgcctgtttgatataccagggttttggtggagactgttaagttaaacttccacctaggaaatgagctacatcagaccacaactgaacaatggactatgccttgaattgtcagttttgtgtgatcaggtttcactcagacccttgactggtactgggctgccgttcgcatcccctctgtttggagcatataagtcaaactccaggcctttcatgagtatctagagattgcccaaacctcatagactgtgactagcagtcgaactcatataggtgtgttccttctgagatgttctgcaggtcaacatctctgcttggaaaaaccactcggatcacattaagacataagccatcctaccatgcaggaaagaagagaagcacatcatgaaaatgagcccctttcaagggtcttttctctcagtcacacaataatttgtttcaccatccaaattcacgggatctccgatcacaatggacaggtttccactattatgcaaccttaggtgggtatcaagcccatttccctcgatgcactgtctatcacattacgtggtagccccttggtaaactgatctgccagatttctagccgtttggacatagtccaatgctatcactccggagtttttctgctttctgacagatttcagtcttctcttgatgtgtctagatgacttcatgttgtcctttgaactgttcactttaataatcactgtttgattatcgcagttcattaggatagctggcactggtttttcaaccaccggcaaatccatcaggagttcacgaagccactcagcctcaactgtcgcagtatctagtgctgtaagttctgcttccattgttgacctcgttaagatggtctgcttgcaagacttccaggaaacagcgccacctccaagtgtgaacgcatatccacttgtggcttttatctcatcagcatcagatatccagtttgagtcactatacccttctagtacttttggatacccggtatagtgaattccatagctcatagtgccctttagatagcgcattactctttccagagcctgccaatgatcatctcccggatttgagacaaaccggctcagcttgcttacagcaaatgagatgccaggcctcgttgcgctagccaagtacatcaatgaaccaatgatttgagagtatctcagttgatcccttcctattcttcggtttttccttaatagcacgctgggatcataaggagtaggagctggcttacagtcactatatccaaagcgactcaaaaccttgtccacatagtgggattgcacaagtgtaatcccatcctcatctcctctttgtagtttgatgttaagaataacatcagcctctcccaaatccttcatttcaaaactcttggacagatagtctttgacctcctcaatcacattaaggctggtcccaaagatcagtatgtcatcgacatacaagcataagatcaccccttctcccccaccatagcgatagtatacacatttgtcagcttcgttcacaacaaagcctgcagatgtaagcgtggtgtcaaacttctcatgccattgcttaggtgcttgcttgaggccatacaaggatttcaatagtttacacaccattccctcctgaccttctagtacatacccgtctggttgatccatatagatctcctcctccagctctccgtttaggaaagctgtcttaacgtccatctgatggacgagaagaccatgagaggctgccagagcaagtagtactcgaatcgtagtcaagcgagcaactggtgaatatgtgtcgaataaatcctcgccttccttttgggtataacccttggccacaagccttgccttatacttttcgattgtaccatcaggcctaagctttttcttgaaaacccatttgcatcctacgggcttacatccatatggacgctcaacgacttcccaagtaccattagacataatcgagtccatttcactgcgtactggtttccttccagtagtcagcgtcaggagatgaatatgcctcttctatggttcttggggtgtcatccacaaggtatacaatgtagtcatctccaaaggattttgcaaccctttgtctcttactcttgcgagtatctacaatgttgtcctcctcaggattttcctcaggcgtttgatcattgtgttctatcggtgcaaagtgctcatggggcatgacagtttctttactagaagtgttaggtgtatatttcataggaaattcattctcaaagaaagtagcatctctggactcaaaaattgtaccagcatgcatgtcgggtactccagagtttactattaagaatctataacccacactgtggatagcataaccaagaaacacacaatcaacagtttttggtccaagtttccgctttttgactataggtacatttaccttggccaaacagccccatgttcgtaggtatgagagatttaatttcttcctttcccattcctcgaatggtgttacttccttgtgcttcattggaattttattcaggacatgacacgcagtcagaactgcctcaccccaccattccttggaaagccccgcagtgtctaacatggcattcaccatctcagttagagtacggttctttctttcggccaccccatttgattggggtgaatagggaggcgtcatctcatgaataattccaaactcttcgcaaaaggatgcaaactcattggaaaaatactccccacctctatcagacctcaaccgtttgattttcctttcaagttggttttctacctcagctttatagattttaaagtaatgcaatgcctcatcctttgttttcaatagatacacatagcaaaatctagtgcaatcatctatcagtgtcatgaaatatttctttccccctttagtcaacacgccgttcatttcgcacaaatcggaatgaacaagttctagaggtgccaaattcctcgcctcagatgccttgtgaggcttgcgaggttgtttcgattgaacacaagtatggcacttggaacctttgaccaaagtgaattttggaattaaactcatgttagctaagcgcatcatacaaccgaaattcacatgacagagtcgcgaatgccacacattagactcatcattctcgctaatatggttcacagcgttatgattattacacatgtcattcaaagaaaagcggaacaagcctccgctgtcataaccttttccaacaaaagtcccatatttagatacgacacatttattggactcaaacacaagtctaaaaccttctctacacaatagagagccgctaactagattcttctttattgaagggacatgctgcacgttcttcagctgcacggtctttcccgaagtaaacttcagatcgaccgtaccaacaccatgaacagccgcaagcgacccgtttcccatcaacaaggaggaacctctcccgacctgataagaagaaaacagagaaatgtcagcacatacatgaatattagcaccagtatccacccaccaatcaggtgaatgaaaaacagagagaactgtaggtaatattttaccgtaccccgatgttcctccgccctcgctaatgatcatgttggcagacttcctgtctttgcgctcagaacagtccttggcccaatgcccagacttgccacacacaaagcagtctccctttgcctttcttcttaaaattggttgcagccttgggtttgacatcaggcttgactttcttgttgttgtgggatgcatgagggttcttcttctgtaccatattggcactagaacctccctcaacctttttgccccggacgtcctttgccctcgccttctcctcaacacccaaagagccaatgagatcaggaacactgaactcttgtctcttgtgctttagagaagtggcaaagtccgaccaagaaggtggtagtttggcaataatgccacccgccacaaacttgtccggcaactcacagttgttgttctcaagtttcttagccagcatctgaatctcatgagcttgttctactacagaacggtcatcgaccatcttgtagtcatagaactgctccatgacatacagctcactgccggcgtcagaaactccgaacttggcctcaagtgcatcccacatgtccttcccagaaggcatgtgcatgtacacgtccactatgttgtcagcgagtacactgatcaatgctccacggaacaggcaatccgaagcctcgaacttagcctcttcctcaggagaaagaggtggtttacttcgtttaccccgtgaaacatagaagcactgcatcgctgtcaaccacaatagtgcacgtgctttccatctcttatagtttgaaccatcaaaagcatgtggtttcagtgcagcagcaaagccaactaccgaaaatgacctatcaggtttttgga

SEQ ID NO: 28864 - DNA, 3758 bp, Oryza sativa
tcattgtttaagatatcttacacattatttttacttattattatcatagtaaactcccgcagcaaagcgtaaggtttcatctagttgtgtaaatgttcaggtgttacgatgtcccagcaatgacttcttaagcctatagtgccatggagcaactatcgtgtgtaaatcctacaattatgaggtaatttatttcccatgaatttagtttagtttttttaatgaaaagaatggtttagttttgagcatatgaaaaagatagggccttcacctcagtaatctgcattgctaagaaacaaagcagtgtagtggatttaaaagtatggtatgagaagacaacgaaaatgaacggtgcttgtcggaatgagtcacaaattgagtactgtacaatagtcactgaatcgttcattttaccttttgactgttgtagcataacataagtcatctaattctttaccttgacttttgtgcaaacatagtcaattttggacatatttgccaatttaaaatagagttcatgcaagtatttattcagtgctgttatgaatgggctttgttggtactgcaatatatgattttgaatttactaaaactttgatactacttatgagaatgaattgggaaagtaatccttaatacctagttgcttatgaatcccatagctcatccaatataactcgactgcaatttttggatagaaaactagaagtctgataatcaattagtgtctggtagacctcctgcattgttggtcttgcttgcggagaagctttcaagcaagaaaacaccaccttaatgagggaaactatgttttcttcttctgtcgttgttggtgctaaaggtcgtgaatccaggatttccttgattgttatattgtgatcccttgatgaagtcagatgctgcaataaatctcttgggtgcttcccaatcactacctctagcataaccatgccgaaactatacacatcacatttctctgtcaccaaagatgtataggacagctctacacaaggagagaacacatattagtaatcaatgattagatatcaaagctttttgtataagaaagtatataccaggagctatgtagccatatgtaccagctagcgcactccaattagatgaatcaggtctcaaaatcctcgctgtaccaaaatctgagacataagccttcaaagttgtatcaagtaagatgttgttgctggttatatctcgatgaaatattggtggattgcagtcgcggtgcagataacatagtgcttgagctacatcctttataagaatattcctcttttgccaatctaatgccttagctaactcatcatcagctaaggtcatatggaggcttccctgctctatgtattcatagacaagaaacctgtactctggatgggagcagaattcatacagtttgacaatgctacgttgtcggatttctgttaagatgtacatttcacatgaaaatcttttttgatcacccaaccattattaagacgtgtgaagctgcttcacagcaactacctgcccgtcctggagttgtgctcgatagaccttgccataacctcccgctccaatgatgtacttgtcatcgaaatcttctgttgccctgacaatatcctcaaatgctaatcttccatcaaaattccaaacagagaacatgtcccttcctttggctgtagtactttcttgtggttttctcttgctatgaataaacaccgttccgagaacaactgtagcaagaatggcaaaacccagaacaagaacaaccggcaacagaaaacgaaatagctttcttttgttgtgaccaggtgctgagtaacaagacggcaggccagagagattaccgcatagacctttattgttgagaaaccagcttgctgaagcattttgaaatagtcgccctgctggtagtggtccttctaagttattgtatgacgcatcaagtgttgataggctcaccatgcttgcaaaggaagtcggaattcttccagtgaactggttgtgagataaatttagaaataccagcatctgcatccttccaaagtcttgcggcaacaaaccatcaagtttgttattgctaacatctagcatgatttgtatgcttgctaaatttccaattgtggcaggcaaattcccactgaagtggttgttgttgatcctcagtaactgtagtttggtgcatctcccaagttcctcaggtattggtccactcaaactatttctggaaacatcaaggtattctaaatctctcaggtttcccaactgcgaaggtatggatcctgataacttattgaacgacaaattcagactatatagatttattaaattccctatttctggtggaatcacaccatttacatgattagaactgagttttagttcaactaggttgggcaatttagacagagctggaggtattgtgcctgtgatcatattttctgctatatttagaatagctaattctggacaagcaccccactttggtgaaatctgcccagagagcctattggacatcaagctcatctttttgagttttggatacacaccaaaatgtttggatatatctcccgttaactggttgccatcaaggaaaagtcgaaccaacgatgtgcacgtcttcaagctcctcggaacagggccattgaacatatttaaagacagaaataaaagtttgaggcttgtgccagcacatatatttgctggcaactgccctgaaagggagttacttgctaggtctagctcaaccatgtttgtgatatttccaaattcctgaggaagagaattcgacaattggttactacgaaaattcagattttgcatgttttgaaagttccctaaagatttcggtattgagccggaaatttgattctcttccaaagacaaaagttgaaggttcactaggttgccgaactcctgggggatagagccatttatctgatttttactgaggtccagtgcaattagcttggtaaggttcgctaaggtgccaggtatagagccagagatttgattgctgtgcaggattaagttctggagatttgatatgatccctagtcctgggggtattgaaccagtaatttggttttcatggaggaaaagattgttcagcatagtgaggttgcctagttctgtgggtaaggaaccttttaatttattttcattgagaacaagatcggtgagcatggcgagattgcctatttcagggggaatggaaccaattatttggtttctaaagagatagagtttgatcatcttagtgagattgcctatacatgtggggatttcaccagtaagtttgttatcaccaagagcaagatattgcaagttggtcagcttgcagagttttggtggtacaggccctgacagttcattaccatctagatagaaagtatctaggttggtcagatttgctagagttgttggtatctcgccgctcaacgtgttgttgctcagctgcaaaagctgcaggttggcaagcattcctatctcctttgggatgggaccagagaccatatttcggtgaatggagagctcggtgatcatcgtcaggttacccacggatgcagggatgtggcctgtgaggttgttgtacgaaagatcaagcatggtgagcctctgaagctcactgatctcatccggcattcttcctgtgagctggttgagttgaaggtcaaggtaggtgagtgctgatagagagctgatacttgagggtattgggccatagacactgttgctgctgagatcaatatatgtgaggaagg

SEQ ID NO: 28865 - DNA, 2351 bp, Oryza sativa
tgcagtattcgacgtcagttcctcaaaatggtcctgttaggtgttcactaatctcagttatactgattgctggacttcaccctactgtacaactcatcaagtgacttacctgatgttcacccttagattttcatataccttactgttctttacaaaatctaattgcagtccgagtgagcaactgggcaagtactgagaaccccaagtgacatttagaagatctattcattcatatgaaatgtcactgcttagtagattcttctacaagaggcctcctgatggattactggagtttattgatagggtctatggtgagcctccaaattttgtaacacggtcacattgtccttttacgtgccatttgaactgattttgctctttgttacattgcacagtttttgattcatgcttctgcacagaagtcttgccacatggcatgtacccagtctatttgactggtattcttacagatttgcatgaagaacatagccagtcttcatttctgggtattaattttagagacggggataagagaagccaactcgctgatgtcctgcgtgaatacaatgttccagtaattgactaccctcgtcattttgaaggctgccctgtgcttcctttatctcttatccagcatttccttcgtgtctgtgaacactggttatccaccggaaataatcaaaatatcatactgctacattgtgagaggggaggctggccatcattagcatttatgttatcgtgtctccttattttcaagaaactgcagagtgcagagcataaaactctggaccttatttaccgtgaggcacctaaagggtttttgcagctcttttctgccctcaacccaatgccctctcagctcagatacctgcagtatgtagctagaagaaatatatctccagagtggcctccaatggagcgggcactctcctttgactgcctgattcttcgagccattccaagtttcgattccgataatggatgcaggccattagtccgaatatttgggcgaaatattattggcaagaacgctagtacgagcaacatgattttttcaatgcctaagaagaagactttgcgccactatcggcaggtatgtgctagagttaatttagcattgccatctacttgctttgtgtcacttttttttgcattaatctgcaaggttattatgcaggaggattgtgacgtgataaaaatagatatacaatgtccagtccaaggagatgttgttctggagtgtgtacatcttgatcttgatccagaaaaggaagttatgatgttccggataatgttcaacactgcttttattcgttcgaatgtactaatgctgaacagcgacgatatagatatagtatggggttcaaaggatcagtacccaagaaattttagagcagaggtatgagcattgcacatactctttgtaacttcaagatacaaattaataattgaacctaatttggaagtgcagatgctgttttgtgagcttgggggcatatctcctgcaagacctccaacagcaacattgaatggtgatatgaaaggaggtttaccaattgaagccttttcagctgttcaagaactcttcaatggagttgactggatggaaagcagtgacaatgctgccttttggttgctcaaggagttctcagcaaattccctccaagagaaatttcaaaagctaatactcagtgatatggaagagctttcaaagtttcaagctaaagttggtctccaaataccgctaatgtctcctctggattctgatgaagaaaagtattcagtggcttctgattcggtttcttcatctgagcatgagaaggttcagcctggtggcaactcatctgactcggagaacattaatcatgatcttaccactgaagatactgcatccatgggtatagcatttgccataagcattgtgttatgcaactttatattgctatatacctgttgctatatattccctctggaagaatatgccttgtgttgctaaacctgttgtttccatgctatcgattcccccaaaatcacttccgtttcctcccaattctgttctttttgttgctatctgtttaaattcttattcacaacccttaaaattttgcaggcaatgtcttggtgaacactccatctgtcctacctcccacgacaccacctccttgtggtagcttatctatcctttccactgatgaaaatcagctgcccccagaagtacagcatgagtcaccaagtgacaggaagctaccatctccatcaccaacagctgctgcaccggcgacggcaccaccggcaccaccgtcttcaagtggaaacaaacctgccttttcccaccaccaccaccaccg

SEQ ID NO: 28866 - DNA, 3348 bp, Oryza sativa
cttttaagattacattttcaacacaggtctgttgaccctcctctctcccctggtcatgttatcttcctctctgtaagtttcatgttgtgactgagaatcctcccttttgacaggtagaagagctgagaactaacctaaccaccataaatgatgcaacaaaagaggtcagtgttacatcctgcaaaatttcaagttatgacttttccttctggctggcttattcagttattgatcactttgtgcaggtgaaagagtctctgaagttaaggcagataatgcagaccattcttacattagggaatgcattgaaccaaggaacagctcgaggtatcaaatagttgaagaaaaattatggaataatttcttcgatggtctttttaatgtgctgattggttgaacaggatctgcggttggcttcagattagacagtcttcttaaattatcagatactcgagctagaaacaacaagatgacactaatgcattatttatgcaaggtatgcacttggcagtgaggaagtgctattaacatatactgttgtgtgctgaagtttctcagtttttggtgtggagaatacctcaaaataattcaaagttggttagactttaatagtttctggtgaattgtgccacttgttatgcattcaaatatggtatgcatgatagtcataattttgttgttaatctctgcagttcgaataatttattcttgtacaaatttgagtttggcaccagtcgtgtcacataacttcctgtggtcaaaattattttgttacatattatctcggtctactgtaaaatattttaagatgatttagctatagatttgacaaagctcatatggatcaagtcatcaagcaattctggatttgtactattattttatatgaaagtatgcatgctcctggtctcctggggatacgtgagcgtgtagttaatgcattattaggcctcacaattggataattagttacaatactcgcttggttcccttaacaattgggtaccaggttaccatttttcagaaaaaaaaaactcacttgctatttgtgccacaaaggtttcgaagagctcttgtaggatacccccaattgttctcctagttggtaagaggactataaatctcagatgtagtttgattaagtatgtctcatgcttaatctaaactagaaacaaaaacatgagtctgggccatcaactggatggatgattcagatttcagagcataatttccttctatcctcttacagtggagggctgaaaattgagttggatcattaccccacataagcactagtatgcgaacaacaccaacttaaaagcaccggaggcaatttctttgcttaccctgtgcattgctcaattcaattatatcagaaaagacgtgttttacacttgtgcagttactactattacccatagactatatctactggctcccaaaccttttgaaaaggaacaaattttaattgtattatttacacttgggtagtacttgtgaaaagtggaattttgatcaattaataaaaaactacaaaagcatgaaactgagttttaagttttagattcagattctagttcgtttgatagatttgcatgttgcatatttccaactttgtcattaatggaaattatacaattttatatgcatgccagcatgtgttcataattgaaatgcatgcccctcaatccatgtaataagccatcccaagtaaaagtaatgtaattaattctttctatgtatgccatttcgatgaataggaaagtttgtttcttgtttcatgcttccattcctttcaaggaagctttggacgtattaacaacaatgtttttttttccgccgggaaggccgaaggaggccatccggatatattaagaaggaaaaaagtaacaacaatgtttttggtccttttcttttcattatcccatctaaatatgaacttatagaatattttcctttcaaaaaggtcaaagatgacctattacctcttaatgtgtaataggacacctatactagccaatagccatttgatcaagaattcaaaagaatcggcatccatcaaagtggagtaccatacggaaatattcagtggtaggctgttttccactaacaaacagagacactgagacagtgaaagcgtggtttatagaattttgggtgcatttgtctgacattgcaagttactgatttcaaacaagttaatgtgagtctaattgacgttattcaatcatcttgaaaagtcagttttctggggaagtccataacatcatggactcatggtatctttgcaacttgcaaggaccaacctggtttcctttttccatacactggcgctatttacacggacaacttttaagtgaactttcaaaatagttttccagtatagctattgctattcattcttttaacttttggtatgccattatagtgtagtacacacatacactggctgataaaggttcagttttagttctgcattttactctgcaagttcataaaagagtacctatcgtttaatccgttgcgtactataaagacttttgaactactattcagtcagttgccttgttgttagtattgtttgtttacacagtttagctaatttctttctatttctgttatatgctagcttctttctgagaaattgcctgagcttcttgattttgacaaagatttaattcatttggaagctgcttctaaggtactaaatctttactgattattatcttgaatattgcaatcctcgatgactattgagctgctaatcaaaatgttgctccataactgcatttattatttccctcagatccagctaaagttgcttgcggaagaaatgcaagcaataaacaaaggtctagagaaggttgagcaagaattagctgcttcagtgaatgacggtgcaatttctgttggtttccgtgaggtagaaaaattcccccttttgtctgagaaatattaatcatatttataaccagtccattgtatggaggagttgtaggttactcatttttgccaagaacactaaataaggtctgtaggttactcattaattccaagaaacactaaataacttgacactgttatttaaagtgattaagttagttgtccccaaatgatttgcaatttgatatattacagatattagtatacgttcatacaaactgcttttagtaatgtagtatacgttcatacaaactgcttttgcatgcctcctttgttaaagaatggcctgagtctgacatgcagtatgtttgatgagaatttgtgtcatgtgtgcgcgaaacaaatgaaatactacatccgtttcaggttataagactttctagcattgcccacattcatatagat

SEQ ID NO: 28867 - DNA, 5432 bp, Oryza sativa
tatatgaatgtgggcaatgctagaaagtcttaaaatatgaaacggaggaagtacccttttaggattgaatcaagataaactgcttttgcaggcattgaaaagctttcttgatgcagcagaggctgaggttaggtccctaatttccttgtactcggaagtggtgagtccctactgtatttttttttacaaagttatttgtgtttggaaagatcctgacaacattaattttgtagggaagaaacgctgattcactagctcagtattttggcgaggatccagcacgatgcccttttgagcaaggtatagtcttttttgttttggtacttcacattttactagtcattatcttatctcacaaatagttgcacattttatccacatcaccacatattactgaccgatcatcatccaatgtacaaaaatgcaatgattctcatcaaagatcaaaatttaaaattccagaccgaaaattctcgcgcatggttaaaaatggaagatgggttatctatgaactgcatcatcgtgcttctgtgaatgtgattagcattaatttatttatcagcacagctttatttactatggttgttttttttttcagtgacatcaattctggttatatttgtgaatatgttcaaaaaatcacgtgatgaaaatgctcgaactgcggaacttgagaaaaagaaattagaaaaggacaaggaaaaggcaactttgtctgcaaagaaagtcttggaatgatactactgctacactgaagttccatctttgcgaagtagagccatgatccagcaccagccatggcggagatgccaaattgtgtattgtaaacgagaacctgcttctgcttttagtggacatgcagggctgtaatgcctggaagctgccttgttggatgggtgcgatccacgaaatggtagtatcttaactccttccgtggtatataagatgttttatagtcttggctagctattgaatgattgcagcctgcattagtccttatcaatatcaatttgtgtacacaagatgttctatccaccaaatatacacaagcctgttagtattccgtatttcaaagtcatgttggaatgcatttctaatgtggtcattttcctccttgcagggtgtcatttggattgcaaccttggaaagttctgtgattaccaataggcggcattggcgatatggctgagcgaagtgcagcgagaagtgctgctgctgacagttttggtgtaaatacagtagttactaggatatagttgtattacctgtacatagaatatgcagcccaagtgggaggaaagcaattaagcaaacaacagtagtgttgtataatcaagaacaatcatgtttcccttcgtcacaggtgttaattcgtggctcgccaatttctcttgtgctttgcattttgctcctttctaatgcattggttactcaagtaaacagccatgataacaccagaatgcgcgtattgaacttgggtggacaagcaatcaagctatcttacgtactagcactgagaatttgggatgtacttctcgatgatttgttgatctcattttgtcgaacggatctactccctccgctcttcttgttgaatggaactaaccaacgtcaaacatttcagagggagtacatatattttcttctgcaagtttgtgatgaagacataagcgcgtaacactatacagaaaaacccatcttgagtttgatttagtattttgcaatttgtcaaactacggtgaaaggtttatgtaggaagcagatgatattttttagaaatggattaaaatccgacctctacatccaaactttgtggaattctgcccaacaagcagtaaccattctactgatgtagaagctacaaagttagtacacaatagttgcccttaatcaccacataacaagccgcctaggtgtacaattgagcattatcatgaaatatgaaccagtacattaattcctattttgaatatgatcgtcttctcccgctgattctttcaccgtatttctgatacatatctaactataattgaacaagtttgtcatggtcagcaatgaacactacaggaaagtacaataagctcagggatttcattgaaacctccgttccacagagactttgggggttgttcggttgactgactgcagtggctgtcgtggtgatgttacgtttgttactgtagctgctttgcttctttgcagggcatatctagtcctatcaaataacccctttattttttatttttaactttcttcattttccaataaaaaaggagaaagtttaagaaagtagaggacagatactgaaagttataaaaaggagaaaacaaatgaattaaagtttaaaaaaagtggagggcttatcttttagctttatattggtacatgtgagacagaaaagtaataaaatcttcttaagacagtaactacatatgttcgatacttcatcttagttgattatactccctctgtttcgagtcaaatttcttaattatgaagaaaattatattaaatgcggcatcatttccaacacaaagtaaatatactattaaatatattatggatattatgggactaatgagccctgtttttttagaaaataatgagccgttgtggggattgtggattggtggcctcttcttcccctccgccggcggcaatcggcgaagacggtgatgtcggaggttccaaggccgcaggcgcgcgtgccatatatcttcacgaccatctctttaaattctccttctgatagcctacacttgaatcgatcgatcattcatatctgtcgattgagaaaagttcattcaagtgaagattattcatatcgatcaatcggtttctgtttatgataaatcatacaactcctgcattgcaaaaagaccaaggatgaggtgatgcaaaagatctagatctccaggatgcgtgcttcctcatgacgacctctaaccaaatgcattggttacttaggtggatgcaagggaaggattagaatcaaacctattaagcatttgattgatgcgtttgcagtacactgaactctgaatactcaatacttaatacgctaaaatgtcttcctcgcgctaaggcaacttactgaaactgaaataagtgtttgataacaaatcaaactgcagcttttcagctttaagcagacacactaatatatattttacaagaaaccgcaagcatatttatacatctatgtatttcttagttgttctagtgtaacttcattgaaacgtatagggcatgagctagaggaatgctgctgaatgagagtctggtatgcctccatcattgttggccttgcatgaggagaagcttccaggcaagaaatggccaccttgatgagaatttctatgctttcctcttctgctgttgtgggtgctgtaggccgttcatccaatatttctttgaccaatgtatgttgctgttctgatgacaaaagagtttgcaacaattccataggatgcttccccattaccacctctagaacaacaacaccaaagctataaacatcacatttctctgtcacgacacatgtgaaggacagttctgcaccaagaaaagaacagacaagaatgaaataagtaataatcattgagaaaactgcactttaggtattactcaaattttacagaacataccaggagctatgtagccatatgtccccgctaatgcactccagtttgatgaatccggcttcaaaatccttgccgtgccaaaatccgagacataagccttgaaagctgtatcaagtaggatgttgttacttgtgatatctcgatgtattatgggtggactgcagtcatggtgcaaataagatagagcttgagccacatcttttacaagagtaactctcttagaccaatccagttcttttgctagctcctcattttttaaggtcatatagaggcttccccgttgaatgtagtcatagacaagaaagttgtagttcggatggaagcagaatccatacagtttgacattgcttctatgacggatttgtgacaagacttaaagtcttgtttcatcatttaactcttcttcaactggatgaagcttctcgacaatgactacattcccgtcttggagtcgtgctttgtagaccttgccagatcctcctattccaacgatgtgcttatcattgaagttttcggttgccctgatgatatcctcaaatgctagtctgccatcgaagttctagacagaaaacatgttccttgcaacagtaatagcactagcgctttgctgttgttttctcttgttatgaacaagctttgtgatgacaataattgtagccagaatgacaatgaccacaacaagaacaattggcagtagcaaacttagtagctttggcttatggtgaccagatgctataactgaataacaagttggcaggccagagagattaccacacaaacctttattgtgaataaaccagcttattgatgcattttgaagtagatgtcctgcagggagaggtccttccaagttgttgtaggacacatcaagaactgttaagctcaacatgctagcgatggatgatggaagacttcctctgaactggttgtgagacaaattaagaatctctaacatctgcaaggttccaagttgttgtggcaacaaaccatcgagtttgttgttactagcatccaatatgatttgcaggcctttcaaatttccaattgtgcctggcaaattcccatgtatattgttattgttaatcttcaaagattctaacctgatgcagtcccctagttcatcaggtattggtccactcaaattgtttcttgatacatcaaggtaccctaaattgcttagctttcctagctgtgctggtaaagatcctgagagctgattgaatgataaatttagcttatataggcttttcagatttccaaattctgctggaatctcaccactgatattattaagatcaagtctgagcacacctaggttggacaacttagagagagcaggaggtaacacacctgtgatcatgtttccttgaaaatacatttcctcaagctgggggctagcaacccaatttggtgtgatctgcccagagaacctattgtatgccaagctgaccgttttgagatgtggatacacaccaaaatgttcagatatgtctcccgtaagctggtttttgtgcacggcaattctaaccaaacttgtacatgtctttaagcttctcggaatggggccatcgaaggtattcacactaaccatgaaagttttgagtctgccccccatgcatacatatgcaggcaagtgtcctgaaaattggttattatcaagccaaaggtctggtatgcccgtgagattttcgaattcccgaggaagagaacctgttaatcggttatgaaacatggtcatcagttggatgttcaccaagttaccgaaagttttgtagcatcgaatcacaa

SEQ ID NO: 28868 - DNA, 11000 bp, Oryza sativa
actactccgggcttaccaaatttcactgctaacagccgtgaacaaccggaatccacgatccacacgttatccttccttgccaccaaagcctacacacaagcagaagtcgaagcctcaatactggggttagatgataacaaaaatttaggaatccaatactgagatacacgaccagaagatctaataggcatatatccacgtgcaaaaacagtttgagaattttcagaaacattcctccgaggccggtctgaccgaggtacagtggccggtctgaccgggggccggtctgaccgctgctgcaccgccggtctgaccgaggcacagtagccggtctgatcggtcgccggtccgaccgcgggacccaccgtggtctgaccggtttccccgagggaaaacccgatttttgcaactttgattttgcaaaagcaatctctctcacctttttctgtttatgagctaatctgaaacaaaaaccaacaatatgtccatctttgccacaaaaagaacaagtatatttttcacgatgattagacacattggtagaattgaaagacttagcaacacaagcaacaataggaggttttgcatgcacaacattggattttgaagcagatgcattctaggtagacatgataccagcagatttaaacacagttttgttagtatcaggtttaaccaaaatctcaccacttctagcaccaacacctaacacaccaggaggatgtctagattatgagcataaggattaaaacctaaaccacgattatttgtgctaaccttagattgatctaaaatcatgttgaggttctttttaccatcagaacatcttagcaatgaatttttcaaataagaaacctctttttctaaattagcacaattttcacaatctactatgacacctttgcttttacgacatttggggcaagaaaacacttcattgtttttcacaacatcttccatgtactcaacacgacctaaagcatctttcaatttcatcttattcaaattacatgttgagcaatccaaaacatcacgaggttgttttaactttttagcagaaatcatgttaaacataaactagcatgaaaagcaatttgatatttttgcaacaactttttagttaaaaacaactcatccaaagtgcgtgtgtgcaaagcaaaagtaagagcaagagaagatttatttttcaaatcatgtgcaacattaacctctctaatttttgaaatctcattcattaaaacctcacaacttttgcaatcatcatcattaggaataagagattttaatctagcaatttcagaattaagagattcaatgataaattcctgttttctatacatcttctcacacttcttattttttgcactcaaaatattaatagcttcctcaaaagcacttacctcattgttttcacactctgaatctgattcaccacgtgccatgaagcaaacaccggagatgttctttcccttagcttcatctccactatcaccatctacgtcgcttagtggctcaaacgcgacgtagacttgatcaaaagccttcttgagattctccttgatcttccttcctttgaatgtaccctttggcttattgtcgttggtcttctcaccatctttgtcttctcttttgcctctcccaagcttaggacaatgcaaacgaagatgatcaattgaaccacattcaaagcaacggtttggaccacatcttttcctgttcctagcattattcatagctcgagcaattctgttagcaaccaaagccaaatcctcctcctcgatctgttcgagttgatcatcggatgtggcattaaaaatagctagaaaagaagactttgatgaagaagcatcaacatccaaagaagatgaagaagaaaccaaagcacttgacttagaatcaactttacgagaaagaacgttcatctcatgtgttttcaattttgtgtaaagtgaatctaaagtcaaagtagacatgttaacagactcctgaatagatgtaacttttatctcccaaatagacatgtcaagaccattcaaaaagtgatgagaaatctcagattgtggataattagcataataagaaaaatcaacagatctaagatcactcaaaattttattaaacctagaaagatagtcatccaaagcttctccaggttttatctcaaatttaatgtactcctttttgaaaatagcacgacgaagttctttaatgttatttgttccttgatgaaagttactcaaagcattccaaatctcatgagcagtttgaaaatgcgcaacacgatcataatccgaacgagaaatcccactcaaaagaatattgcgagctttgcaaatttgtcaaacttagtttttgcagcagcagtattaataacttcaggaatcacataaggatgagaaacttttctccaaatatcataatcttcagccataatataagattgcatcctactacaccaatgagaaaaatccgttccatcgaaaacatgaggcttagttgaaaacctaacaggagcagccatggcaaaaattctagatcgataaaaatccaaagaagaaaccaaggctctgataccacttgtaggatcgaatcacaataactaagccacccagagggggggggggtgaatggttggtatacccaaaaagggaaaacttttagcggaaataaaagttaccctcgaaatcgacggagttcggtctgaccgagattgatctgccggtctgaccgctcgcatgccgccggtctgaccgtcggtgagtcgtcggttagaccgccgaaacccggtgaaacacaaatcgaagaactcttaaagtggatgacgactttattgattctctctgtgtttacaaagtgcaccaacagcactccttacaaaaatttcgactaaacttgaaaccctaactcaaaactaaactcaattgctctcaaaagcgataccgggaagactcacgctctctctctatttatacccgaggtagacagcctaaagccatgaaccaaactcatactagaagtcctaaacaccttagaaaaccctctagtacaagaaacaaactttacataaccaatcataccaaatttggactccttccaaattcgattccgcatcccatacacacacaatacctccatcgtatgccgtatggaatatccatcaaccacgtacatcaactctagcctaagtatcccgcatgatctctgaccaccacggacgtcggcttatccccaagcctactcccggtccatcaccgcaaatactctcccgaggcatctagtcacctacacatgaaataaacaaagaaaccatattccgagaccaagctaactccaacttggctcattgttagtaaacaacagtattacatacgtatagtatccatctagaagccataatcatgaaataatcacggatatccaaacaaacaacccgaaaccgaaaccgacacagagtcggccggtcagaccgcgggctgcgccggtctgaccgcgcgatacacgccggtctgaccggcacacactgcccggtctgaccggtcacatgaaattaatagaacctgcgattcacctgtaaatccaatcatctcaaaaccacttcgtgaataaattccaaataacaaaaccaataaacttcgatgccaattgttcatcacagaataataatcaaaaacacctttgattttacaatctcccccttgatgaacacattggcaaatccatcaaaaatgttttggtgtttggaaaaataaaaacaaaagcggtaaaagcacacttcgtacaaacgtacacatcgtgctcgaaaattcaaaaatccaaaagaaaacttcttcccctttgtaaaagaaagaaattcccaattgaacaaaaaacatgctcttctcaaaaactcttctcttctccaaacattcaccttgcttctcccaaaaagtcaaaaagttacctttgcttctcccccttttgacaatgatttcatcaagcataggaattatgttcattaatgttcaagagcttagcatacatatagcatatcatgtcatgtgttgcaataaaaagaagataaactcatctataatataacaagcatgcattaaagtataaccatgaaccaaagactttacaattaagcttgaatcaacaatcaaaattcatgatttcatacgatttataatgcaacatcttaacaagcagataggttgaagaataaacactaaacacatatacctattgcatttatcactctttctcaaataacctttagcacaaaataaccaagagaatttttaacttttttattttcttgagcctttttgctcatatttttctcttttattctgggtacgtccctgtcgtcaagactgtttccaaagattcggcacccattattttgctcacatcgaatacgtccttgtcgtcaagactgtttccaaggattcggtattcatttttttcatatttttattctatttttcacaatgagcaattaaagctatttgaggaataacaattcaataaagcatagacataaagcatttagaaatcaaaccatatgctagcatcaacattgcatatttgcttaattcaagtagaatttaagtgtcatgcatcatctccttaaaagcaaaatctaaatcttatgaaaaagactagaatacatacaagctatgctagagacaaataaaccttcaaagtattgctagcatgcacaagaaaatactatatgtataaacaaagctctctttttctcaattttcctcattgttatattattgcttgataaaaccatgaggtacaaactccccctcaaaacatgccaaaaggatgaattatgcccaattcaccacgaagaaaagcaaagcgattagaatccaaaggtttagtgaaaatatcagcaagttgcaactttgtgtccaaaaactgcaattcaacatctcccttctcaacatgatccctcaaaaagtgaaagcgaatatcaatgtgctttgtgtgtgagtgttgaacaggattcttagcaatgttaatagcactagtattatcacaaaagagaggtactttctcaaaagtaagaccataatctttcaaagtagataaaagccaaagaatctgtgaacaacaactagcagcagcaacatattcagattcagcagttgattgagcaacactagattgtttcctagaagaccatgcaatcaatgatgtaccaagaaaatgacatgttccactagtacttttcctatcaattctacaaccaccaaaatcagcatcggaatatccacttaagcatatagaagatgaagtagaataccaaattccaaactcaagtgtatgattcaaatacctcattattcgcttgaccgcttgacgatgtgaagcacgaggagaagcttgaaagcgtgcacacaaacacacaacaaattgtatgtctggcctataagcagttagatacaacaaagatccaatcatacttctatactccttttgattaacagcttcaccatcttcatcaggatccaatacggctatagaaccaattggtgttgaaattggcttgcaattctccatcttgaaccatctcaaaagatcctttgtatacttcgtttgatgcacaaaagtaccttgaggtgtttgcttaatttgcaatcccaaaaagtacgataactcacccatcatgctcatctcaaattccctacgcatagtctcagcaaactccacaaccaaagcgtgagatgaacaatcaaagatgatatcatccacataaatttgaacaaaaagttgattatcaccatgcttaagaacaaaaagcattttgtcaacctttcccattgtaaaacctttcgcaagcaaaaagttcttaaatctatcgtaccatgctctaggtgcttgtttcaagccatacaaagctttagacaattcaaaaacatggttgggaaaatcaggattttcaaaacctggtggttgtttgacataaacttcctcctgtataaaaccatttagaaaagcacttttcacatccatttgaaacaatttaaaaccttttgaagcagcaaaagccaacaaaagtctaattgcctcaattctagcaacaggagcaaaagtttcattaaaatccaaaccctccacctgggtaaaaccttgagcaacaagtctagctttatttctcacaatcaaaccatcctcattttgtttatttttgaaaacccacttggttccaataatattatgtccagaaggtggttcaactaaagtccaaactttgtttctctcaaaattttcaagttcttcatgcatggcgttaatccacgattcatcagttaatacatgtgacacatctttaggttcaaaagaagcaacaaatgcagaatttgcacaaacatcatgagtcgttaccttagaccttgtagtccgctcacctatattaccaatgatttgttccggcggatgtcgtcgttgaatgtgtaaaggagcagcgacttctaaagttgatccacattctgtatctgtcacatcctgattttcgtttcaggatttataaattatttaataaattaataatagaatttatattaaatgttttttaatttacaagtgaagttaaatgtgggaaataaaatttcttaaatctaaagcatggatggatttaatttttattaaattttccatgattaagtcaactctctgaaattttctcggatttttcagagctcaattcttaaataatacaaagaacagttcagtaattatttgatcattaatgatctaattataattgttaagagcttttcttgtttaaaaatccttaaattataaattgttgtttaaaaggaattattagaaatgattttaaaagcctagaagagaagatctaattttaatttgttaaatctcaatataaaattgggccagataaaatttcattaaatactttgcttaattctataattcctagatttttctgggatttatttgagctaaggaagtatttttaataaatggaattgcatttaaggaataatttaaattgaaaaaggttttaaaagtcttcttttggctttgggccgaaagccggcccaaaacccttctctttctctttccctcagcccagtccggcccagtccgccgagccgccgctctcctctctctctcagccgctgacaggtgggccccgtctgtcggagtcgtcttcctcgcgccgccgccgccgcccgaaaccctagccgagccgcgccgccgccgctttccaattccgtcgctcttttccatctccggccgaattgtttgagggcaaatgatccttgagatctcctcttccttttctcttttggaaacatcggctaattttctttggaaaccggtggattcgagtttgaatcggattcctctttctctctcccgaacccgatctttccttctcggcgccggtcgccgtgggcctccgtcgccgctcgctagcccctttataaggacccccgagctctcctctacccgtcgccaccctcgccttcgtctctcgtcgcccgtagcgctctagcgccgtgtgccctagcgccgccgtcgccgccgtcgctccagccgtgcgccgctgccgtttcagctgtcgccgtcgctcgggaaggtcgccatcgtggtcgccaagtcgccgctgtcctcgtccgccccttcgccaccgccgaagaccgccggagcaccaccgtcaccgtcgacccgaagaccgccgccgcttttcctcgtcgccggcgctgtccgttgttccttcgccgcttctttggtcaccggtgagttcgtcgcgtcgccctctacccgttggtgccctccgttcgtgccgaagcgccgccgttcgccggcgagcgtgcgcgtccgagccgccgagccgccgccgccggtggtgacgtcatcgctgacgtcatcgtccccgtctcccgtgagccggtcgtggaccgttcgatctcggccgtccgttttggatggatcgatctcggccgtccgttcccgtgaaccgccgccgtgcgcccggtccaccgaaaccctagcccgctgacgcaataatccttcttttccttttcaaaaataattcattattgcgtcataattcaattaaaatcaatttaaaggttttaatccgatttaatccttaaaaattcataactaattcatttgaactcagtttaatgtggttcaagttgcaaaagttgtgtaaaataaagatctacatattaaaattgtccataaattgaattaaatttatttaattctttttaaatgggctttaaatagatttaatcttgtaaaattcataataaattcatttgaagtcagaatgaggccgttcaagtctcataattcatccaaaaatatgatctacatgtttgtttactttttatgtattgtttatttggtttttattagtcttttccttgttttgcgtgttagcttgtcgtttccgtcgttgcgaaggttcgcgagtgcgtcggaagtgttcaagaagattaattgaagaccgattattgcaaggcaagtcacacagatcctaaacacaatcctttgagcatgttgatcctatatttaaattctctatttatttcaactgtgcatttattttcgaatgtcactgggtggtgtgaacctattcttttgttatggcctgtttgcattgattactttaatccttgataccttgggttattataatttgactagttgagctttatatattggttcagctagatattagatgtgattgcttagccatgcttagaaacattagcacactattgggataacttatgattcattattatttaatgatggtttaatggtagctcacgatggtcaatcgtgattggttaataaattacttgccaactaaaacttgataatggtgggttgtgagcacatggttttgagagtcgtgctcatgacaattaaggaccggttcgcgagctactgttgtgaaacattaaccgtgacaaccacaagccagcgtgggcaacggctttacctttttgtatagcatgattcattgcggagcaccagactgagaagtggcggagataagcccacgggggtcgctggggagtccatgccttgttttataagggggtgattatgatccaggaatggtgcactgtggtgagttgtgttatgcagagggtattgtcacagcctctattcgggtactttccagtatcgcgacgcatggtagacatgatgttgaggctgtgtcttgtgggtacagtggtacacctctggccagagtaaaactattcgaatagccgtgcccgcggttatgggcgggttgagcaatgtttttcatgattagtcccacacctcccacaataattatggatgttatacctggtaataatttgcttagctcctggtttggagattagttctgtacagccgggtatggttgttcaggatggttgggcctgtgcagcatgggtgtgctgttcagtgttgattaaaatttctgattaattactccactgttttacttctcttaaatgttttgctaaatgctgcttttgcaagtgagcctatattatgccatcctttggtatccttgtgcacttgcatatttgctgtgtggcttgctgagtatgtcatatgctcaccttgcaataatcaatcaacctcagttgaagacaagttgcgaaggagaagacgtttggcttataccccagttgagctgcctgtgggagtggagccggagcttcgctagattttattttccgctgcagttttcttcatgttgaggactaagtgcctcttaagtaagtatttattcgctttagttattgatgaatctgtatattaaattgtcagtttgtgtacctcggctgattcctggacgaggattttatgcacaaataagttcggaaattactagtgaatttccgggcgtgacaagttggtatcagagccatctcgactgtaggataagccaaatggtcaaaccttaaggactaattttccgaaaacatgatttgtgaaaattttcctttcttccttctctagaattctctataaatcattttatcatcctcttccctcctgctttcaacttgagtagttctgaaactagttgttgaaactagaagatgttgatgtggtcaacttatggaggccagtcaagtggatcgaggaaggaccgaagtgccaagtgtcaagaaggaatgaagtttgcatcctaccttagaaccctatgccgccaaagtgtctttgaagaatagttagtaggatagaacgtttgttgcttgcttgtgtgtaggtatggttgcattcccatcattggagtagttcagtgatgagcatgtaattatactaggttgcttgcttaatcaacttgaacaatataatggtctacacacaccagatcagtgataacctagttaaggtcttgtctttagtgtaacccctctccttctatcttctctaatttgcaatagatggtgaacactcgcgccagtggaagtggaaacaataacaatgaagggaacccaactcttgctcaagttctggctcaacagactcagttaatgaacatgatgatacagcagatgcagaatcagctcaaccaagggaacaacaatgctccaccgccgcagaacaagttagctgattttcttcgtgtgaggccacctaccttttctagcactaccaacccagtggaagcaggtgattggctacacgctgttgagaagaagttggaactgctccagtgtacggatcaggagaaagttgttttcgcttcacatcagttgcaaggacctgcatcagaatggtgggatcatttccggatgaacagagcagaaggacaaccaatcacttgggcggacttcacggaagcattcgagaagacacacatacctacaggagttgtttctttgaagaagcgtgagttcagggcattgaagcaaagggatcataccgtggcagagtatcttcatgagttcaatcgtctggcacgttatgctccagaagatgtgcgtactgacgaggaa

SEQ ID NO: 28869 - DNA, 2093 bp, Oryza sativa
acactctgcacaagtaatcacaaaccgagaaccgagcgttgctcggttgggtagcttcgctggtgagcgagcagcccgcgcggcttcgatccctgggatcgtcacaaaagtagagtgacgtcctcgtcacgcacaaggtccttaagtggctttgtgtatctcattagcacgtgtgtgtagttgatatcgtcacgcacaaggtccttaggtggctttgtgtatctcattagcacgtgtgtgtatagttgataggtctagcatgcgtgtaggggtgtgtgtgtgcgtggtggaatgcgtttgcacgtatgttcagatactatagcttgtactcaaagtggagagctctcaaaaaaaaaagtgacgtcctcgtcacgcacaaggtccttaggtggctttgtgtatctcattagcacgtgtgtgtatagttgataggtctagcatgcgtgtaggggtgtgtgtgcgtggtaaagtgcgtttgcacgtatgttcagatactacagcttgtactcaaagtggagagctctcaaaaaaaaaaaagtaatcacaaaccaatagcttcagtcatcttctttgaatccaaatgccaacactcctactgcgcttgctcgtgtcatgccttctttgcctgcaaacatatgtaggtgcaaaacggcatgaaagcatgatctcactcaattcacaataaatggcacttcttcgctggaagtccactctcaggatctcatcagtgcatatgagctcctggaagaacaccacaagcctctgcaactggacagggatcatgtgtagtcgtagtgtcatccgccatggacgacgacaccgtctgccatggccagtggtgaccaacatctcccttccagcttctggcatccatggccagcttcgtgagcttgacttctcatctctaccatatctcacatatattgatctcagcaaaaacagtctctctggtccaataccctcaaatatcaactctctgtcagctcttgtgcaccttgaacttcaattgaacctgctcacaggaagaataccagatgagattggtgaactacgaagtctcaccacactatccctttcctttaacaacctcaccggacacatccctgcttccttggggaatctaacgatggtaaccacatttttcgtacaccaaaatatgatctccagtttcatcccaaaggaaataggactgctagctaacctgcagagtttaagtctaagcaacaacacattgaccggagagatacccagaactctagcaaatctaaccaacctagctactttgcaactatatggtaatgaactgtcagggcctataccccaaaaactttgcatgctcacgaagatccaatatcttgaacttagcggtaataaacttactggtgaacttccttcatgtttatccaatctaacaaagatgaaagaactttacctacaccaaaaccaaatcacgggttccatcccaaaagagataggaatgcttgctaacctgcaacttttaagtttaggcaataatacctttagcggcgagatacccacaactctagcaaatctgaccaacctagctactttgtacctatggggtaatgaactttcggggcctataccccaaaaactctgcatgctcaccaagatgcaataccttggtcttaacagtaacaaacttactagcgaaatccctgcatgtttatccgatctaacgaaaatggaaaaactttacctataccaaaaccaaatcacaggttccatcccaaaagagataggaatgcttgctaacctgcatcttttaaatgtaggcaacaatgcctttagcggcgagatacccataactctatcaaatctgaccaacctagctactttgtacctatgaggtaatgaaatttcggggcctataccccaaaaactctgtatgctcaccaagatgcaataccttggtcttaacattaacaaacttactggcgaaatccctgcatgtttatccaatctaacgaaaatggaagaactttacctataccaaaaccaaatcacaggttccatcccaaaagagataggaatgcttgccaacctgcagcttttaagtttaggcaacaata

SEQ ID NO: 28870 - DNA, 1009 bp, Oryza sativa
tcactctcatcaagccttcgtcacctacatcatccagattctcgtgcccctcttgggagccattagtctcattaaattgaacgtcggcggtttcttccacaatacctttgttcttgttgtagacccggtatgccttgctatttgaggcataacctagaagaaacccttcatcacaccaactttcaaagttggttagtctagcaccctttcgataaatataacacttgcaaccaaaaactcaaaaataggcaacatttggcttcctcccaacaattagctcataggaagtctttttcaagagacgatgtaaataaagcctattggttgcatggcaagcagtgtttatggcttccgcccaaaaggaatcggaaacaccatattcatcaagcatagtccttgccatctcaatcaatgtacgatttttcctctccactacaccattttgttgtggtgagtaggtagcggaaagttcgtgtttaataccaagatcatcacaatagtcctcgatattggtattcttaaactcggaaccattgtcacttctaattttcacaagagtgcaactaaattcattttgggccctgtttgcaaactttttgaaaagctcggcaacaatagacttatcatgcaaaaagaacacccaagtatagcgagaataatcatcaataatcacaagacaatgactattaccaccaatgctcttataggttgttgggccaaacaaatctatatgcaagagctccattggtctaggtgtagacatgatactcttagtaggatgagaacatgcaacttgcttgccggcttgacaagcactacaaagcttatccttctcaaacttcacatctttcaagccaacaactagatcacgttttgaaagtttgctcaattgattcatgccaacatgggctagcctcctatgccaaagccaacccaatgaagtttttgcaactaaacaagttttcaaatttgcttcactagaattgaaatcaaccaaataaagatttcc

SEQ ID NO: 28871 - DNA, 7035 bp, Oryza sativa
catagacccgtggtgaaccggatcgatctcgcccgtcgatttggtcaagtatagatcaattagatctcggccattggtttcgtaggcctctgtgcacccggtctaccgtggactgccttcgatgacgcaataaatccctttttcctttcaaaaataattctttattgcgtcataattcaattaaaatccatataaatgatttaatccgatttaatctttaaaaattcataactaattcattgtaactcggtttaatgtggttcaagttgcaaaagttatataaaataaatatctacatattaaaattatccataaattgaattaaatttatttaatcctttttaaatgggctttaattagattaaatcttgtaaaattcgtaattaattcatatgaagtcagaatgaggccgttcaagtctcaaaattcatctaaaatcatgatctacatgtttgtttactttttatgtattgtttatttggtttttattagtctttttcctcgttttgcgtgttagcttgttgtttcgaaggttcgcgagtgcgccggaagtgttcaagaagattaattgaagacccgttattgcaaggcaagtcacacagatcccaaacacaattcctttgagaatgttgatcctatatttaaattccctatttatttcaactgtgcatttattttcgaatgtcaccgggtggtatgaaactattcctttgttatggccaatttgcattgatgaccctatttcttgattaccttgggttataattggactagttgtacttatataatggttcaactagatgttagacataattgcttagctatgcttagaaataatagcacattattgggataactaatgattcactattactttacttaataatggatatttaatggtatctcacgctggtcaatcgtgattagttaattaattaattgccaattaaaacttgataatggtgggttgtgatcacatggttttgatggtagtgctcatgacaattaaggaccggttcacgagttttggttgtgaaacattaaccgtgccaaccacaagccagaatgggcaacggctggacactttgtatagcaaggctcattgtggagtgccagactgagaagtggcggagataagcccacgggggtcgctggggagtccatgcctctagtttttgagggggtgactacgatccgggaatagtgcactgctttgagttgagttatgtgaggggtcttgtcacaatcacttgccatggtgacgtgtctgcgcggacacggtgacatgacggtgggttgtgtcttgtgggtacagtggtacacctctggccagagtaaaactattcgaatagccgtgcccgcggttatgggcgggtctaacaatgtctttcgtgattagtcccacactactcattaataataatgtggtaattgatggtaattaatttagcttctggtttggaatggtatattcctggtttggagatagatctgtacagccgggtatggttgttcaggatggttgggcctgtgcagcatgggtgtgctgttcagtgttgattaatattgatgattaattactctactgttttacaattctcaattgtttgctaaatgctgcttttgcaaatgagccctatattatgccattctttggtaaccttgtgcacttacatatttgctgtgtggcttgcggagtattccatgtactcaccttgcaataatcaatcaaacctcagttgaagacaagttgcgaaggagaagacgtttggcttatatcccagttgagctgcctgtgggagtggagccggagcttcgctagaccgtaattccgctgctattttcttttcttttgtaagtatataacgttattattatgatgaatctgtatattaaattgtcagtttgtgtacctcggttgattcctggacgaggattttatgcacaaataagttcgaaaattactagtgaatttctgggcgtgacatccagtatcaagcacccaatggctcccaccggtgcggtagttcacctataaaagaagatcaagctcttttaggtacacaaacttatttgggtccttggaggttagataccaaagctttgggcaccaaaatggcattctttttaccaccaagtataggggaacccacatatctagcaacaatactaccatcataagccttcctaagcatataatgagaatcaaacatgcatgtcttataaggcttaccaccggggcaatcactcaccaaatgcccaacctcacaatacttggagcaatgcttaccgttgctcttgacaaaacgagtggcacggtgagaaggtttcttactcttctttggaatgaatccaagtccctccttgttaaggatgcaccgttgctcactcaaaatcttgtcaagagtgttcttgccgttgaagcatctctccaaactcttgttgagcttagccacttgctccttaagctcgttgttctcaacaacaagtgaggcatcacaaattgaaacacaagagctagagctagagctaggcatatccataagatcatcacaagagatagaaatgctagatgatgcaacatgagcaatatggcaagtagcactatcatcaagcaaatcacaagatatgccaacattaatgtgagctccatgttgagtagtggaaaggaggttgtcatgagcttacttaagcttcttatgagaaatggtgagtctctcatgagaggtctttagctcctcatacaagacctccaaagaagcatgatccatttttagggccttgaacttaacaatctccttctcactataagcatggagctcctcaaacatactcacaagctcatcataggaaacatcatcacaatcatcatcactctcactatcactaagagatgttaccttagaagagccctttgccatgagacaaagtggagcgaagagtgttggagcctccttgatgacaacaacagccatcttcttcttcttggagcttgcatcatcaccaccttcttcctcggacccagatgaggcggagctctcctcatttgagtcccattctccgatgaaggcctcaatcttcttcccttccttcttgagcttcttcatgagcttgtagcctccactcttcttcttggatgacttgtctccatcatcatccttggaagggcacttggaagcaaagtgtcccttctcaccacactcaaagcacctcaagttggagagagtcttgttgggtctcctatttcttctcctattggagttggagcctcttactctctcctttcttcttcccaagagatcattgaaccttctagcaagaagggcaatctcttccttcaagtcatcattggcttcattcaccttgctcttgcccttgtcttcaacttcggcttggagagcaatgcacttcttggatggtgaggcttcctccatctccttcttcttcaacttgtacatgtcattggtgttgatcttccccaagaggcttgcgggtgtcatccttgacatgtcggagttgatgagcatggtgacaagggtctcatacttcttcggtagagccctaagcatcttttgggcaacctcaagatcggtgtaggttgccccaagccccttgagatcattcacaatgacattgagcctcccatacatgtcattcacgctctcatgaggcaacatggagaatgtctcatattggatcttgaggaaatgaagcttggcatccttgtactcacttgtaccctcatggatctccgccaacttgttccaaatctcatatgcggtctcaaggttgctcactctatcgaactcctcttggctgaaggagttgaacaaagcattcatggcttgggcattgagttggaggttgcagtgatcaatctccgtcaagggtgtgccggtgatagcaaagcctacatccacaatactccaaatatggaagctcatagctttgaggtgagtagacattttaattttccaagtggagtagtttgtgccattgaacatgggagccttccctacatggttcacctcgttcgacatcttctttctaggcggtgaagcccaatcaagagagaccaagctctgataccacttgtaggatcaagatgtcgactagaggggggtgaataggcgatttaaaactaaatgacacctaatcaaaactaacctaagttgctaggctcgatgagggacaagtctaactaagcaactaagttatgttttgcaatcctagggtgaaagtggctcaattatatcactaggaaagtaaatcacactttctaagtctagtttagcaatcctagggtgaaatgatctctagtatgtctctaggaatgtaaattgcacaaatgtaaatgcaacaagtaaatgagacaaggtgacaagagatttttcaccgaggttcggaaactcgccggtttcctactccccgttatggcgagcccaactctaccgctcaaccacgaagccaccgcacgcccccttcgtcaaggggtgggcaaggcgggagccggcccacggagaggactacccaagcttcgatcactcggggtagtttttccttcactccaaagttgatgaactccaaaccactcacaaaccggcgccgggcctccttcacaatcttctcgaagaggtcaccgggcaactcttccacaagccgtctaggaggcggcaacctccaagagtaacaagcgatgacccagcgtagagatgatcaagtgacacactagctctacaatgaagcaatgcacttgactcttggctaatcaaccctcaacactacaatggatgaacactaagctcaaatgtgtgtgagagaggtgcaaggggtgtatgcaagtgatttgggtgctaagagagtccccttgctgcaggtgggggagtatttatactcctaccaaccaaaactagctgttgggggtgaaatctcccaactctgtgctctgccgatctgaccggaggtatgtggccggttagaccgtgctactctacaacggctagttttctagctgttctagggctgtcattgggccccacagccctggccggtcagaccgacatggggtggccggtcagaccggccttggctcggtcagaccgccctcagctcggtctgaccgaatacggctccggcggctcgggatcggccatcccagagcatgccatcccggccatatgaccggccggtcagactggacaacacttgccggtcagaccggctttgtggaggcgggcagaccggccgtgaccctgtggtcagaccggctgcactggccggtcagatcggcacttgggctgcggtcagaccggctctggtcaggccacacagtgaatgcacaaattgaaatatggggagagtctaaatgcgagcacaagtctaaatgcataatgacctaatgtggcaattaaaatcatctctttgctaggtcattacccatcttaatagtacggcgaaggtaaaattacactagcaaattcgatcgccctacacctcgatcaatttaaatataaagtactagtttaccatcttctcatccttcgctttgcgccgtcaattttaatccttcggtgatcatccatgtgcacacaataagtgaacctaactcaaataaatatctcaaagacaacggttagtccacaattagtgcttgccattaattaccaaaatcaacaacgggggcctagatgcttcaacgggtagaaaatccgctaactaaatagaaggaggtacggtcttgctcgttggacccaaaacgacgcggcccttgccaataggtaaattggtatatatcttcatatttatttctgttaatttgattttttgcatcaaagcatgtttgaatttccaaaatttgcatttagacttaattttgaggaaattacttcaaatgaatttttcagagcaaaataaaataaaattttcaatgaaaatttgctatgccatgaccacactgaccattggattccaacggccaaaagtggggctggttgggcctactaggggtttggtcgaaccggccaggcaatggttggcagccgtctcttttcgaggtcacggctagttggccccacaggccagttttgaccgttgtgggcaccctatgttagccaaccggctgggagaggggatttcaccctatttcaactcattttcactccccttccaaactttgctctcaaaattcattaaagctttgcaagtttgcctcaaattcaagcattttagttgcatttgcaagttgtcttggtgaagctaaccggcgggtagaagtcttgctatcctaacccccgccgagttagtccattttcttgctcatttgtgcataatgaagagacgattgtcccgattgttcaagaagggactcagctctccatcaagtcgccatgacgagtccagtgctcgttcatccgtcgatgtctcaatggaggaagccgaagttccaccacgcctcttgaatgacgccgaccttgaccttgtcggtgatcgtgagctgcaagcctactacatgctaaaagaccggttgtttgctcacacccgggcatacgatctggagctgttgcaaaagataggtatgaatgttgattttcgtaccatttggaaagctgttggatggcagagatttgcgatagtagatgagcctggctctcgtttgctcactttgcaatttctatgcactttgaaagaaatagaagatggaatttcctttcgttttttccgtaaagaacataaacttacatggaaaggattaagtacacttcttggttttcatgatgcctataaaatcgatcttcggaaaggaatttccgggttcgagaaaaacatattttgggaagacatttctggtgctccaatttgcaagaaacctagaacaaatgacatccataatcctacacttaggcttatgcacaaatggatagctatgactttatttccttgaggtgatcttaggcccataagagaggatgaattgattatcatgtttgccatggttagaaatattaaagttgctcatgtgaactgtatgataagaca

SEQ ID NO: 28872 - DNA, 15085 bp, Oryza sativa
  unsure (1)..(15085): unsure at all n locations
acttccgcttcgaagggttcaatccttaccaatgaccctaagcgaaagacaagcttagggggagacatctctccccccactaaggtaacttgtgtcattgcatatttttctttccaaatgcatgtttatttttcattgcatcttataaactaaaaaacaacataaaaatttacaaaatagaaaggggcatttgcaaatttgccatcggttttttcaattttgcaaggatgccactcgaatgacagttatagtggtatttttgcaattatctagtgacagttttgcaataacgattcaaagcagtggtaaatttgcaattgccccaaatagaaaataccaaaaatataggttagattttattatgctaggtaagacaacttagttctcttcgttgaaatgatgaatagttgctctgttttatatctctcatatatgggttcatggttaagtactatctcaaaaattgaataagagtagccaacaattatccggggacctgagggaagtgagctgtactttgctaatctgagtctaagttattgcaagatataagatagtaaataagagttgctatgatcctattctaaatatgacctgaattccggatgttttattttcccaaaatgataaactcatgaagttcctcatttgataaaaattcctaccagagccaaaaatatccatcttgattaaaccatatatatttttcggttgcttgtaattccattgaactttgtcaaatctttgtgacttgggtagatacttttcatgctctatgatcaagatcatacacccatatgcacatgctaaacatctacattggaagccagcatccatccattccatctttatatccaccatattattatcaaaataaattctccatgcttttatgtgctttcttctcctagaaaagaaaattctttctaaaaaaagaggtaggagggaaaggtatggttacgaaaaaataataataataaatttatgctctctcaactattgagcatgatgaaaaggaaaaaaaaatgtgtgtagccatgccctctccatatttatgaaagaaggattttggagaagagagtaagcataaaggagaagcattttctttattttccacattccattcccattataccacacacactttgcacgatcttgatcttgagtatgtctagtcatctattttagtccaagtttttgatttagtaataaatgtgaatacaagtattccatgtttgatccctaccaagctccacatatcaaccttagaataggaataaaaaaggcaaatttggtgaggaattcatattcatacactttgagagatcaagtgaatcatttgaggaacttggatttcttttgcaaaattcatttgaaaaccttccgggataaaagttgaataaagattgggtgactagtactctgatgattgttctatctttcaaccgcttaagacaaggaaatgcagtgtctcgtgggaattaggtgtaagggtaagccaccgtgccaaacttatttaatttgagagagagtagatatacattgcacctgtacatttgagatatacaacatagtagcaactcctgatcaacaactaagtttagatttttgtgaagttcttcactcggggcgagcaaaggttcaagcttgggggttttaattgatggtcgttatcgatcagttgcgtccgtcaatattcccaaaataaaggagaactagttatgcttgcaatgcaaatttatgttagaataagttctattccactagcactagaattctaacctcttgcagagaataaatataaaatggaggagaatcggtagcaaaacagacaatcaaataatcggacgctatcaagaatcagacttgcggacaagtgggctgagaacatcaaattgacacaaccaaaacagtccaaaattcacaagtctttggaaaggagcaaaagaggaggccacctgccgaaattgggctaggtcggcccagcacatgttttggctgaacccgtcgtggctccattggatgcagggttttgatggacggctgagattggctccctatgacggttggagggtattaccgacctttccaaccatcggaaccggcatactcaagctataaaaggccctcactccctccatttcaacacacacctcaagcaagaagaatcaagctctctctcaagtttagtagtgttctagagctagtggggtaggaatagaataggagtcttagtctgagaagtcttcggaaggattcgggtatggctctagtagctcttctctcttttgtaggacttgtacttttattagaatattcttctttatactactctggtattctatcacttcccgagtatatgaataccaactttattatatatccaaattatattgattatgatgctaacttatgtgggagatgcaatggggtgggcataatgatcttgtatacgattgctctatgtcatgacgatgatattagagtagtatttggtaatttaagcgtgttgtttagattactagatatcgttatttggggttatatgctgcgggtatgtcgaggtggggcgctgatggtgacagctcagtacaggtattcctctccgtgcgtgtatataatcctaagtgactttcctgaggagggtactcatccgtatttagccccggttggatggtcatgatgggttgtcgtaaggaactcggcaatcaggggtggcttatcaaagcaccaggagggcattggaaatgtggtattgactaaataatcatataactaggatatatatataatgtgtatgtatattacaagggtaggaatagattctttttactttctttccacttagcttagatgatttattatgagagtatataattctcgtgctgtatgtcactctaccctattcattatcttaacccctgcttagactttgattattacaagtaatatataagttattagtatagttttctctattataatctttccacagtattaaataaatacgatacccttagaatactctcgggtgaaatgctaaaatggtatatccgtgcgcttgcggatgaaatgtgtaaccataatatagcacaagtgtttctgggtcattgttgggaattatatttctagtaatgtcatgaagaaataccaacactagcttaattaccctcaacgcacatgtcccttctaataaaatttccagctttactcgatctgaaccgtgcatcatgtcacaaataattgatatttgttgaagattaatttgcaaaatttgtgaattaagcaagattttttttttcaaatcttgcacctcatcgctgctagttctcaagcaggcatcgccgattactgttgctcaacaccttgcaggagcagctcgccaacagtgagtgctacggtccggtggcgagtgctagggtaaaacatggcggacatcctcaccggggagcccactattcgatgacttgtcagaggaggtgatgctcaaggagatggccaacatgcgcgagaccggttcgagtccacgaggacaaagctattagaccttagacgagctgccggagctgtcggcggacaggctgggacccgcttgaaagtcgatcgatgtggccgggtccagctcagatgatgacatggaatacgtggggcacactaggaaaaaaaaccaaatatgtcacacaagtcatcaactgttcgagtaggaagttaggaacaggactaccctgttacccttgacttgcttataccaaccgggcctcaccgtcttgccgtcgtgctcaccccgcaacctctctgtcagccgtcaccaccatccctagcgactgatggaagcttagggatggtaatttccccgttgggggcagggacccgcccctttggggacggggacggggctgcttttcgacccgtgggttgggcggggacggggccccacatatatgcggggccggggccgggtgaagggttccacccacgggtccccatggagccccggaattaagaaagatagaaatataatagagggccattaccttaaatcccagcaaaagaatggatatagatgatcatttgacaaaggcccaacataaaagcccatcaagtccacataggggatgatataaaagcaaaaaaaaccctagctttcccgatcctactgagccgccagtccgccacccacacatgactgagtcgcggtgcatccccaaccatgtcgtcaacggcttaacgtgcggaggttacttctcgcgactgcggcgccggatgccttctcctcctcacgccgtcggcttcctgctcctcctcgcgccggtggccacctgctcctcctcacgctgccggcctatccctcctactcctcacgccactggccgcttgctcctcctcgtgccgccagccactcattcctcttcgtgccgccggccacctcgctcctcctgttcctctcccacctgcgtcttcttcacttgcaatggcagagtgacctcctgcggagccccggccgggttccggggacctagagggtgcggggacgggtagcattttgtacccgacttcctcttcggggccggggccgggggatggaatcggcattgggggtgggggcgttcttgcccgacccggccccaacccaccccgttgccatccctactcaagctacatgccaccgtcacctcattggactgccgtggctcagacccctcgttgccaactggatctggcttctctgcctttaatgagctttgtgctacagtggaaaactgtcacgcccagaaattcacaagtaatttccgaactaatttgtgcattaaatcctcgtccaggaatcagccgaggtacacaaactgacaatttaatatacagattcatcaaaataactaaaacgataaatacttacataagagacacttagtcctcaccacgaagaaaactgcagcggaaaacaaaatctagcgaaacttcagctccactcccacgggcagctcaactgggatctaagccaaaggtcttcttcttatggatcctttttcttcaactgaggtttgatgattattgcaaggtgagcatatgacatactccgcaagccacacaacaattatgcaaatgcacaaggataccaaaggatggcataatatagggttcatttgcgaaagcagcatttagcaaagatttaagagtagtaaaacagtagagtaattaatcatcaatattaatcaacactgaacagcacacccatgctgcacaggcccaaccaaacctgaacaaccaaccccggtcgtacagaacaaacctccaaaccaggaattatccattccaaaccaggagtcaaattaattatcacattattatcattaacgagtagtatgggactaatcacgaaaaacattgttagacccgcccataaccgcgggcacggctattcgaatagttttactctggccagagatgtaccactatacccacaagacacagcctcaacatcatgtccaccatgcgtcgcgatactggaaagtacccgaatagaggatgtgacaataccccctgcacaacacaacccaccacagtgaaccgttcctggatcataatcaccccctcaataaccagaggcatggactccccagcgacccccacggacttctcgccgattctcagtctggcaccccgtaatgaaccatgctatacaaaaggtaaagccgttgcccacgctggcttgtggttggcacggttaatgtttcacaacagtagctcgcgaaccggtccttaattgtcatgagcacgaccatcaaaaccatgtgctcacaacccaccattaatcaagttttaattatcaattatcataacacgattgaccatcgtgagctaccattaaatataaccataattggtagtgtagtatgaatcaccccattaatgagctaatatttctaagcatgactaagcatctataataatcatatagctgaaccaaaccaatatataaggttctagctaatcaaattataacccataggaaaataaagttatcttcggccataattaaatgggaaaggctcaccacccggtgacattcgaaaataatgtataagttcaaataaaacattagctttaaacgggttcaacatgctcaaagggttgtttgggatctgtgtgacttgccttgcaaacaagcgtcttcaattcatctttaggaactcctccaacgatcaaacgctccttcgaaacgaccaaaaactaaacctagaacgcaaaacgagaaaatacactaaaaaaaccaaataaacagtacaattaaagttcataaatgggtaaagcttgaatttatatgaattatgaggcttgaacgacctcattccgagttcttatgaattagttatgaattaatgaagttttaatcaattaaaacctataaaagaaaacaacctaaataatttatggcatcatatttaattattgttgcactgaaaagggtagaagatgacatcagccctaggattagagaaaaagagctggtgatactgataaacggaacccacctgtcatagagacaggaggtagctcgatccaccatagactcagttcacagagaggtccataagatggatgactaggattagattgactagagttgaccatgatcagagatcaaatccgatctagggtttaggatagtggccacatgacaacacgtggcgctgacgtggacgccacaaggacagccacgtcgacacggtgccggcgagcactggatggttacgacgatggcaaacggcggcacgacggcggacactgaggacaccaacgcgaagagaagatcagcacggtccttaccggcacttacatggcgacgggcgatgaaaacagcggccggtgatgagcttcgaagggcgacgagatcgggatgacggtggcggcaactttacggcgaataccggcggagaaagggtggacggccttccgcttggcgctgcaatgcccacggaggaaacttcgaggttcggcgaccatgggggaagcggcaaagcttcgccggagatcaaaacatggcgatggttcggccttcacggtgatggcgaattccggcagggtttggcgcaatggagcgggtggccggggtagctctcacccttgcgaagccgagggaggtgacggggctgaccggcgacggccgaggcgacggcgcacggcggctggagaggcgaccggaggtggaaagagagggagctcgcggggaggcggctagggttagggaaaaattcgggaaaaaaaagggaaacggaagaggagacctggggcatgctatttatagccaaaggaggaggagatcgactcagttacgggaggaatcggcgacggattagttagggttcaccggaaaaacggagctcgaaaccacgtcgaattcacgcgatatacaacgggattcaaaggggtttcttagggataaggtagaggagttcgaggggaatccgtttttacaaccaattttggaaggggagcaacggagtggccgaatttggtggggaggcggcgctgtacacgggcacggcagggaggagatcaaccggctggaggttaggggcgacactgtagcatagggaggcaaaacagacttcttttcgggcttccttttctttactaggcctaattgcaagaaggaccaaaactggacttcagctaagagaaagaggaagagtgggctgctgcaggctaaggaagagagagaagaggagtgggctgagttcggcccgggcaaagaagaggaattaaattactttttaatttaaataaatactgaaatgatatctcatttattaaaaatacttccagtgctcaaataaatccaagaaaaatcctgaaaatacttgggcagaccaagtatttaatgaaattttatctagctcaagttaatgttcaaatttttcatagattttattcacacacttactttaatcatcaaataaattttaaaaatttctttctcacaacaatttataatttagcgattttcagggtgtgacaaaaacaatgattctaagtgtatttctgtagtaacggtgcaagacagtgaacatacatactgtacatagttagggtagcgatcgatttcattcgtccgctgtgaatcggacggctaaaaatactcccaaaatcacatcactgtagctctctaacttcacacatgtaaagtcagatgatccaaatccttgccaacctcaaggcaaggcaccagcattgctcctcgctgtctgttcccaggcacccatcgtctttgcttcccgccattgttctacatactaagcatcgttaaaaactgatattatgtggtgaagtgagcttaactcaactggttaggttccttgtggtggaatctgtctaccgggttcaaatcaaaaactagacacgggtactcgtatttatagctaattattgttttattggtagatgacaggtgacgtaccctacgatagtgagacgtctcacattatgtgactgcatactctttgtacaagctactgcacgaattcttcgaccttaccttccatgggccaaccccacctccctcacccttcctaagacccaaaacccacctcccacctcggttaaagggcggttaaagcgtcctcccgatggtccgaccccggtctaacccgcctactcactttcccccctcatccacctctttgttgtttttgtctagcaggggtctagcaggaattgcgcagtaacaaaacgatcatcgtgtagtaacaggataattgtctcgcaataaaactcaaaatttggatggaggggcagcaacagaaggctaaaagctggggaaaaaaacatcaagatgtctagagctcatgttttctgttctagttattgtaacacctgttctgaaatgttatgttgtctcttctttctttgtagcttaggtgtcaaattggtattgtttattttgaggatgctaataggacttaagttagatggtcttcctgtaggcttagatggtgggatggtgctattggtagcctcacagatatatatctggatgcataaaactctattttgtactcctaagtacattgctgttaatggatatgggaggaagtctgcctctcttttatcaaaactggctcaatcagtgacataacgacatgcctgtacatatatacttatactgatttcagcagtttcacaactcaactaaaccgtgaccttgaactgtaacctgcagaggactgatcattgtactaatatctatttcaagtagctaataatgtggtactccttccgtctcaaaatataagaacctatgaccggataggatgttttctaatactacgaatctggacaaatagaaaatattcaatccggtcttaggctcttatattttggaacggagacagagagagtagtttatttgtacagtaaattcgtttgtccaacagtgcttctgcccaagctgattgttggttgccagaactattaactattggttgataggaatatacggagctaggcagcttgcttggggctcaatgggacggaagcccatgttgctgcacatacctgtgctttatctcctttaaatgctgtaactcaatttcatgttccattttcaagtaaagtgccaaataaagtgcagtgaattggtaatttaaatcatgtgtgcccctaatgtcaataattcatatgtgctctgtgactacataaatttatcaataagttctgacatgtttggcaaggcatggttttcctgtttgaaccgaggcataattcatcaacagttgcaaccatctagtaataatctgttttgagtttgctactgtacttatagcactagatacataataaaaaagtgaaaattgaccagaagaccaaaaagtaaagcaatgcttgtttcttcaaatgcaaaatctacttcgagaggcctctcgatttagcattaacgagcgaagccagctatacgtgagagtgagagaaatagtactattagtactacacatctacaaacatgcatatctttttttctattcttatataattttctcttaaattacttatccgatctataatccgattgcaccatttgttcgttgtaattaaatctttataccaagattttatattattatattataataaaaatattcattttttaaattacttttatctctctctctctctcacacacagatatatatatatatatatatatatatatatatatatatatatatatatatatatatatagcttttagatttgattaaattacttcttatacattcataatgctctgagtttattacttttattatttctagttaattccataatttattctgattaaatttaatttctagatagactcatatgttaatccctacacggattacttctaatgtcataacaatttacttctattttgtgttaagttacttttatggtttatgtaaaaattactttcaggctttattgaatttacattcataaatgtatttacttgaaaatcttctctacactttgcttgtgaatttactccagataatttcttatttcaactcagtcataatgtaattacttctaatgttatagagagttacttctattgcattgctaagttacttctacaattaaaataaattatttttaaattaataaaaatgtttgaatatatttaacatggatcttgttttgtcacatattttgagtggcaaacaaatattaaaataatatgtgatttaaaagatataagttattaaagaggttacaaaagacatgcctcattgtatattattttagttaaatagggagtcatacctgggatgaaccagcgaccagtcgctttgtagtcgtgtccttcttaaaaaccagtcacaactcataaagagcagtaataaggcaatgtttagttcccacgcaaaaactttttaccctgttatatcgaatgtttggacacatgcatagagtattaaatatagataaaaaaactaattacacagattgtgtgttttaagcctaattgcttcatgatttgataatatggtgctacagtaaatatttgctaacgacggattaattaggcttaataaattcgtctcgcagtttacatgcagaatctgtaatttgttttattattaatctacgtttaatatatcagtatatccgatatgatacgccaaacttttcacccctgaaaataaacatggcctaagtaaagatgacatgcaataaatcctctggaatctttctgttgacggcagtttttcctcccccctcctgctggtcctgggttgtactaatataatattacttactcctctcctgcaatgactacatttttggatgttgtgtcctatgtttaaccatccatcttatttgaaaaatttataattttttttcaaaaaatttagtcacacataaagtattattcatgttctatcatctaataattagaaaaatattaatcataaaaatttttaataagaggaagagtcaaacgttgtattaaatattaaaaaatgaagcctttgtgggacggagagagtaatcatcaataaagtcctgttttccttttaaaaaaatcatagaacatcctccctccatccctacgtatgtgggatgtaccctggggaaaaatatttacaaatacacttttttttaataatttacgtttatatacatcaataacaaagttttgtaaaaatatacccattctgtggatccaaaatacggaaccgacacggtcccgcagcccgaaaatgcaggacctgaacagtcccgcggtcccaaaanntgcaatcggggtaccattgatttttcacactgcaaaacactgttccgatactgtgcacaattgttccaacactgtgttgcactattcacacagcgtgcccgcgcctccattgtgcggaaccgacgctgtaacagtgtcgaacaaccccgggaacagtactgcacagtcagaacagtgcggaacaatgtcgaaatagctgggcaacgcggttgcgcgttttgggaccgcggactggctcggtcccacgactgcaccatgggaccgtttgaatttgtggtaccgtcgtaggacgggtatatttttataaaactttttcatagatgaatataaacgtaaattattgaaaaaataaatatatttgtaatttttttttcgtacctatgtctctctttgcactcacaagtcacgacagtttcaagtaaattacctacaatacattcccaacaaactcattttccacagtttgggtactagatacttaataaaataacagaagtccttttctatatcaaacatattccacagtaaaatgcatgtagtattcattttgcagtttactagcccacaaaaaggcttattgaaataacaaaaaataaaaattattgaggagactgggctgtaagtcacacggtgggtcaagtcgtgtcgtgccgtattgtctaagccacaaccgcaaacactgtaaagcatccggagactggggtgcgtcaacaaagtcgttcaagattctttacagacaaaattaaaggcgtttgatgtgaagagcttgggctgagtttagttccaaactttttctttaaactttcaactttttcatcacatcaaaatttttttatacactcaaacattcaatttttccatcacatcatttcaatttcaaccaaacttttaattttggcgtgaactaaacacacccttggttgattcgttactccgttgagcaaactgttaatgaaacagaaagcagaacaaggcatccaaactaaggccattcacattgcaaatccctcttttgtgtcgacttaaggtgagagagtgtaccacattggatggagttcctataaagcaactcgtttcacaatgcatgctattttaatgggtcccacgagcttttcacctcccctctctctcctctcttcctttccccatcgcggaggaagcctcgtcgccgtcagccaagtccacgtcggcttcgctctccctgccctctacaccggtgccgctctgctcccttccaccgccggcgtccttctccctgccctctgcatggacgacagcgccatcgaactcactaggtccggcctagggctcacctgatctggtctcggcagcagtagcagcacggcggcggcggcatcggtagcttgatggataggatggcgtgtggatggcgcacccgctccactttgtcctctcgtttccctcctcaccacagcggtggtgcaaattgaggctacaccccaaatcccctgcctcactcccacaccagcgacaagctccaccgacgtctctcccctctcccctctcatgtggcaacgagcttggcgccaccttgatgcagacgggggccttgattgtcggatctggtcaggcaaatcggcgagtcgatgagctcctcagcagtggggcgaagagaagggttgctaccgccatcgagcacctctacgctggtccatggcaggagctcctctctctctctcctttttttacgcttcctctcttttgttttctgtcacctataacaacgccacccgttctctccgagggagcgaggagcatgctgttgagctgtgatccaaattcatttgcacttaataaaatacagcttctgccttagcgaagcggaggcccgtcgccggaggcttgggccggagcccccacggtacggatcgtcattccttttaggtttccaccatatatatacctcttgtaagccgccgtgtggcgttgtatcctcacccccgatatagtgaagatattttgctggttgacgctcgtggtttttctctcctactttgggagggtttttcacgttaaatctcgtgtcttctgtaattgatctgttgttttttatcgtaggaacttgacatgtaggtggtaggctggggctgaatatcacctaagacatgtttggttgtagttgtagattttagaaaataaactagaagccagaagatgaaaaatccagtttctctatatttttagaagctggctaccatccagctacttctcataatcttaaacttcgtaaactgggattttcagaagcactgtgaatagcctaaaaagtcgccacgatttggatgggacgtccaggcatccggaagcatggcgtacaagatggggtacctttaaatcggagactgactgagtgaaggttggttggttcacacttcacacacatctttttcgaccaactgaagtactactagttaataatctgcctttttaagggagaccggcacgcaggcccggcaatacctacgtactgccatggatggcacatctgccaaggttgtgctcttcatcggcgccagctttagcttcttcctcatcacgcatgctcagcaacaagctactcgttgcagaccacaagagagagacgccctcctgtccttcaagcaaggcatcaccaacgacagtgtgggcctcctctcctcatggcggagaggccatggcgattgctgctcatgggcaggcatcacctgtagcagcaagactggccatgtcgtcaagctcgatgtcaacagcttccttactgatgattcacctatggttggccagataagtccatctttgctgtctctcaactacttgcagtacctcgacctcagctcaaacttgctggcagggcctaacggcagtgtcccagagttcctaggttcaatgaacagcttgatacatcttgacctctcctacatccccttctccggtacactgccacccctgcttagcaaccttaccaacttggaatatctcgacctctccttcacatcattttctggtacacttcctcctcagctgggcaacctttcaaatttacggtatcttgatgttagtgagatgcagaatgtagtgtattcgactgacctctcatggttaagtcgtctgcatttgttagagtatattgacatgagcaatactattctcagcaaaataacgaatttgcctgccgtgctcaacaagatcccaactctaaagcatgtcctccttttgaattgttcaattccaagtgcaaaccaatccatcacacacctaaaccttacccagcttgaggagcttgatctctctctcaactac

SEQ ID NO: 28873 - DNA, 17452 bp, Oryza sativa
  unsure (1)..(17452): unsure at all n locations
aatcttgaaaacctaattatatcctccaattacataactggccaagttcctggatctatttgtgagtcagaaaacatgaaacacttggatttgtcaaacaatttatttaagggagaagtacctcactgtcgtcgtatgcgaaacttacgtttcctgctcttaagtaacaacagcttctctggaaagtttccccaatggatccaaagcttctcttcactggttttcctagatctttcatggaacatgttctatggttcgttaccaaggtggattggagacttggtgaccttgcgtattctgcacctgggtcataacatgttcaatggagatattccagtcaacatcacacatcttacacaacttcaatacctgaatttagcagacaataatatatcaggtttaattcctctatctttgtcacattttaatgaaatgactctaaaagctgtgggtgattcaatctcgaccctggcatttgatgagtcatttgatacattttccctcggaatgaagcatcaaatactcaagtatggatcacatggggtcgttgatatggttggaatcgacttatcgctcaatcgcataaccggtggaattccagaggaaataacatctctcgatagattgtctaatttaaatttatcatggaatcgcttgagtgggaaaattccggagaacattgggtctatgaaatcaatagaatcactcgacctctcaaggaactacctttgtggtgaagtcccatcaagcttgacagatcttacatatttaagctacctggacctatcgtacaacaatcttactggaaaagttccatccggacgccaacttgacaccttgtacttagagaatccatccatgtacaatggaaacattggtctttgtggccctcctcttcaaaggaattgttcaagcaatggttatgcacaagggcatggtgatcacaaaggacaagagaaggattccaattcaatgttcttttactatggtcttgcatcaggttttgttgttggttattgggttgtgttttgtgctctgctattccacaagtcatggagagtcacttatttctgccttgtggacaaggtatatgacaagttatatgtgtatgtggtcattacttggaccagatggatgaacactacaaattaattaagcacagtaaggaaatgtgttactagcattaagcaggttctacttccgtttatagtcattttctgtttttggtggctttgtaataatggatgaatttacacttgtgggacattttgaatcccatacgtgattcaatttccattagattttttttagttgtgactagaatttctatgtgttataatgatcctgctaacagtggattcgcaataaggccttgtcatttgtttagatcaagcattttgtcctcctccctccaaaaattattatatatatttttgactaataaaaggaggctccacattcgctcttaatgcgtagaaattctcactttcctcaaattaacttgaatgaccgatcaaggtgactagatttagggtgaataggcgcctcgacaattttcttacgaaattgatgaccatttcctgtttttcatccgacgcacctctcttctgacacaccatgatcacgtagtcactgaggacctactagtgatcataggagtatgtcggaaaaacccagaaaaatgtggaagccaaaacaaggaaaaagaaatcggagcagaaacggtgatggcgccatggattaacttcaacgttctccccctaattcttgtcgccatcgcccttgagctcaacgatgccgatcccattgcataactcctggaatggaacacggccgagcggcttcatcagtacggccgccagctgctcctctatacgaatgtagttgatgacgatcttcccgttctccacgcactcccggatgaaatggtatctcgtgtcgatatgcttgctccggtcatggaaaacgggattcttggtgattgctatggcagacttattgtccaccatgatctccggtgctccaggctccgagtcaagcaggtcgctcaggagccgagctaactagatggcttggcaggcagcagctgtcgcagcgatgtactccgcttcgcacgatgatagtgtgaccaccttctgtttcgctgattgccaagagacaggactggagtcgtggaaggagaacgccgctcgtgctccggcgcgtgtccagatcgccggccatgtcgctgtcgctgaagccatgcagctccagccatcctcctttccccctggcgtaatgaacaccatggtgtcgcgttctgccgatgtacctcagcacatgcttcaccgccgcttgatgatcctcatgtggttcctccatgaaccgactcaggtagccgacggcgtgagcaatgtcggggcgcgtgttcaccagataacgcagcccaccgatgatgctgcgatagcttgtcgcgctcaccggtggacttgagcttgccttactcagcttcaggtgtatctccatcggcgtggcgcatgagttgcagtctcccatgccactcttgtagagcagcttgtcggcatacgccgactgatagagcgagatccccgtctacccctgcttcacctcgagcccaagatagtaggacaagagcctgaggtcactcatcttgaagatgttgcacatctccttcttgaattcaccgatgtttgcttgattcgcgccggtgatgatcaagtcatccacatagacgccgacgatcagcttcgcatcgccctggctgtgtgtgtacatggcgtgctaggtggcgctcttccagaaaccaagcgacagtaggctgtcgtcgagcttggcattccaggccatgggtgcttgccggagtccgtacaaggccttgtgaagccggtaaaccttgtgctcttgtccctcaacggaaaaacccggtggctgttgcacgtacacctcctcggcaagctctccgtttaggaaagcacttttgacgtccatgtgatggacgccccagccggcgtgcgccgcgacggcgagcaggagccgcacggactccatgcgtgccaccggcgcaaacacctcttcgaagtcaatgccggcttgctggatgtagcccttagcgatgaggcgcgccttgtacttgacgatgacaccgcgctcgtcctgcttgactttgtacacccacttcagtctgatcgggcggtgcgacggcggcgggtcgacgagaacccatgttttgttgtgggtgatggactccatttcctccatcatcgcgtgccgccagctcttgtgttgctcggcctccttgaatgaggccgtctcctctgccgtcacgaagaacagttcaccggcagcagctcgcggtgtgagaggcccggcacaactgtatcttcgagaatgttggcaatggtgcggtaccaaagtgggatgttgtcgtcgtgattggcgtccagggcatcagtgagattgctcggtggcgacacgaactcgggtgacgtcccacccgtttcgtccaccggcgttgccggcgatggtggcatgggcacgtcccctgaggccaccgacggtgcccctgagctcggagtcgacccgccggcttgttcctgttccgggcgttgatatctatcggcgccacagtgtattcaatggtgatgtcggtgacaccgcccttgtcgtcgccgccgccgtgagcagcccagtcccagctggctgcctcgtcgaacacggcatcacgcgtgacatgcacacagttagatcacgggttgaacacccggtatgccttggacccagcctcatagcacaggaaaatcatcagcgagctttggtcgtcgaatttcttcagattgggctttgtgttcttcacttgcgccacacagccgaatgtgcgcaggaagtggacggccggcttgatgccatgccaagcctcatatggcgtcttgccggacaaagttcgcatgggagcatggttgaggaggaacaacgccgtcgaaaccgcctccccctagaagcgagcagggagcccctttgctttcatcatggagcacgccatggcgaccacggtttgattccgccgctcgactacttcgttctgttgtggggagtagggcggggtgagttgtcgctggatgctgcggtctgcgcagtaggcaccgaactcgatggaggtgaactcaccaccacgatcagtcctgagcaccttgagcttgcacccggactccagctcggccgccgcttggaagcgcttgatcgccgccggtgcttgatccttgcttgctagcagagtaagccatatgtagcggctcacatcatcgactagtagcaagaagtagtggttcccacccagcatcgccggcaagatcggcccacagaggtagccgtgcacgaggtcgagcaggtgttcagcgaaatgcttcgcatgtgccgggaacggagcacaacgttgtttcccggccaggtagctatcgcacacttggtcgacgtggtcgattagcggcagacctcgcaccatgtcaccctgcaccatttcctcagcgattgaaagctaaggtgaccgtacctcgcgtgccaccgccatgactcgtcggagctgcgggtggtgaggcagaccgggcacgccgcgttgatccggatggagtaaagccggttcctcgatcgcggaaccctcgccaggaaccgccgatcttgccgttgcgcaccagggactcgcagccattctcgtcgagctgcccgaggcttatgaggttgacggtgaggcggggaatgtagtagacgccggtcagcccgcggtgctcgccattcttgcaggcgaagaggatcgtgccgtagccctcgatcgtgacgacggatccagtcaccgccgtgttgagctcggagaagacggagcgggcaccggtcatgtggttcgtcacgccggtgtcgaggtaccacaaatccgcgggatcggggtcgccatcaagatgcgcgagcacctttttacctccaggaacacgggcgcggacaccggcgtgatcttcgacgtgggttcggctggcgggcatcgccgctggaccaagcacgcacgcgccatcagcagcgtgggctcgtcgtcgtccttcgtggcgatgtgagcctcggccttcttggccttggagcggcagtccttggcccagtggcccatcttgctgcagttatggcacttgtcgccagggtgctcctggccacgcccacgtctgcgccgattcccgcgtttcttgccgctgttgttcgcggccgcgccgggcgtggtgccactgctctcaccgccctgctcgcggttcttgagccgtgccagccactgctcctcagtgagcatgagacggccgccactgtcaacgacctccttcggcttggccttgcatttctcgacggagcggagccggacggtgacctccttaattgacaggtcgcggatgtcgaggagcgtttcgatcgagattgctatctgcgagagatgctcagggacaacgttagcagcttgttgacaacatctatctcggggagatcgcctccaagagtgcgaatgctgtttgcgatgccgaagatgcgcatggagaagtcgtcgatgttctcgccatccttgaaccgcgcatcggcaaactcccggcgaagtagctgctcattcgcctctcgcacgcgccgagtgccgacgcatacggtcttgatcgcttcccatgcggatttcaccgtgcgcttggtggagagggagcgaagcatctccggtggcaccacacgcaagatcgcggccagcaccagccgatcgtcgcggtactcgatctcctcgtcttcatacggctccacggcgtgccaaagtccctgtgcttgctggttgacggtcatgaagagcgcacattcctcgtagttggtcctcgttaggaccgggtagtggacggcggcgctcgactccctgacgacgcgtggctgggcagcgaagggctgtcgctcgccacgcccgcgcccacggcacggcggggactcagcaggattgtggcatggcggtgtttgtgacgggcgaacgaggggagagcgtgagcgcggcggtgttggcggcggcgagcaggatggccgcggtggggtatgctccgacatggcaccagcgagccaacgaggctctgatagcaactgttggcgaaccccgaaggtgttcgaccaaattcacgatcaagaacagagtatgcaaaagagaaatttttgtgctgctgaaaacttggcagcgttttttaatgcattaggaactttaaataggcaaaatacatgtctacgacctatcggatcgtgccaacccatgaccgtgattttcgccatacctcctcctacaactccggcacttcgccatgtctcctgagcttgaccgcgccatcccacgatcgaagaacagacgaagcgcacacactccctaacaaccaaagcgaaaaactagctcccacatgaacgtgcatgcatcagagctgatacatgcgccatgatctccacaaaacagagtcacgtgcttggagtagaaataggagcagaaatggtgatggcgccatggattaacttcaacattgctcctccattacaggcatattattcatcctcatgttctgacactcaaggtgctggttgttccttttcagcaagtgttgtagactcacattggatattagactcaagagcttcttttcatatgagacatgatgtttcacagcttcagccatgctctgcttctagtaaagcctcaagtgtccagacggctaatggtactgatttactctgtttgtggcactcttcggacagagatcgcaaaaactaatcggcgaggcctcttgatattgtcttatcgcgcgatggatcggagcggtggagaagcttactacacatccatgccttttttttgctgttagacatgcatgtctttttccccttcttataaagttttctgtcaaattacttatccaatctactattcgattacatcattgtattcgttgcaattaaatcttcagaaaagatcttacatgattatattacgatgaaaaatatttatatttgtaaattgcttttattatatacgtaagttacttttatcatatatataaaaattacttttagatttgactaagttacttcttatacattcataatgctctaagttgttatttttattattgtttttagtcaattctataatttatggactttaaatttaatttttaggcagaccatatttttctccttacaacgaatttacttctaatgttgtaacaacttacttccattttgtgctaagttacttttatgattgatataaattacttgtatacttttgtcgacaggtgatacccgtagaccggataaatagggtattggggtacgttggtatgaggatctgcacaatacgacatcaagcaaacacagagatagggattatactggtttaggccccttagaaggtaatagccctacgtccagtttatatgatattgatatagaaaatcacagattacaaagagaacaactgaactcggcaataccggtgagatcgtagtcgatagtttcgactagatgacctggcgagatgacttcgcatgcttcggcttcgtaggctatggtggatttgctggtagaaagattcgatgcccgtaacccctcaggaggttctccttttataccacagatcaccttgacctncaagtaagactcgaagatgttggaccccgtacagtatagagaacaggaacctctncgagtaggactctgttgtctcccaactgatcaagataattttcataatagccgtaatcttccttaccgcatactgaaatattccatatacatgaaggtataccatacttgcatattgtgtagatcgtaggataggccttatccgtaaccctgatagtagcccccgacttcaaattaaatgagctttgttgtttacttccaacttcacttgtcgtccgcgactacccagatgcgacgttatcgtactcacttgatcgttctcagtgcaaactgaggagacatggagttttcgacaacgccacatgaagttcaacggtccacaagtgaatttaactagaagtctaaacagctgccagcaacggtccttagaaatttccggcggcaatctctctcctttcattcaaatacgaaccgcctgttagtgggcttatataaagagattttgggatttatttggagtctgcacgcctagaaactttccagcttccagcgcattctctctctcggttcatccgcctcccaaaaaccctagctttcttcctccttctccggcgaacttccggtgaccatggatcttggcaagacaatcaccgacaccgccgcaatgaaggagctgcaggtggagggattacttctcggccgtgaagttctggagcgagatgaaggaagtactgaacctaatcctccccttggtcgcatggtcatagtagaggacttcgttcgttgcggatttctaccaccgctctccaaatttctgttgttggttctgaatttttacggtctttctcttcttcacctcaatcccaactccatcacttttctgagcatcttttctcatctctgtgaggcctacattggggtagtgcctttccttgatcttttccggtatttctatgaactccggtggatggaataggggaggatatccggttgttgcggattctgcctccgcgatcatatgcgggcaagatacatccctttccaatgtcatttatcccggagcaaatggagacagaggtggttctttctcgaaatcaagaaccccaatcccgttcttgttgtgcctgaagaccaaccagaacggtcttcggattggacctccaaaccgccattgaccctttcccttgagacatttgtcgggatcagcgatgatctgcgagaacggggactaactgggtatgacgtcgctcaagacttcgtaagtcgtcgcatccagccgctccaagcccgtgcacatccggcgttcgactacacgggggcgaaagatgtgacacggatctcattgcggggtactcgttctcgcgtcgtcgtagtccttctcgtcgtcaccctgtccttttgagcttaacttgaatcgctttcctcttacaggtctgaacaacaacatggtggctcatcaagtaggccaagtactggtgagctcgccatctacagctgccgagatccccatcctagtctgcaacctcgaggacgcagacaaagccgtcgctatcaatgtgagtatccttggtgtattttattcccttgtcaaaaaacgaagtaactttaacacttgtaggccttgcccctgacggacgccattggtccactcgtcgatcaccaggcctcagcctcgttgaagtccaatgtctccgaggagaccactgccgccatcgccctcgccgagaacagcggcaccgcaaagaagaggaaatgggccgtcacttcttgcggaggcaagactcgtcgtcaggcgagcggctccgacgtaagtgtatctccatcagtcctccacatttttattataagaaagtcctgatctttatcttacgcagggtggaagcgatctcccaccaactccaaagaagcggctgctgaagggaggtgtttcccggtaaggaaaaaacttgaactcgtagattattcgatctcgttatctctgtactctgttctcatccactgtgagtacgcttgttaccagcaaggcttctccaccgtcctcggcgcaaagcggggaccaggtggccaccagcgacgtgccaacagtggtcgcgactcggacctcttcagccgccgcagtttccccgaggatcggcaccatcgctccaccgctgcctccgtcgacccccgcggccccatcatcctggtctgaggtactggccgaagaccggcgccttatcgaaccaggggaacaaatggtggccggcgtggtcgggcgtgctaacgctcgtgcgactgaggcggagaaatgagcagcgggcctcgagcaggagaacaaagaactacgcgaggatttgaaaaagatgagggaactcgttgctgggaacgagaggcaattccgaggcctgcggcagaagtcgtctgagctggaggaccacctgacgacaatcagggaatcccttcgcaaggacttcacccgattacaccaggttgctggtgaactcggaatctactcctcgattccgcagcaccccgacgaaacctccttgacgttcggtctacaagacctcgtcaaggcgatggaggcagcgcctgcaaaacacgccgcgaaggtcgctgaggagacttgtaccagagttcgcacgggcgcctgccatgtcctcgcctgcgtgaagatcgctcatcctgaggtcgacctggagcaggccatggcgaagggaggagctgatgacacacgcgaggacgtgatgtcggaggtggcggatttaggggagttaatcctctctttttacgaagagtaaaaacccgcgtcttctatgttttgaactctttttgttttgtaaacacttgtcgggcttgcattgtctttaaacaattatcccttccggctttagtaatttgtagtatttgttatgacttgtagatgtcttgatgttgaggacgtccagcagagtggacgtcctgattcacccgagttcgctccggttgcatctccgcaagcatccagtccggatgtaaacgagaacgccatgatagctgtgaacgcagctgaagtcgtcacttcgcctggcccaagtccgaccacgcttcttcgggagaacttaggttagatattcttggatcactttgtctgcaattcttgcgaagatggatcccttagaattttttcctttttgcagccctcgaagaaacgcttgctgaatgagaacgcctaatccaagtctggaagacgaaatttgaagtggcggagctcgaacgcaggattgagattacccggaaaacttaggatgtcgagactctttgaggacgtgaggtttggttgaactcgtatctcaagagctgctgcgacgtcttggcaagggtttgcgaggacttgcgagttgagcgcccagcgcctaaggaatcgacggcaggatatgtgccttggataaagggagtgtgtccccaactagatggcatcggtgcccgtagcgacaacgcctaaaagaggagtgtcgtcgagcaagtcgctatgccgggggtcactttctcacatgtatccgagatcaccgtccacatatgaacctggggttccttgaggcgggctttaggaactcgcggttgtagaccgagcagatcaatcaacttgcacaatcatttgctcctctagcggaacgggtctttttatccatggactggcgatggccgtcgtggtagatgtaatatctgcaaaaaacatctcaaacaagtttgtaatataacaatgtctggttcaacttttgtaatagaattgaaatctatctcctaagtacaacttaaataggatgtgtaagagtgcttctcttttgtaaactgctgttagtttattttgagttgtgagctctccctagcccccagccttgttctcggagaactgttctcggaggagaaggcttaaaaacccataactcgcctagttgaaactgcggtttacctagcccccagccgtgaagttggaaaaatcaatttccgattacatggcttggttaatacgcatccagtgagctctctgacatgaccaattctgacatggtcgttcagctctgattaatctgacaaggccttattaactctgggcgtcccgaggcgagatccccttaggtttcttggaggctttgtcaaaacagcgtaaagggacgataggttcgatttcaacttaaggtgttatcgtggtaagggatctctgggttaaacactacagataactgaaaagagttcgtatacctctgaaataagctttattttactgttctgtaaggaggaaacttacagacttggatacattgaatctatacatagaatttacgtaattggtcaatgttccaggagtttgataattcgcggccttcgccatctgcaatcttgaatgcgcctggtcgtaaaacttgtaccaccgtgtacggtccatcccacttaggtgagagcttgttgtgccctccttggttttgtactcggcggaggacgtaatcgccgacggcaagtgtgcgagctcgaacgcatttctcatggtatcggtgtagggcctgctggtatgcggctgctagaacggcaactcgttcgcgatgttcctcaagtaggtttacatcatcacttcgtctttcctcctggtcctcgtcagagtattgtttaactcgtgtactctgatgccgcaactctgaaggtagcatggcttcagatccgtaaacgaggaagaaggtgtctccttattggacgaagtcggcgtagttcgcacggcccacagaacgaatgggagctcttcaacccagtgtttgttgtaggccatgagcctatcgtacacacaagttttgatcccttggagcacgatgccattagcccgttcgacttgtccgttactctggggatgagaaactgatgcgaagcaaattttgactccaagttcaatgcagtaatcttgaaaatcaccgcttgtgaattgggagccattgtctatgaggatgcgatgaggctatccgtatctgcagaacacccctttcatgaacttgatggcgttgtcggctttaatttctcgtgtgggctctgcttcaatccacttcgtgaatttgttgtttgccacgaacaagaatttgtagccgcccagtcctcgtgggaacggtccgagtatgtcgagcccccagcatgacaatggccaagtgagagggatggtctggagtgcttgggttggcaacttcgtgtgtttgctgaagaactgacaggcttcatatcgttgcaccatgtcgcaagcatctttgagggcggtcggccagaaaaacacttgtcgaaaagcttttccaaccatagtacgcccgctggcgtgtgacccgcatataccttcatggatgtcgaggagcagtgctttgccgtcgtcggacgaaacgtatttgaggatctcgttcgggcccattttatatagatctttgtcgatcaaacaatagattctggcctggcgggatatcttttctgcctcaacgtcgtcctcgggtagctcatcggtgctcaaaaatttgataagcttgattcgccagtcgtcttttgtctcgatgtccgccatgacgttgttgacctctctagcccttaagttgatatcggaatcggctgtggtattttcgtcgtgtgactctttcacagatggttttgtcaggatatccagaaaagttcctagctcaagaggttctcttctagaagcacaccgtgctagggcatcgggttcgacgctgtcttttcgatagacatgtcgtacctcaaggccgtcaaatttccgctctagtttcctgacttcggcgaggtacttggttaacttggggttggagcacttgtagtctttgtgcacttggttcgtgactaattctgagtcccttttcacaattaatcgcttgacacccagtgcaatagctgctcttagtcccacgaggagtccttcgtactcagctgtgttattggttgcccggaagtcgaggtggattgcgtgtttgaactggtctccagtcggagctgtcaaaatgaaccctgcacctgctccttggctgttgaatgcgccatcaaatgccatagtccatgtctctttatccatttgactgtctggtctattctctggaatagtccagtcagctacgaagtcagcgagaacttgggatttgatggctattctcggcacgaagtgaacatcaaattgactaagctcgactacccatttcgcaatgcggccgacaacgtccttgtttctgacaacttctcccaagggaaaagaggaaacaactgtaaccttgtaggcttgaaagtagtggcgtagttttcttgatgtcatgatcaccacgtagagtagcttttggatctgtggatatctggcttttgcgtcatggagggcctcgctgacgtagtacacagggcgttgtactttttccctcttgacgacgataaccgtactcatagaataagacatggcagcaatgtataagaaaagctcttcattgtattgtggtggattgtggtgcaacgagtacagtgggatttgacaagtagtgtttgagcgctatgagtaaagcaaagaagggttgtcctcgttctcccatcctagcgacgaagcggctcagtgctgcatgcatccggttagtttttggacttccttgagtcttgttggcgacttcatgttctcgattgccttgattgtctcatggttagcttagatgcctcatccggaaactaagaaaccgagtagcttttctgatggtactccgaacgtgcacttctccggatttagtttcagccgatgtcgtcggaggttgtcgaacgtttcccttaggtcatcgatcaatgtgtcgcttgtcttcgttttgatgaccacgttggcgacgtaagcttcgacatttggccgatttgatcgccaagagctccttggatcttgcgttggtatgtgttccctgcgcttatcaatccaaatggcatcttggtatagcagaatacaccgaagggcgtgatgaatgccgttttctcctcgtcctcttttgccatactgatttgataatagccggagtaagcgtcaaggaaacttaacagctcacagccggcggttgagtctagcagttggtctatttgagatagagggaaatgatccttggggcacgccttgttgagatcagtgaagtctatgcacattctccatttcccgttggccttgcgaaccatgactggattggcgagccactctgggtggagaacttctctgataaaaccagctttgagaagtttgccgagctcttctcgtatggcttgttttcgatcgggtgcgaatctccgcagtttttgcttaactggtttggcattggctcacaccataagtttgtgctcaatcacctccctgggactcccggcatgtcggacggttgccaagcgaacacgtctacattgtcgcggaggaaggtgacaagctcgagttcctatttgctggtcagcgtcgccccgatcttgacggtcttgtcagggttggtgctgatcagcgggacgatttggattgcgccgtcgggtcttggcgtcttgttgggcttgctcactttcgtaggtggctcaactgcggcgggtgggttgggagtttgctcgaccatgtcaaggctccgcttgttgcattgtaccgccagcttcgcgtttccttgaacagtgattgtcccttttggtcctggcatcttgagcaattgatacgcgtagtgggacgctgccataaacttcgcgagtgcggtccttcctaagatgggtttgtatgccgtatcaaattcagcgacatcaaaggtgacctgctctgttcggaagttatcggcctgtccaaacgtgacgggtagcgtgatcttgcccaatggcttgaagggttgatctgatggggtcaactcgcttcgtgggattcccatcgcgtccaatgtgccagcgaagagaagattgatggagctgtcgccgtcgatgagaacccgtgcgactttgatgttccgtatggtgggctcgaccacgatcggatatctgccgggtagggttgtagtttttgggtggtctgcctccgagaactctatcttgtgctgagaccaattcatcctggcagcaactccttgagatgtagagtgtcgcgaccgagaaaattgcattttcccgaacgctagtgtattaatccccgtcccaggaaaagccggggtacaccatacaaacatgatataaaagacacatctttattatatcgataatatttacattattacaaaggcacttaaggcctgacaaccaaaaataaacagcagcggactagcgggcctacggctccatcttcacaggcgctcaactggggtataagccaggactccacctaagacatcttctccaaagcttctcttactgaagggggaagaaagatagagcaagaatgagtacaaccacagtactcagcaagtcacaccggagatgcatgattaatgcaagggggtacaaggggataataatatcggggttaagttttgcagtaaacagcatttaaaagtcacttagttgcccaaagccattttataaagacgatcctagagctacacagtattattaatcaaggccgtgaacccacacgaacctgccttaacccaaggcctacgatgattcagaccgaactggcaacccgaccctgggtcccagctcgtcccaagccaacccaggccaaccatttcacattttagttgttaagcaggttttaagaattaaaacactaacttgggtacattgcttggcttgcccataaccgagggcgcggctattcgaatagattatactctgatcagaggtgtacatctttacccacaagacacatcttcctcacgtgcaaccacgtgccacataacaccacggtatacagacggaagacgtgacatagtttccaacccatcctagccatagacaagagtaccgacccaatcccgcctacggccggaacctccgggacaggcaggcaggactgagcccctagcagcagggcaccaaccctgtgctatgacatctcgactaccgggccgcagctcctgtagccttcatttgccctggagaatgtccatcgacccccgacttcatccatctccaatccgtgtacttttgtttataaccagactgagccacaaactaagccttacccactagacatgtggaagtacggtagtgcttagcaacagaggctcgaagaccggtccttatatggccgaggtgctactatcaaaaccatgcaccccgagcccagcctaaaaccattttggggattttgaatagagggggcggtgtgaatccaattccacaataatccaacaattccgaagtgtccaggtgatgagattatcccaaagtctagagttgtaaaaccacctaatgttacctaattaaacagcgaagcatctacctaaaatcatgctagtggtaccatgagtagagtgtccactagttggggttttgtttaatctagggtgaacaaggtaataataacaataacaataataataaggtcataacaaaggtaaataggcatggctaaataaaacagtgataacgcgggaatttaaataaagcgacaatgcaataatttaaatcaaaataattttataaactgggattcaatatgttcaaggatgatgtgacttgccttgctcgctttcccaaacgccggcttcaacttccacgaagagcggatcttccgaagctgcagcgtctacacgaccaacggaaaagaaaaggcttttactctaataaactccaaataacaagcagaaacaaagcacaaaaatgggtt

SEQ ID NO: 28874 - DNA, 788 bp, Oryza sativa
  unsure (1)..(788): unsure at all n locations
ccgcgtgataactactactatanggcgaattcgagctcggtacccgaggtgagtaagtcttgtaggatcaaatcacaaaaactaatccaaccaggggggtgaatggttggtatacccaaaaaccgaaaacttttagcggaaataaaagttaccctcgaattcgacggattgcggtctgaccgaaattgccctgccggtctgaccgcctggttgccgtcggtctaaccgagattagatcttcggtctgaccaccgagatcatctgccgcttgctgttgccgccgccggtctgagcgcctcgctcccgccggtcggaccgccgcgatgccgccggtctaaccgccggttagtcgccagttaaaccgccgaaacccggtgaaacacaaatcaaagaactcttaaagtggatgacgactttattacttctctctgtgtttacaaagtgcaccaacagcactccttacaaaaatttcgactaaactcgaaaccctaactcaaaactcaactcaattgctctcaaaagcgataccgggaagcctcacgctccccctctatttatacccgaggtaggcagcctaaagccatgaaccaaactcatactaggagtcctaaacaccttaggaaaccctctagtacaagatagaaactttagataaccaatcgtaccaaatttggactccttncaaaatcgactncgcattccatacgcacacaataactncatcgtatgccatatggaatctncatcaaccacgtgcatcaactctagccttagtatnctgcatgatc

SEQ ID NO: 28875 - DNA, 7077 bp, Oryza sativa
  unsure (1)..(7077): unsure at all n locations
acggcttagattgaccactcgataacaccgggcgaattntagctcggtacccnnnnnnnnnnnnnnnnnnnnnnnnnnnnnnnnnnnnnnnnnnnnnnnnnnnnnnnnnnnnnnnnnnnnnnnnnnnnnnnnacttgtacagtataaagtcgaccaagaacacaaaagattgcagcatacaattgggaaataaggggggataattggatcacacacctgggtccttgatttgtttctcaaatctttctacccaatgatcaaactaacctagctagctcctcttcttgatctttctcttcttaacatctgttacgagcaaagcgatcacctgtttgttcacaaaaattgtttgatcaacatgaatagagattataaaagaaagaagagcacagatgcgctagttccagatatatagaatgttaggaaagttaatctctcggctaaggaaatcgggagaaaatcacgcgttatcgttttccacccgttaaccagcgtgattagctaaatcaaatcacgattaaatttccttaattgcacgcgcaataatcggtagcgctttcaacgtttccttttggagcagcccccgattccctcagcgcaaaataaaaggggaggccggcccgtgagaaagatgacgatctcactcacggttccaatctccccgacatcccaaaaccctaatttcccgattctcagttgcactggaagggattcgtagtgctattcccggacagtgtaggtggcgaccggaaggccgctgccactccgcaggtgatcgccggtgaccttttcgggatcaagccggtgtactcactgctacgaccacttctacaccgacaattcgcgaggtggttcgaggttctacatcctctacatccaccccgaaccaagcaagaacaattgcaatggcttcaaacaacggtcagttatcctaaattccgcattagggtgatcatgttaggcttagcacttatgtcttagtagattcgcaaagtctacatagagtaccaattttgtctcccgaattcaaacaaaaagaactaacagaaattgggaagagtacagcccccaattttagttacttcttttccgaggtagaatgaaggactaaactcgcttttgcggctatacgctgcttccacgcacaagcgctcagctaactttctgagaaattacttatatatatagaggaactgatgttcgttcagaacacggtaggaaattaaaagaggccgctgttttgccaatatataggacaaaggcctggtttagttcttaactttttttttttcaaacttctaattttttcatcacataaaaactttcctacacacataaacttccaacttttccgtcgcatcgctccaatttcaatcaagcttttaattttagtgtgaactaaacacacccaaagaaaagatgccagtaggaattgttcatttcaatccatatatttaactcaccagtcagcttcattgcaaagtcagaccttcttaaagtaagagtgtcacgaaactgagagggaacgattggactaatttatattcattgcttaatagtgatagacacaatcctatttttatatagatgaaataactagcctctaagtgaagactcgaactaatcttatctttacctctaattgacatcttatcccaaacagtgccacagtaccacgagacactgttcatccaacagatttgggctcgtgggcctcggcctctcagcccgatgcccattatactacacctctcggttttaatatggacttctaaaacttagacgactccctaaataaaacataatactactaactaatttagccttttacatcttggcttttgacactgcaaggaaagacaatgcaaatatatagatctaatattatgaatgatagcaatatcattgtgccaacaacacccacgggtggacctcatccagatgctgttacgagaaggaaaaaagttatctatgtcctgagtgtgtaaaaccagcaagcttgatgaccatagtaatcaacagaggtatatatatatatatataaaaagaaacataagataatatgccacttggagttgtccatttcaatccatatattcaactcaccagtcagcttcaatgccgagtcaaaccttttcaatataactaggatgatagcccgcgcgagatgtgtatttgtctgaaagcagttataacaaaataaactgaaatgaaattaaagtaaggtgttttctatttttaactcggtgttcattgtatatctttttttaagaaatctcgataaacttttattggcaataaatgtttttttacaaccctgtcaattctctttttaattgattcatatatatatgcaattcattatgcatgtgaatcaataatgataacttctttaaaaaaatatttgttatattttgaatttagtgattgagtgattctaatttcgaatttgtttcaaatcaaattattgttttattctagatttttctttttaaggattttaatttatacttaatttcgtatcgtgttgtatttggactcattttttaatagttattttattattccaaatttcagatatttataacttatatttttatatggactgttgatatttcatattctacatggaatcttgttatacattttttatagttttattgggttttctaaatttttgaatgagaattttaatcaaattgctatttttctgaatttaattttgaactcctcagcgatagaaatgacactgttttctagtacttgtcggagatgcggaacgtctccctccggccctcatctcagtcctttgtgcttcacataatcatgtagcgtgctattaggctaagaaagtcatggaaagtcgatgctagtgcttcgatcggtgtccacctcactaaggttgtgttcttcccactcctttcccaacttagctcccttgtttttcgtgcgcacgctttccaaacaactaagccgtgcttttttctaaaagttttctatagaaaaattactttaaaaaacatataaatccattttataaaataaataattaatatttaattaataatattctaatgtaatgagctgcttcgttttacgtgtgtgggagagattagctcccaaacccatctaatgaacacaacctaataatatcttgcaactccgcctccgttgagtttaggcccagagtatgtatcatggttccaagctctttggtggtgattgaatctggaatttagactcaaatatttgtagtcagaacagctacgttatcaaaattttatatagtaaatatgggtaaatggatcttgaattatgtatttaattgtaaataacacaacaaaatgcaaataaattgagaaaaatgcatgtaactttgagagtcatgatcattaactatccgattattattatttatacattatgtgtttgttagaaaataggaaaagttggctcgaaaataggacaggagagtgggatctccgaggagagttagagggttgaaggactacgtacttacatatgtgcccacatatggcggggttgggggtactggatttttttaaagatctaatggttaaattattgggtccacctatttaaaggaatatcaatggttttttttctttttttatcaaaacttttaggattttttttctaatttattagatcgtcatggcgtcttaagaacatttgtaaaacgccatgtgacagtttgagagcgtttgtagggagttcaatgaacttttagtatatagcagatgttaatggattttcagtatataatatatagatagatgtgtaaagaatataatgcagtaaactttcttcaaacattatagacgtttacgatgatgcagtctacatttgcaaagttataattgttgatttctaataattaatgttatttcaattatccttaggaattataaaagggaaaggcgagagaaatacaggtgtgattagggtgaacagtttcgcacgtacatacgcatgtatttcatatgtacggacttatgggagaggtggggccattgtatgcggtaagattaatctagtccaacgtttataatatcgaacccattaatttaagtgaatattttaagggttagatattttgctttttaaaaattttctattatttattagagcgccatgtggagcataggagcatttgtagtgatgccacgtggcaacttaggaccgatttaagtgaacgttgatggacaaatatttttttaaaaaaataatgcaaaataatgggtacataatattatataatataatggtggaaactttattttcaaatattgtagagctaatttatttatgtctacttgtagagatttatatgctgtatattctatatttgtaaagtaatttttattcaagatttattatcacttattattattattattattattattattattattattattattattattattattattattattattattattattattattattattattattattattattattatcatctcaattatatacctgaaataaagaaagaatagtaacgtacctagaaaaataaaagaaagtttatgtacgtacacaccttgaacgcatgcaagcagtaccgtacctatatggatcggatcaacacaagctccttgaacgaaagccagcaatacatacctatatatggaacggaacagaggagtacttttgagataaatctaatctaacggtttataatattggatccaccgatttaagtgaaaatcgagagatagatattttgcttttttttctcagattttctagaattttctaatttattagagcgccatgtggcggcttgagagcgttttgagaaaacttaatggacttttagtatataatagaagacagatagatagatagatagatagatagatagatagatagatgtaagagtgtcatgacccaaatttgttatgagatggtttaggaaatttgtgtgccgaattctcagctttggttgttttcccttgacaaaccacagcatgactaggtagctcattgagcttgtctcggatcacagttagaattgtgttatcccaatttggttctgtcgcattcaaaaaataaaagatatatagttcagtctattgaatgcaccatggagttgatagtgaactgcactagattaggagttttctatgactttgtttggttgataatgaggatttttattactgattcttccctttttgaataaatacaaatcaacctagtatctttctgtacatgggtttaactttgtgacaggaaaatattaaccttcgtgaatcatccaaagttactgcatgtaacaatttctactactccgaaattagagcaatactggcaaatttatctagcaatatctgaaacaatttctagcaatgtttaacaaatttatctattattctagttaaattattttgtaattgtttggtttgcattaacaaatattgtcatagcgttagcacgggtaaattactagtattgttgtcattcataatattagatctgtttgtctttccttgtagtgtcaaaagccaagacgtaaaaggataaattagcattattatgttttatttatggagtcgtctaagtttagaagtccatgttgcaggtcgacaatgaactgctcaaaaggaagggttgatgaccaaagcaatcaatagaggtatagcaaaaaaagaaagatgagataatatgccacatagagttgtctatttaaatccatatatacaactcactagtcagcttcaatgccgagtcaaaccttttcaatataagagtgtcatgacccaagagggaaatacccgacaatccttgatgacgaagaattatagtgttgaagttcctgcgcatgctccacttgaatgcttagcacatgctgcacaagtatagtcttgtagtttgtggtatcgatgactcctaaaatctccccatcatcattttccatctcaggatcattggtttcacctagaagcttagcaacaagagaatattcttcctcaacatcactagaacttacatatccaccatcatccgtagcgatgcacgcatactgacttgtacaatccttcatgacatgtcacatgcccttgcagtggtggcatatgatcctaattcttcgccccgtagaagccactgacgaggagcttttcatgggtacctgcactttaatagacttactcacctcggtagctcatggattcatgatggaacggggacgggtgtcgatggagcctggttggtggaaggcacaccagagcgtgcaagaggagataccgtccttgttgaaatagcatttccaaaacggtactttgttgattgttgccgttcctgcaattcttgttctgccaaacatgcaagtagaaacaatcttcatattctttatagctaacaacatcttgaatctcacggttcaaccgcccatagaaacttacaatactagcctcttcatcctctattacatcacaacgcaaacaacttattttgtaactcctgataatattcttctacagatttatccccctggtctgagcgttgcaatttctttaaaagatcacgtctaaaagaaggagcacaaatctagtgtgcatatagttgtctttaagagcaggtataatagcagactataagcaagctataaacacatatcaagaagataaaagaggagagagaagagcagcgggctacagatttgtagccagcaacagcacagactccaagacataatgtatgtgtgacaagtgggatcatatattaatagtgtagtatatgtttatagataactattgtatatattggctattaaattgaccatagatgatttggagctaatagttggttatactattaaacttgctctaacgcttctcatgttgtaggtgctagtccatcaatacttatttgagtccatcacaatgttgcaaaatcattaaattcactagtagcttgcctaaccctatgctcatcaggaataaatgtgcactaaattttttatctacagtcatttctcaatcaaaataagcttcagcattataggcaccatgaaaagagg

SEQ ID NO: 28876 - DNA, 3976 bp, Oryza sativa
tctttctcaatcaaaataagcttcagcattataggcaccatgaaaagatggaatcgtaacttaactttaactttagcatatggatcatcacacacattatgaaaattacctccaatacctcgacgattgaagctcagcaagtttctatcaatattatcctattttagattcaccaacctgtcgagacaattattgatcgttgtaagattggcattcagcatgcgctggaacctctcggtagaggtttgaaccatcctctcgatcacaacagtcatatctctgttgatagctccacattggtctttgaggactttgacaagttcctccctgagcacgcagtccttaaatttatcgttggtgcatgacatggttagtagaatatagaaaatagcacaaggatattatccctatcaactactaggtgatgagagaaagacacttgcactcaagcatcttaccacacgcatacacgtagcaagagatgcaaccagtggcgagaagaatcacagtaggaagtatagtgctactatgcatttttggtggttatcagttgagtacttgagttattttatcttggacctccttgcatcattgtgcaggaagtacagccatcagtaggcatgaaaattcgatctgcattagcaaatgaggtacattactatggtttcctttcagccgtgttccaaagtgaatgcctattgatataattttggagcaaaatgcagggaagttctgaaacaggaaacaccgtagatgtcaaatcatctgaaatgcaacaggtggtacattgcagcacgcaagaattgctaccaagtactactatccaagaagaggtatctctttgcaaggaatacaccattatctggttgcagttctgtattaaatacgtagtgcccctgtcactttgttcaggactatgccttgtcaaatatggaaccggaacattcatgtactgacatcagtgacatgggattgacctgctcttctatcactggtatagcatcactcttattatttgttgccaagttcattacgtgaatggaaagtatgatcacatcattacctgactggcactcccagataaccttgctgagaagactcctgccagcagtacccaatcctccccaaagttgagtgaccaactgagagagatttcaaactcattgaagcttcttagcactcggccagtgagcgtgagggcacaaacgtggggcatagaatgcgtctagcgaatcaatacgattgcaccggagccaaaaactcctgaagtgcatttgaaatttgagcaagcggaagatcccaaggatatacttacagcccgcagcactgggattaaggttaacctgttttttaactcactgactcattttattcgcttaatgtgtttgtaccttcttataatcgttttgcctgatgaattctctcttgttttttctgccccacagaaatctctagttcaagaatgcttgacttttctcaacagtgctaataagtgagtttggcattatctttacaaccgacttcacactactgcatttctaatgcatgtttgtttctgtgtcttttgcagggaacaatttgtagggtcgaatcacagcaactaagccaaccagggagggggggttgaatggttggtatacctaaaacccgaaacttttagcggaaataaaagttaccctcaaattcgacggatcgctgtttgactgaagtgtatacgccggtctaaccgcctgatgaacgttggtctgaccgagatcgaactccggtcgaaccgccgagatcgtctgccgctccctgtcgccgccgccggtctgaccaccgtgtgcccgccggtctgaccgctgcgatgccgccgggctgaccgccaaaacccggtgaaacacaaatcgaagaactcttaaagtggataacgactttattgattctctctgtgtttacaaagtacactaacagcactccttgcaaaaatctcgactaaactcgaaaccctaactcaacgctcaactcaattgctctcaaaagcgataccaggaagcctcacgctccctctctatttatacccgaggtaggcagcttaaagccacgaaccaaacccatactagaagtcctaatcaccctaggaaaccctctagtacaagaaacaaactttacataaccaatcataccaaatttggactccttccaaattcgactccgcatcccatatgcacacaatacctccatcatatgccatatggaatgttcaccttccacgtgcattgaattctagccttagtatcccgcatgatctctgaccactacggatgtcgtcttatccccgagccgactcccgatccatcaccgcaaatactctcccggcatcttgagtcacctacacatagaacaaacaaaagaaaccatattccgagaccaaactatccccaacttgactcattagtagcaaacaacagtattacatacgcatagtatccatctagaagccataatcatgaaacaatcacggatatctaaacaaacaacccgaaaccgaaaccgacacagagtcggccggtcaaaccgcgggctgcgccggtctgaccgcgtgatacatgccggtctgaccggaccacatccagcagtacctgtagatcacctgtgaaatccaatcatctccaaaaccacttcgtgaataaattccaaatatcaaaactaatatctccaatgccaatcgttcatcatagaataacaataaaaaacacctttaattttacacaattaaaaagcttaaaggtttgctccgaaccatatcgtggcagcccagattgcttctttcttactattaacccactgatacatgtttagggaatcggagaaaaaagggcaaactacatacttgagcttcgtgaggagtcaccagagcggcagagctatttaaagaggtgagcactctagatcaacaagggagtaggcattaattagacccaagcgaccagaagttattacatgacaatgcaacccagagctgattcctttgcttttgcagataagagcaggtacaatagcaggctattaaccggctataaacatattttaatgatataaacgatgagagagaagagcagcgggctacagatttgtagccagctgcagtacggacttcaagacacactgtgtgtatgacaggtgggaccatatactaatattatagtaagtaactattgtatgaattggctattagattggctataaatgaattggagctggtagtgggctgtactattagacttgctctaagtgatctgagagacatcatcggaatgaattcaaaagaggtactggagaatctgattgcaatgtgtacatttatctatgttctttagggccagtttggtttgaggcctaaattaggcttgccaattttttggcaacctcaacaataattgtgtatgtttggattgaggccaaattttggcatgcctatataacataggccatttcaatagccaaattagtttaatttggcttcaatccaaacatatgttggccttaccaaaatttggcatgccaaaacttgccaaaatttgacatgccaaattttggtaaggccaacattggtcacgaaccaaactgacccttaatcactggaagatagtttttgttttcacaaacattcactggattacactgttactccagctgcttcatttgcaaactccatgggttttggatgtactaaaattgccactgctttgttatcttcaccagataaaaaagatgatgtccgggattattgactcctaggaaagtacgcagcgctagtacgatggttctcctgtggagtgtccatatgcttctttggtcaaaggtgtcatgtctttgttttgtactacctccattttttaaatagatgacgccgttgactttttctcacatgtttgaccattcgtcttattcaaaaaatttacgtaattataatttattttgttacgagttgttt

SEQ ID NO: 28877 - DNA, 12157 bp, Oryza sativa
  unsure (1)..(12157): unsure at all n locations
gggcgcgcagtgttaactcgtagatcggccgcccagttgtgacagtgccttggacatggatccaccggacccggtggctttatttttacccatacaccaaactttgtgttgaggtttttgccaagttgggtcaattaggcgccaagggtccgattccatggaatcgggtataagagcgttggtaagcaacgtggtttaacttcgattcggtgagggtattggggggtactttttcttaatgtgggtaatgaatcatatggttgaatttaaggtttcgattcccttcttttcattgtgcctagaatgctgaagcttattttgattggaaaatatcggtagatgaggagtttagtgctctttattccgggtgagcataggtttaaccgagctcttagtgaatttaatatttttgccccagtatggtggactcaagtaggggcggtcatctattaaaaaacggagggagtattttgttttatccagttgcttcttaagagctcgccgtgtttcgttccaaaataattcttcaaacttcaaacttttccattacatcaaaacttttctacacacacaaactttcaacttttccgtcacattgttccaatttcaaccaaactttctattttggtgttaactaaacacagccagcgaatgctttggtcaggagttggcattctgtgagagaatcagtgctttgcagtggtttgctgctattatgtgttctttgtaatcatcatacagtgtcgtaccaatattgataatggtgtggcgttaatgtgatttcctctcttttgatgtctgttgctattaatgccgatttattgttttagaaaaaataatgagtcgatgaatattcctctttgtcgatctgagaagcacatttctagttgttttcgtattccgataaatattcgttctgatccatatcgtttcgtttttgtattcgataatatttgactctgtttttgtatctggggtttcctgttttgattttgatttctgagaaaaatgaaaacggaaatggtagaaccagtttctttccgtttctgaaccctttttatcccttgaagaaaacaataaaataaagttaatatgggtgttggggctggtatggaaatgacatggacaagattagatattgtaaccacccatataaaacttgctcttaagatactatgtgctaggagaaagtcctattaagcaaggcagatgctaggacatatgttggatatgtagaacatgaattagtgggagggagaaacatagatgttaagtttaatatgttttttattccaaaatatagcaacctatactagaacatcacctattagtatgaatatgatggattggtcttgaatatgaaacattttgcctcaaaagatggaacattacacattcctaaaacccgagttttttttaaaaaaaatactatatttctaaatgttgttatcatgtggtagtatttcaacaggacatcatttcaagaaaacaaagccctatactccggtcctctctacttaatttcactcggccagctgaagggtgtctaatttggccgcctgcaggacaccctttatcacaagagcttttagggatcgaataagctcctatgtccgacctagaactatctcagggtcatatgtatatatggtccaactagctgaaaaggagaacgtgggagttgtggaagattaattgaacctgaataatctaagttttatcataatattatttttcctgatgcaacacacatgtttttttagtatgtatataatagtcttccatgtaaatctccacatcaactatggggtatcatccaaaaaaaatacacatttcggggtaacacccacaaattcagttcttgagattctcatctcctagcctacccatggtctgatcaggctgcactttcttttggctctctcgatccaatacacaataacacagtatattaccagatatatattctgagagatgattctccctgatccccaacataacttacgttggcatgttctgtgctgtttgcatctgaaatcatcttgaacgctcatcattatttatggcctgcacgtcgatgccaatgaactatcaaatccaatgaatataaacaatacatttcgtacttcgtttcatctttcttttcctacaacataactaaatctaaacaaataagtattctatggcatagtattataaaagttgagtcttggaaaagctagtatcggcttattgtgtacttgacagccaatggaaatcagtccgtttgccatagttgatgaaaatacggttaattgtattaccaatcatgaaattcacacgaaactaaatattacaaataagtataacataatttatgacatggaagcagagcaattctatcatgacaattttctgtgaacttaataagaacacaaaaaaaatcaaaaaatttaatgagattactctaagcggggaattaccagttttaagttttaacaaaaaaaaaaaagagttattccgtaggacgtaccagtcatgaccttaaaaggttgtgttatctccatcagcttggggcaatcttctatacgaccctgcactatttcagagacagatatagcaccaacaatagagatgaggtctggacacctcataagttgaaggctaagtcccttgagtttcattgcactcgccagatggctgttgtcgatgtactctatgcttggacaaagtaataagctgagcatccgaagagaggatggtaatgtcattctcctctgcatattcaacttgggacagtttctaatacatagcttctccaagcgagaaaaaaggtggagctcatgaactggcagtaatgctaattccttgcaaaataacacatcaatggtcttcacgaaaggcatataagcgggcataaagaactcatcaagactcaacagtgcattgcaaaacgaaatggtgactgttgaaagggatgaaaatactccaacagtgtgtatgttgcttgcctcagagacacagatggatgtgagggagccacaattatcaatacgcaaattctccaaggatggaagattactcatccaaacttgcaggggaatagatgttaagaaccagcaatgtatttccagatgtgtcaggagggagaggccacgaaagcaactcacaaagtgatctgtcgaatggccaaagttgccaagggtaacccttctaagagaagagggtaaagccaccaaaccttgccaatcaatgttaggacactggtggacatccaacacctcaaggtgataaatgctgtttgactcttctaaatcagaaaagagtgggtcaaagaatgataggctctgaatgttcctgcacccataaagttcaagtgaagtcagcactttcaggcagtctggctggagccagctggggcaagattgacctaggtaattctttattatcaaatgctcaagattccaatgaggtaacaattcaatctgctcctctgtcatctgtaattgttcatcagctatttccgttgtggaccattctaggaattgcttatctttaaccttgttaaattggaagccctttgattcaattttgtttaaggaaatcagatcactgaaaccttgagggtatcttttgaaaacacaacccttggcatttatagtctggacatgatacaggcaactaacagatgaaggaagggtctcgaaagtagaacttcccaataaaccaaggtaacgcaaatgttttgagttgcctatgctctcaggtaactttctcaccgttgaaaatttaaaaatcaatacacggatactcgggagttccttgaaccaacaatcaatcacgggagcgaattgtttaatacttcggtaagattcattgcatattagggaccgcagttttttattttgtgtgcaaatagtcactatttctgtacagctgatatttcccttggtgaatattgacagatggcgaacctttgatgggattttagctaggtcactcacatgttgtatgatgaagcactcatccttggagactagctgtgcagtatcatgtatcaagtcatgaattacgtacatatcactatagccagctgctttctgaaagaatgaccgatttacaaggtcattaaagcaagatgatgcatcttcagcctccacatacccttgtgctacccaaatgtctgctaaaaactccttgtcaaatttatgatcctttggatacagggcacatattgagaagcatcttttcatgtgtcgtggtaggtaaacgtaactcagtcgaagggctggcaaaatgtcagtctcctcttgttccaatttccacaattcacttctcaatatgtcctcccagtgctctacacttaagttacttttcaacaagcgtccaagagttttggcagccaaaggtgaacccttcaacttgggaagtatagctctaccaatgcgctccaactctggacgaatgtgctccagctctgggctattgcgagagctgttggatccgaatgcgcatagtttgaagaaatcccagaaaacatcattttgcagtccgttgagctcatagggatcactgttgctgactaggttagcaactttggaagatctagtggtgaccaaaatcatactgccctgaagaccattgcttaaagttctatgaaatgttctccatcctctctcatcttttaagacatcatcccacatgtcatcaaggacgagtaaaaacttctttgacttgacactatcacgtaaattaaccataagagtatcccttgtatcagaatcttgtgactttactccaagagacttcagaacatctcttgttaacctgtttacctcgaattcatccgagacacatatccagagtatgcagtcgaagtgattccgcaccactctatcctcacagatttgttgtgccatggtggtcttcccgatgccgcccataccaactattggcagcacaggcaactctgtcctccttgcttcagctgtagtgctgcatgccacaggtctgcctctcttgcgtccacgtactcctagcttttgcttcaactccttcagttctttttcacgaccaaatatctcatctggctcgtctaggacacggcatgtctctggtctgactaatcgatcaaacttctttggtgttttgtgaaagcctaaacccttggattggtcaaaaacctgctttagtctatttttgattttcattactttactgaagttgacactgttcaggaactccaaaaagggttcatgcgagtgatcttgccccaagttcttgctcgtgtccaccttcaccttgagagcatagtaattgtactcatcaaggaggtcctcggcatcgtacgctacatccttgatctggcgaagatgccagtcttctgtatccttgtggctatgccattcaagacgatcgatgaggtcatacattgtggatgtagttgattggatcagccataggtcgttctcgagattctgaagatcatcctcaatctggtgcagtggagctgttctgttgtctctagctgatgctgatcctacccctcctggatccacttgcagcagatgctgctgctgctgagaacgtacggcagccaagacacgtggtgcggcccagttgaagaactcacggaaggcattggcatcggcagcaagaccagctgctcccttcaatattccaacgatgtcgtccatagccaggttgagcactgtgcatgattataaacgcaaacaaattaagccaaaccgttaatagctccttgtacgaagagatgcatcatggcaaatatataagacacatgattgctcaggaaattctatctcaaataggcacatgattgcccaggaaattcaactaggctatctatctatctatctatctattatatacttcctccgtattttaatgtatgacgtcgttgatttttcgaccaacatttgactattcgttttattcaaaatttttgtgcaaatatgaaaatatttatgtcatgcttaaagaacatttgatgacaaatcaagtcataataaaataaatgataattacataaattttttgaatatgacgaatggtcaaacatacaaaaagtcaacggcgtcaaatattaaaatttgaaggtagtattaaaaatctatgaaactttctacaaacgctcctaacgcatcacgtggaagtcctacaaatgcttctaaaacgccacgtgccactttaataaacaactggacctattatttttaattattactattagaattgctttttccacctctctctcctatcccaccttcccacatccaagcatccccgcacgtacctacaaacgtacggatggataaaaaaatacctatggactatttgctaaaggaaaacaaatactcaatattagaagtttcagggttggacacagttattaagaaagtaggtagaaatgagtggtgtatggttgtgattggataagtagtgcatgtaggtgggaaaagttaatggtggagggttgtgattggatggaaagagaatgttggtggagaagttgttatatttttggacaaattctgatgactaaaagttgttatattttgggacgaagggagtaaaaaaaaactatttgtcagaaaaaataaacaaagaacatacaggtatgcaagtttgcacctacggttggaaaaaagaagcgatcaatcctcacttctttattttctctggttgttcactatttaaaattttataaagcatatgatgtatcttatctataaaaaatataacatccatattacctatatttaattacagaaagttgtgttttaataaccgacaactaaataagatccgaagccgtcaagtaacactccaataaattagagaaaataatagaaattatgaagaaaaaacaaaaaacatcaatttccacttatatatggtgaccaattgttttctactagcaatatttatgtatgtacatacatattgtttttaaatactttgatgatcatagttatatttcattaaacttcctgtatacgcttctaatccaccacgtggcaccctataaacacttatgattcatcacgtggagttctaaaaaaacagagaaattcaaccgtcgattttcattgagattaataaaccattattctccctctttccatgcctctgtgcggcgttctcactctgtaccaaacctaccattcctccgttcctttcttttttttcttatttgataattaaacttataattttctttatgggcctaaaaaattttatagatagacatcgaccgactagatctagcaagctcttactctatactctctttatagtacgttaaacatcataaaaatatttctaaataaccacatgacacactaaaattagagaaaataaaaaaataaaacattcgaccatcaatttcttcttaaaactatcacatgatataaaaaaaagtttgagatttatccacgtcatcatgagtaaaacttttatttccagtatacctctacaaatgcttgtaggccatcttatagcgatggacataataaactactatgattgttttaatgcctaattcttttaaaaaaagaagataaaattgtataggtattgcaggcttcgcattgaagattatgcacaaacacaccgtgtaaaccaactaacacacacacttttgaagaccgtgtatatatatattgggagcaagaaaaaaaaacataattctaagacagttatactcttaagaccgcaatgtagcattgaagcttttacacataaaactattttagtggagcacttaacccgtaagatagtattgaatcaatatactcccttcgttatagaaaaacatagctcattttacatcataatgatatttttattctttcaaaatttttatatttatcttcatacaagtcatattaaacacaccaagagacagataattataattcaattcagtaaattctatcctttaaagtaacttccatgggtttctctacaacctgcatgtataagcctctaaggtggcaatataaaataagtagcctttcttataataatattattaaaagttattttttcctaatatattattattttacgattcatgttggctaggtcttttccttaaaaagaagcgctatataatatatgtatatttgatcaattaaaaagagggctagcaggatggtaaaaaaattaaatttacaagcaataaaagtttctcgagtcttcttaaggaaaaaaaacttaacaatgaacattcaattaaaaatgaaaaataccctattttactttcaacttactttgttagaagtattttcgaaataaaataatatggatgcccgttagaagtattttcgaaataaaataatatggatgcccgcgcggatgcgcgggctaccttcttagttatatgctaattgtctttcacttaaattggcgggtccaatattataaaccattagattcgattaatctgaaaacaaaccatacactacatgaacggtaccacctatcctccttccccgtaggaaatagaatccaacttttaatctacccttaatttagttgtcacccccatcatgagttcgttagaagattcaatcacaggaactttgagtcccttgctcttagcgattttcacttgtaaccatattgcaaggtatatgtgcagatggtatgcatgataattagctaggagtagtttattactttgttgatacaaaagcaattcaaaacagttatcaaattagtctttcttttattcaaaagtcgatgaatggttttttatatatattaagaaaaatatataacccatgaatcattttaaaatgacattgtccaatcttcagtttgcccttaacctatatataggagataattggatcacacacctgggtccttgatttgtttctcaaatctttctacccaatgatcagactacctagctagctcctcttcttgatctttgtcttcttaacatctgttacgagcaaagcgatcacctgtttgttcacaaaaatcgtttgatcaacatgaatagagattaggaaagaaagaagagtacagatagagtaccaaatttgtctcccgaattcaaacaaaaagaactaacagaaatttggaagagtacaacccccaatttcagttacttcttttcctaggtagaatgaagggctgatgaactcgcttttggggctatacgctgcttccaagcacaagagcgctccgctaaccttctgagaaattacttatatagaggaaccaggatgttcgttcagaacatggtaggaaattaaaagaggccgttgttttgccaataggacaaagaaaagatgccagtaggaattgttcatttcaatccatatgtttaactcaccagtcagcttcgttgcaaagtcagaactttttaatgtaagagcgtcacgaactgagagggaacgattggactaatatatattcattgcttaacggtaatagacataatcccatgcgcagatcaaaaacagcgcattgacatcttaatatattggatgaacagatttggcctctcagcccgatgccttcttttgagtagttcgctctcgagctgaaatatggacttctaaaacttagccttttacatcttggcttttgacactacaaggaaagacaaatagatctaatattatgaatgatagcagtatcattgtgtcaacaacacccatgggtggacctcatccagatgctgttacgggaaggagaaaagttatccatgtcctgagtatgtaaaaccagcaagcttgatgaccatagtaatcaacggaggtacagcaaaaaaaaaaaaaaagaaagataagataatatgccacttggagttgtccatttcaatccatatattcaactcaccagtcagcttcaatgccgagtcaaaccttttcaatgtaagaattccatgacccaaatgtggtatgtgttcttggtttaagaaattcgtgtgctgaattcttagctttggatgttgcccttgacaaaccacggcaagactaggttctgtcacattgagcttgtctcggatcacagtagaattgtgttatcccgatttggttctgtcacattcaaaaaataaaagatagttcagtctattgaatgcaccatggagttgatagtgaactgtactagattaggagttttatatgagttcgtttcgttgataatgaggatttttattactgattcttccctttttgaataaatacaaatcaacctagcatctttctgtacatgtgtttaactttgtgacagaaaaatattctccctcgtgaatcattcaaagttactgcgtgtaacaatttctactgctctgaaattagagcaatactggcaaatttatctagcaatatctgaaacaatttctagcaatttttaacaaatttatctattattctagttaggaaaaaatatgaattaccccccgaattatcgcggtcggccgaatttcccctctgaaccagaaaaccagacatgactcaccctaaactttcaacaccggacgaattacccccctcgacccaatccatagcggttttatcctatgtggcgtacgcgtggcaacccagtcggcattttcttttttaaaagatgttggggcccatctgtcatatactccccctctctcactctctccctctccctcttttggcgagcacggcaggcggcggctgcagcctgcggcgtgggatgcgaaggtggcgtgggacactaaggcggcggtggtggcagcatgggatgtggaggcggcgccggcggcgtgggatgggaggcggcagcagcgcgggacaccgaggcggcggcggcggcagcatgggatgcggtggcagatgccagccatatccccaccgcctctcccattttgcagttccgccacgaccaccaccgacaaaggtgacgcaggtagcgtggtaaacgaggcgatgcagccgcctctcaggtggcccggcgagctttcgaaggcggccgtctcgatgtagtgcgctggccgtctcgatgtagccgcctctcgacgcaggatcccgacgccgccgggaggggaccgggttgtcccgcgtcccgccctgccgccacctccgcgtgccgcaccgccgtcgcctccgcgtcccgcgcaccggtggtcgaagcctaccgcggtggcctccgctctcctctcctcgctcctcctcgccgccattaccgtgcccaccacaacaaccaccctccagtcctcactgnctcgctcgctggtgtcctcctnctcctcgctgccacccgggncaccacagacgccggctccccacccaagagccgctcgcccactacaccgccgtatcccacgccgccgccgccgcctcccatcccacgctgcagccgccgccactgcctccgcatcccacgccgcagccgccgcctgccgtgcttgccgagtgagggagagagagagagagtgagagaggggaaggagagagagggagtatatgacaggtgggccccaccatcttttaaaaaataaaatgctgactgggttgccacgcgtatgccacgtaggataaaaaatctttggattgggtcgaggggggtaatttttgtctggtattgaatgttcagggtgagtcatgtccggttttcgggttcgggggaggggggggattcggaaaatatattgtgattgtgaaaaacatattattttgtaattgtttggtttgcattaacaaatattgtcatagcgttagcacgggcaaattactagtatttctagctatcattcataatattagatctgttttgtctttccttgtagtgtcaaaagccaagatgtaaaaggctaattagtagtattatgttttattcatggattcatctaagtttagaagtccatgttgcaagtcgacaatgaactgttcaaaagtagggttgtagtgttaaaaggagggttgatgaccaaagtaatcaatagaggtgtagcaaaaaaaaaaagagaaagataaggggatcctttagagtgggctgctaggcacgctaaatgagttgtntgttgtctaactagnagttgatcacaaatgcctcttggngggggggggnggnatggatagaaatatgtaaaaaagtatttatagtgatgtaggtgctgttgcganctggtcaagacctaatagactcagatgtcgttgtc

SEQ ID NO: 28878 - DNA, 1173 bp, Oryza sativa
caacgcaaacactttattttgtaactcctgataatattcttctacagatttatccccctggtctgagcgttgcaatttctttaaaagatcacgtctaaaagaaggagcacaaatctagtgtgcatatagttgtctttaagagcaggtataatagcagactataagcaagctataaacacatatcaagaagataaaagaggagagagaagagcagcgggctacagatttgtagccagcaacagcacagactccaagacataatgtatgtgtgacaagtgggatcatatattaatagtgtagtatatgtttatagataactattgtatatattggctattaaattgaccatagatgatttggagctaatagttggttatactattaaacttgctctaacgcttctcatgttgtaggtgctagtccatcaatacttatttgagtccatcacaatgttgcaaaatcattaaattcactagtagcttgcctaaccctatgctcatcaggaataaatgtgcactaaattttttatctacagtcatttctcaatcaaaataagcttcagcattataggcaccatgaaaagagggaatcgtaaacttaactttaactttagcatatggatcatcacacacattatgaaaattacctccaatacctcgacgattgaagctcagcaagtttctatcaatattatcctattttagattcaccaacctgtcgagacaattattgatcgttgtaagattggcattcagcatgcgctggaacctctcggtagaggtttgaaccatcctctcgatcacaacagtcatatctctgttgatagctccacattggtctttgaggactttgacaagttcctccctgagcacgcagtccttaaatttatcgttggtgcatgacatggttagtagaatatagaaaatagcacaaggatattatccctatcaactactaggtgatgagagaaagacacttgcactcaagcatcttaccacacgcatacacgtagcaagagatgcaaccagtggcgagaagaatcacagtaggaagtatagtgctactatgcatttttggtggttatcagttgagtacttgagttattttatcttggacctccttgcatcattgtgcaggaagtacagccataagtaggcatgaaaattcgatctg

SEQ ID NO: 28879 - DNA, 1155 bp, Oryza sativa
  unsure (1)..(1155): unsure at all n locations
agagtttgaacgccagctggnnnnnnnnnnnnnnnnnnnnnnnnnnnnnnnnnnnnnnnnnnnnnnnnnnnnnnnnnnnnnncttggggataagacgacgtccgtggtggtcagagatcatgcgggatactaaggctagagttgatgtacgtggttgatggagattccatatggcatacgatggagttattgtgtgcgtatgggatgcggagtcgaatttggaagcagtccaaatttggtacgattggttatctaaagtttctttcttgtactagagggtttcctaaggtgtttaggactcctagtatgagtttggttcgtggctttaggctgcctaccttgggtataaatagagggggagcgtgaggcttcccgatatcgtttttgagagcaattgagttgagttttgagttagggtttcgagtttagtcgaaatttttgtaaggagtgctgttggtgcactttgtaaatacaaagagaagtaataaagtcgtcatccactttaagagttcttcgatttgtgcttcaccgggtttcggcggtttaactggcaactaaccggcggttagaccggtggcatcgtggcggtccgaccggcgggagcaaggcgctcaaaccggcggcggcaacagcaagcggcagatgatctcggtggtcagaccgaagatctaatctcggtcagaccgacggcaaccaggcggtcagaccggcagggcaatttcggtcagaccgcaatccgtcgaattcgagggtaacttttatttccgctaaaagtttttggtttttgggtataccaaccattcacccccctctggttggcttagttcttgtcattcgatcctacaagtggtatcagagtcttgttttcttctttggatttttatcgatctagagtttttgccatggctactcccgctcgtttttcaactaagcctcatgttttcgatggaacggatttttctcattggtgtagtaggatgcaatcttccattatgggtgaagattatgatatttggagaaaagtttcccatgcttatgtgattcctgaagctattaatactgctgctgaaaaaccggcttttgaccaaaattgcaaagctcgcaacattcttttgagtggtattacataattctgattatgatcgtgttgcgcat

SEQ ID NO: 28880 - DNA, 725 bp, Oryza sativa
tctttctctcatcacctagtagttgatagggataatatccttgtgctattttctatattctactaaccatgtcatgcaccaacgataaatttaaggactgcgtgctcagggaggaacttgtcaaagtcctcaaagaccaatgtggagctatcaacagagatatgactgttgtgatcgagaggatggttcaaacctctaccgagaggttccagcgcatgctgaatgccaatcttacaacgatcaataattgtctcgacaggttggtgaatctaaaataggataatattgatagaaacttgctgagcttcaatcgtcgaggtattggaggtaattttcataatgtgtgtgatgatccatatgctaaagttaaagttaagtttacgattccctcttttcatggtgcctataatgctgaagcttattttgattgagaaatgactgtagataaaaaatttagtgcacatttattcctgatgagcatagggttaggcaagctactagtgaatttaatgattttgcaacattgtgatggactcaaaataatattgatggactagcacctacaacatgagaagcgtttgagcaagttaatagtataaccaactattagctccaaatcatctatggttcaatttaatagccaatatttacaataagttattctattaaaacattattacttaccaccctaatttaaaaattaattatattgggaaaatcccccc

SEQ ID NO: 28881 - DNA, 740 bp, Oryza sativa
attttttgtaagaagtcctgttggtgcacttggtaattcacagagaagtaataaagtggtcatccactttaagagttcttccgatttgtctttcaccgggtttgggcggtttaactggcaactaaccgcgggttagaccggtggcatcgggccggtccggacgggcgggagcaagggcgctctaacccggcggcggcaacagcaatcggcagatgatctcggtggtcagaccgaagatctaatctcggtcagaccgacgacaaccagcgggtcagacgggcagggcaatttcggtcagaccgcaatccgtcgaattcgagggtaacttttatttccgctaaaagtttttggtttttgggtataccaaccattcacccccctctggttggcttagttcttgtcattcgatcctacaagtggtatcagagtcttgttttcttctttggatttttatcgatctagagtttttgccatggctactcccgctcgtttttcaactaagcctcatgttttcgatggaacggatttttctcattggtgtagtaggatgcaatcttacattatggctgaagattatgatatttggagaaaagtttcccatgcttatgtgattcctgaagctattaatactgctgctgaaaaaactgcttttgaacaaaattgcaaagctcgcaacattcttttgagtggtatttctcgttctgattatgatcgtgttgcgcatcttcaaactgctcatt

SEQ ID NO: 28882 - DNA, 3812 bp, Oryza sativa
cttaaaatgttggtcgtaagccccccggggaagaggtatccattgtaatcccgtggtaattccatgcatgggaccttccgtatgttcctgggcccgaaataaaggcccaattcttcctcgatgttaaggagctccccattaaagagtgttgcaaaacaattgaaatgggctatccggaattaattgttgtccaccggcaatattgctttcctttccgagagttccctttcccggtaggtctcccttccatggcgtgattcaggtaccccgattggccaaggttcttgaatatattctccgcaaaattctattgtcctcctttggtccataaccccttggcgatgcttgcctctggacgagcacgggttacaaacatacttcttcagaacgcccatgtacctctcgaaaggaaacatgttgtgtaggtacataggcccgagaatacggatctctttcacaaggtgacaaagcagatgcgtcattatattgaaaaatgaaggtggaaatatcaactcaaaactgacgagacattgcaccacttcattctgaagggcttctaatctatccggatcgatgaccttctgcgaaattgcgttcatgaatgcacatagctttgttattgttgcccggacattgtctggaaggataccccttattacaactggtagcagttgtgtcatcaacacgtgacagtcatgagactttaggtttgtgaacttcttctccttcgtgcttattattcgcttgatattcgtggagtatccagacggtacctttatgctctccaagcattcaaacatactttccttctctgccttgctaagagtgtagctggctggactcaagtaatggcttcctttctcctttggttccgggtgaaggtcgccgcgttgttccatatgcttcagatcattacgtgtttccagtgtatctttcgactttccgtatacacctaggaagccaagaaggtttacgcaaaggttcttagtgaggtgcatcacgtcgattgcgtggcgtacgtccaagaattcccaatatggtaactcccaaaatatagagttctttttccacatcgccgcgtgaccatcttcgctctctatatgctggcttccaggcccctttccgaacactactttaagatctttaaccatagcaaacactgttttcccgctgcgatgtttaggcttcgtacggtggtcggccttatgttcgaagtgcttgcctttcttccgtaccgggtggtttgctgcaaggaatcgacgatgacccatgtatacaaccttcctacagtgcttaagatacgtactttctgtttcatccatacagtgagtgcaagccttgtaccccttgttggactgtccggataggttgctaagtgcaggccaatcgttgatggttacgaacagtagcgctcgtaggttaaactcctcctgtttgtcctcgtcccacacggggacaccttccttcttccacaactgtttaagatcttcgaccagtggtcttaggtacacgtcgatgtcgttaccaggttgcttggggccttgaataataatcggcatcattatgtacttcctcttcatgcatagccaggggggaggttgtagatacacatcgtaacgggccaagtgctatggccgctgctcatctctccaaaaggattcatgccatccgtactcaaaccaaaccgtatgtttcgtgcgtcctttccaaattctttaaattttctgtcgatgtttcgccactgcgaaccatcggcggggtgtctcagcatcccgtcctgttgacgctcttcagcgtgccatcgcaacattctagcattccccttgttcctgaacaaacgccttagccgtggtattatagggaaataccacatcaccttagcaggaattctcttctttgttagctgcccgtcaacttctcctggatcgtcccgtctaatcttgtatcgtagtgctttgcaaacagggcatgcttctaggttctcatactcctcaccgcgatataggatacaatcgttcggacatgcgtgaatcttatgaacttccagtcctaacgggcagactatcttcttagcctcgtacgttgtctcgggcaatttgtttccccccggaagaatgttcttgacaagtttcaataaatcgccaaatgccttgtcactaaccccattttttgccttccattgcaacaactccagagtggtatccaactttttgtgcccctgctcgcaacctgggtacaacgaagttctgtggtcctccaacatcttgtccaatttatgggcctccttttcactttcgcagtcttccctggcgtcctgcaacatctgaccaagatcatccgcaacgtcgttaccatcagcagctatttcctcctcgcccgtttgatttccttcaaatccaacatactgagcaaagtccggaatattgtcgtcttccacttcatcttcttccatttcaacaccttgctctccgtgggatgtccaacaattatagcttggcatgaaccccgactcaaacaagtggaaatgaatagtcctggatgcagaatactccttctgattcttacacttattgcatggacaacaaataaaacccctttgcctgttagcttcggccactctcaaaaaatagtgcacgccgtcaataaactctttggaccgccggtcagcgtacatccattgccgatccatctacatgagtaaaaaaaactgcacacaaataattattcttacaataatgacagtcatacaataattataagatatctttattcatacaaaaatcataaaatattacaccaaataattcttaaaaactatttgtaaagttttaaactaattttaatgtgttttacttcttttaatttttattttagtttgttttctattatttaatattaactttcactagagttttccttctcaactattttataaaaccttgtttagcaaatgaactaaatttctatatattctttcttccccacacacattttctctctcatcaacttacaactaaattttggagacaaaaaaagtgtgcaaaacataggtgcaaatgtagtatgacaaaaaaaacattggaggatgaagttgcaaaccttttaggcacctccgatttgtatgtaatcaccaaaataaattcaatagaaattttggcatgacctcccctcttttttgaagaaattttgaagcttgctcgggcagctggaggaggaagaagacatatatataggggtgggactttagtcccggttggtagcaccaaccggggctaaagatcaccgggatcattagtcccggttggtattaccaaccggaactaaagttaagatctttagtcccggttggtgctaccaaccgggactaaagatcccgggggggcctgacaggtcctgacagcattcgaaccgggactaaagatgatctttagtcccggttggtaacacaaaccgggactaaagatcaaatatgcccgttacccttttgaaccgggactaaagatcatctttagccccggtttttattgcatccgggactattgtggaaatcggccgaccgacgaaagatggtttctccaccagtgtgatttttttcaattatgtaagaatgctactcgaatgataattctatggtatttttgtaattttttaatagcagtcttgcaataacgtggaattcaaaccaatggtaaatttgtaattgcgtgtgtttttgatacaggaattttgacaccactactatttagacccatcactgttctcttatttttatcagttagctcttttgtggatcttcttgtgtaaagtcaggt

SEQ ID NO: 28883 - DNA, 710 bp, Oryza sativa
tgatttggtctgcaaggcagtggcaatactcgcacacgtaatagccgcacaagttagttccctgcttttgctttgcgcactacaaataaatgacaaacaacgagagatctaattaatatacacttgtatgtatttgaatcggagaaatataaatgtagagcatgtgtactcacaggaaatttgaacttccgcctaagtctttctctccatttgccgcggaccaaatgacggaaccgataccaagccctacatggagtttaaagctatgattcgtagtagtaattaacataacaagattttcttaattaacaaaggaacttatgacggtacctgtctataagttcgaaaaccttgtcaaacgtagactcttttttatccattgagtcatatacgttgacggtgcaggcctccaggtcgatgagtaaaagcacccagtggaatctgcaatgtgcgtgggatgcattacatatgaaacacttagcaagttcgtacgggaatgaaatttggtatgtaggaagacagtaaaattaaactaactctgtgttgtatggcaacagtatgaacgtcttgtaatgctgcgccttcaggagatggacgagattgtcctctggttcttgtggatattggtcgagcattgcgacgtttactttccgagggtcgatgaattcagtatcgaaaacccttcgccgtcgggcctttgaatctcattt

SEQ ID NO: 28884 - DNA, 5665 bp, Oryza sativa
ccacgtaggataaaaaatctttggattgggtcgaggggggtaatttttgtctggtattgaatgttcagggtgagtcatgtccggttttcgggttcgggggaggggggggattcggaaaatatattgtgattgtgaaaaacatattattttgtaattgtttggtttgcattaacaaatattgtcatagcgttagcacgggcaaattactagtatttctagctatcattcataatattagatctgttttgtctttccttgtagtgtcaaaagccaagatgtaaaaggctaattagtagtattatgttttattcatggattcatctaagtttagaagtccatgttgcaagtcgacaatgaactgttcaaaagtagggttgtagtgttaaaaggagggttgatgaccaaagtaatcaatagaggtgtagcaaaaaaaaaaagagaaagataagataatatgccacttggagttgtccatttcaatccatatattcaactcaccagtcagcttcaatgccgagtcaaacctttccaatataagagtgtcatgacccgagagggaaatacccgacaatccttgatgatgaagaattatggtgttgaagttcctccacatgctccacttgaacgcttagcacttgcagcacaagtatggtcttgtagtttgcggtatcgatgactcctaaaatctccccatcatcaatttccatctcaggaacattggtttcacatagaaggttagcagcaagagaatattcttgctcaacatcactagaacttgcatatccaccatcatccgtagcgatgtatgcatgctgacttgtacaatccttcatgacatgtcacatacccttgcattggtgtcgtatgatccgattgtttgccccgtagaagctactgacgaggtacttttcgtgggtacctacactttagtagacttgtaaaatcaaagatgtttttgattattattctgtgatgaacaattgggcattggatattattggttttattatttggaatttattcacgaagtggttttggagatgattggatttcataggtgaatatacaggtagtgctggatttgggtccggtcagaccgggcacgggttgccggtcggaccggcgtgtattgcgcggtcagaccggcgcagcccactgtctgaccggccgacgctgtgtcggtttcagtttcgggttgtttatttggatatccatgattatttcataattatgacttctagatggatactatacgtatgtaatactattgtttgctgctaatgagtcaagttggagatagcttggtctcggaatatggtttctttgtttgttccatgtgtaggtgattcgatgtctctggagagtatttgcggtgatggaccgggagtcggcttggggataagacgacgtccgtggtggtcagagatcatgcgggatactaaggctagagttgatgtacgtggttgatggagattccatatggcatacgatggagttattgtgtgcgtatgggatgcggagtcgaatttggaagcagtccaaatttggtacgattggttatctaaagtttctttcttgtactagagggtttcctaaggtgtttaggactcctagtatgagtttggttcgtggctttaggctgcctaccttgggtataaatagagggggagcgtgaggcttcccgatatcgtttttgagagcaattgagttgagttttgagttagggtttcgagtttagtcgaaatttttgtaaggagtgctgttggtgcactttgtaaatacaaagagaagtaataaagtcgtcatccactttaagagttcttcgatttgtgcttcaccgggtttcggcggtttaactggcaactaaccggcggttagaccggtggcatcgtggcggtccgaccggcgggagcaaggcgctcaaaccggcggcggcaacagcaagcggcagatgatctcggtggtcagaccgaagatctaatctcggtcagaccgacggcaaccaggcggtcagaccggcagggcaatttcggtcagaccgcaatccgtcgaattcgagggtaacttttatttccgctaaaagtttttggtttttgggtataccaaccattcacccccctctggttggcttagttcttgtcattcgatcctacaagtggtatcagagtcttgttttcttctttggatttttatcgatctagagtttttgccatggctactcccgctcgtttttcaactaagcctcatgttttcgatggaacggatttttctcattggtgtagtaggatgcaatcttacattatggctgaagattatgatatttggagaaaagtttcccatgcttatgtgattcctgaagctattaatactgctgctgaaaaaactgcttttgaacaaaattgcaaagctcgcaacattcttttgagtggtatttctcgttctgattatgatcgtgttgcgcatcttcaaactgctcatgagatttgggttgctttaagtaattttcatcaaggaacaaataacattaaagagcttcgtcgagatcttttcaaaaaggagtacattaaatttgagatgaaacctggagaagctttggatgactatctctctaggtttaataaaattttgagtgatcttaaatatgttgattcttcttatgatactaattatcctcaatctgagatctctcgccactttttgaatggtcttgacatgtctatttgggagatgaaagttatatctatttaggagtctgttaatatgtctactttgactttggattcactttacaccaaattgaaaacacatgagatgaatgttctttctcgaaaagctgattctaagtctagtgctttggtttcttctacttcttcttcggttgttgatgcttcttcatctatgccttcttttcttgccacttttaatgccctatccgatgatcaactcgaacaaatcgaggaggaggatttggctttggttgctaaccgtattgctcgagctgtgaataatgccaggaacaggaaaagaggtggtccaaataggagctttgaatgtggttctattgatcatcttcgttcgcattgtcctaagcttgggagaggcaaaagagaagacaaagatggtgagaagacgaacaacaacatgcccaacaacaacaggtcgaagggctcatctcaagggaggaagatggagaatcttagaaaggcttttcaataagtttgcgccgctttcgagccactaagtgatgtagatggtgaaagtggagatgatgataaagggaagaacatctccgatgtttgcttcatggcgcgtggtgaatctgacatagagtatgaagataatgagttaagtgcgtttgaggaagctattaatattttgagtgaaaaaaaagaagtgtgagaagatgtgtagaaaacatgaatttatcattgaatctcttaaatctgaagttgctagattaaaatctcttattcctaatgatgatgattgctcaaattgtgaggttttaatgaatgagatttcaaaaattagagatattaatgctgcacatgatttgaaaaatagatcttcttttgcttgtagtttggccttgcatacacgcactttggatgagttgtttttaactaaaaagttgttgcaaaaaaaatatcaaattgcttttcatgctagtttgatgtttaacatgatttctgctaaaaagttaaaacaaccttatggtgttttggattgctcaacatgtgatttgaataagatgaaactaaaagatgctttaggtcgtgttaagtacatggaagatgttgtgaaaaacaatgaagtgctttcttgccccaaatgtcgtaaaagcaaaggtgtcatggtagattgtgaaaattgtgctaatttggaaaaagaggtttcttatttgaaaaattcttttcaaagattttctgatggtaaaaagaacctcaacatgattttggatcaatctaaggttagcacacataaccgtggtttaggttttgacccttatgctcataattctagacatcctcctattgtgttagctgttggtgctagaagtggtgagattttgattaaacatgatactaataaaactgtgtttaaatctgctggtatcatgtctaccatgaatgcatcttcttcaaaatccaatgttgagcatgcagaacctcctgtttctgcttgtgttgctaaatcttcttgtcctaacaatgtgtctaaacaacgtgaaaaatatacttgttctttttgtggaaaagatggacatattgttgatttttgtttcagattagctcataaacagaaaaaggagagagagattgcttttgcaaaatcaaagtggcaaaaatctggttttccctcgaggaaaccggtcaaaccacagtgggtcccgcggtcagaccggctacagatcctcggtcagaccgaacatcggtcagaccggcggtacagtggcggtcacaccggcccctggtcagaccggctactataccttggtcagaccgacctcggaggaatttttctgaaaattctaaaattgattttgcacgtggatatatgcctattggatcttttggtcgtgtgtctcagtactggattcctaagtttttattattatctaaccctagtactgaggcttcgacttctgcttgtgtgtaggctttggtggcaaggaaggagaacgtatggatcgtggattccggttgttcgcggcacatgaccggtgataaaaattggttctcttccctcaaaaaggcatctaagactgaatctattatctttggtgatgcttctacaagtaccgttgtcgctacaggtttggtaaagataaatgaaaattttgaattgaagaatgtagctttggttgaggatttaaagtacaatttgctttcggttttacaaattgttgatgaagagtttgaagttcactttaagaaaactggaagtaaagtttttgattctcgtggtgattctgtgctgaatatttctcgttatggaagagtgtttaaagctgattttgaaaatcctgtttcacctgtgataacatgtttggttgctaagtttgataaagatgtgatgttttggcatcgtagacttggacatgttggttttgatcatctcactaggttaagtggtttggatcttgttcgtggtttgcctaaacttaagaaagatcttgaattggtttgtacaccgtgtcgtcatgctaaggtagtttctacttcacatgctcctattgtttctgtgatgacggatgcactgggacagctattacacatggacactgttggtccagctagagtgcaccgttggaggaaagtggtatgtgttggttattgctgacgatttttctagatattcttgggttttctttatggcaactaaggatgaagcttttcaacactttcgtggtttgttttttcgattaaatcttgaattttctggttctttgaaaagaattcgaggtgataatggtggagattttaaaaatgcttcttttgaacaattttgcaatgaaagaggtcttgaacatgaattttcttttcctcgtgttcctaaacaaaacggtgttgttgaaaggaaaattcctgttttggttgagatggctagaactatgttggatgaatacaaaactctataaaattttgggctaaggctattaaca

SEQ ID NO: 28885 - DNA, 18744 bp, Oryza sativa
  unsure (1)..(18744): unsure at all n locations
ccgcccactgaagacatttgaataaaacannnnnnnnnnnnnnnnnnnnnnntgctcctttgcacattcaacgacgacatccgccggaacaaatcattggtaatataggtgagcggactacaaggtctaaggtaacggctcatgatgtttgtgcaaattctgcatttgttgcttcttttgaacccaaagatgtttcacatgcattaactgatgaatcgtggattaacgccatgcatgaagaacttgaaaattttgagagaaacaaagtttggactttagttgaaccaccttctggacataatattattggaatcaagtgggttttcaaaaataaacaaaatgaggatggtttaattgtgagaaataaagctaggcttgttgctcaaggttttactcaagttgagggtttggattttgatgaaacttttgctcctgttgctagaattgaggcaattagacttttgttggcttttgctgcttcaaaaggttttaaattgtatcaaatggatgttaaaagtgcttttctaaatggttttatacaggaggaagtttatgtcaaacaaccaccaggttttgaaaatcctgattttcccaaccatgtttttaaattgtctaaagctttgtatggtttgaaacaagctcctagggcatggtatgataggcttaagaacttttttcttgcgaaaggttttacaatgggaaaggttgacaaaacgctttttgttcttaagcatggtgataatcaactgttcgttcagatttatgtggatgatatcatctttggttgttcaactcacgctttggttgtagattttgctgagactatgcgcagggaatttgagatgagcatgatgggtgagttatcgtactttttgggattgcaaattaagcaaacacctcaaggtacttttgtgcatcaaacgaagtatacgaaggatcttttgagacggttcaagatggagaattgcaagccaatttcaacaccaattggttctacagctgtgttggatcctgatgaagatggtgaaactgttgatcaaaaggaatatagaagtagattggatctttgttatatctaactgcttctaggccagacatacaatttgctgtgtgtttgtgtgcacgcttccaagcttctcctcgtgcttcatatcgtcaagcagtcaagcgaataatgaggtacttgaatcatacacttgagtttggaatttggtattctacttcatcttctatatgcttaagtagatattccgatgctgattttggtggttgtagaattgataggaaaagtactagtggaacatgtcattttcttggtacatcattaattgcatggtcttcaaggaaacaatctagtgttgctcaatcaactactgaatctgaatatgttgctgctgctagttcttgttcacagattttttggcttttatctactttgaaagattatggtcttacttttgaaaaagtacctctcttttgtgataatacaagtgctattaatattgctaagaatcatgttcaacactcacgcacaaagcacattgatattcgctttcactttctgcgggatcatgttgagaagggagatgttgaattgcagtttttggacacaaagttgcaaattgctgatatttttactaagcctttggattctaatcactttgcttttcttcgtggtgaattgggcataattcatccttttggcatggtttgagggggagtttgtacctcatggttttatcaagcaataatatgataatgagaaaaatttataaacgagagctttgtttatgcatatggtattttcttgtgcatgctagcaatactttgaaggtttatttgtctctagcatagcttgtatgtattctagtcttttcatgagatttagattttgcttttcagggagatgatgcatgacacttaaattctatacttgaattaagaaaatatgcaatgttaatgctagcatatggtttgatttataaatgctctatatatatgctttattgccttgttattcctcaaatagttttaattgcttattgtgaaaaagaaaataaaaaatataaaaaaatgaataccgaatccttggaaacagtcttgacgacaaggacgtattcgatgtgagcaaaataatgggtgccgaatccctggaaacagtcttgacgacagggacgtacccggaataaaaaagagaaaaatatgagcaaaaaggctcaagaaaagaaaaagttaaaaattctctttgttgttttgtgctaaaggcttatttgagaaagagtgataattgcaataggtatatgtgtttagtgtttattcttcaacctatgtgcttgttaagatgttgcattataaatcgtatgaaatcatgaattatgattgttaattcaagcttaactgtaaaatctttggttcatggttatactttaattcatgtttgttatgttatagatgggttcattttctttttattgcaacacatgacgtaatatgctatatgtatgctaagctcttgaatattaatgaacataattcctatacttgatgaaatcattgtcaaaagggggagaagtaatgtgaaaatttttggagaagcaagattaatttttgagagttgttgagaagagcaaagagcatgttttttgttcaattgggaatttctttcttttaaaaagggggagaagttttcttttggatttttgagcacgatgtgtacatttgtacgaagtgtgctttttaccacttttgttttttttttccaaacaccaaaacatttttatgaatttgccaatgtgttcatcaagggggagattgtaaaatcaaaggtgtttttgattattattctgtgatgaacaattgggcattggagattattggttttgttatttggaatttattcacgaagtggttttggagatgattggatttcacaggtgaatatacaggtactgctggatttgggtccggtcagaccgggcacgggttgccggtcggaccggcgtgtattgcgcggtctgaccggccgacgctgtgtcggtttcggtttcgagttgtttatttggatatccgtgattatttcatgattatgacttctagatggatactatacgtatgtaatactattgtttgctgctaatgagtcaagttggagatagattggtctcggaatatggtttctttgtttgttccatgtgtaggtgactcaatgtctcgggagagtatttgcggtgatgaatcgggagtcggcttggggataagacgacgtccgtggtggtcagagatcatgcaggatactaaggctagagttgatgcacgtggttgatggagattccatatggcatacgatggagttattgtgtgcgtatgggatgcggagtcgaatttggaaggagtccaaatttggtacgattggttatctaaagtttctatcttgtactagagggtttcctaaggtgtttaggactcctagtatgagtttggttcatggctttaggctgcctacctcgggtataaatagagggggagcgtgaggcttcccggtatcgcttttgagagcaattgagttgagttttgagttagggtttcgagtttagtcgaaatttttgtaaggagtgctgttggtgcactttgtaaacacaaagagaagtaataaagtcgtcatccactttaagagttctttgatttgtgtttcaccgggtttcggcggtttaactggcgactaaccggcggttagaccggcggcatcgcggcggtccgaccggcgggagcgaggcgctcagaccggcggcggcaacagcaagcggcagatgatctcggtggtcagaccgaagatctaatctcggttagaccgacggcaaccaggcggtcagaccggcagggcaatttcggtcagaccgcaatccgtcgaattcgagggtaacttttatttccgctaaaagttttcggtttttgggtataccaaccattcacccccctggttggattagtttttgtgatttgatcctacaagacttactcacctcggtagctcgtggtggaatgaagacgggtgtcgatggagcttggttggtggaagacacaccagagcatgtaagaggagataccgtccttgttgaaatagcatttccaaaacggtactttgttgattgttgtcgtccctgcaattcttattctgccaaacatgcaagtagaaacaatcttcatattctttatagttaacaatatcttgaatctcacggttcaaccctccatagaaacttacaatactagcctcttcatcctctattacatcacaatgcaaacaacattttttaactcctgataatattcttttatagatttatccccctagtctaagcatgcaatttctttaaaagatcacgtctaaaagaaggagcacaaatctagtgcacaagttgtctttaacacttctcatgttgtaggtgctagtccatctgtacttatttgagtccatcatactgttgcaaaattattaaattcactagtagcttgcttaaccctatgctcaccaggaataaatgtgcactaaattttttatctacagttatttcccaatcaaaataagcttcagcatcataggcacaatgaaaagagggaatcgtaaccttaaatttagcatatggatcattacgcacattatgaaaattacctccaatacctcaacgattgaagttaagccagttgctatcaatctcttataccgatttcagggatcggaccctggcgctgattgggccacgtggcaaaacctgaacgcaagtttgcgtatggtaaaatcacgccacgtgtccagtataccattccagtgcactgccaatctggtgcgctgttccagcgtcgcacgggcgcacggccgctgcctcccctccgcctactgccaccggccaccgctgcatccttctcctaatctcgtggtcatggttgacagcagctccaaccatgctgacaggtgcacacgtcttctagaacatctttgctcaaagccagggcgcaaggcatttctggcatctgattttctccttaaaaatttgattaaacctggttagccacagaggcaagaaagctcaccggagatgcacacaagttaccaatatgggtgcccgtttcttgaggtgaatactgactcatctgtgtgtacttaattaaactgaaaaacgcatcttgatgtgttttttttaattcaaattaatttaacaaggtttccatgtatataatgagcagattaatttcctgttgaatgcatcggcgtaaccttcagaatattctaatcttgagcgaagaaaaaaaaaactcagcatttggtgtttgctaatggattgcaacaagcttatccaactccatgtacgttgaggacttgaccaattttaccgtgacctaaacacaacctatgtgtcaatggttctggacgttaatcaatcagatatcaatcgaatgactttgatagcagtgatgctttacacctttggtcagaaagctgctgcactaatcagcaacaggaaaaatgaaagaaagaaaaagaaagcatagcaaggcatttgaaacttaaattcagttagcattatgtgaataaaatttagcagttatataagctatttacatgattgttcgttaagatccaaaaccttttgcttatctgatacttcctccgtttcacaatgtaagttattttagtatttcccacattcatattgatgctaatgaatctagatagatatatatatgtctagattcattagcaacaatatgaatgtgaaaaatgctagaatgtcttacattgtgaaacggagggagtattaatgttatgggcatttgtcaagttgttcagaaaaaatattctttatcctttttatggcacagagtagtccaacaaaactaatccaagaaatcgtttctattatactcacatcagtaggacaattttgaccaataagagcagcagaaagaaattgccctttctattttgcttttaaaactagctttctttgatttttcattcttcacctctgcatggatgagtatcacaaccaggacatctgcttgagttaccctgtagtcacaaagacctttgtcttgataacaagctacatttcttttagatcgcatatacttgtatcatgctctcccaaaactatttgtttcatgttatattctaataactgagtcactaccttctcctatagagattaaaatttgaattgaagtctaccaattcttaaattcaagggttacattcttatgttccgtttcttcagaacacattcatgaccttatgtacttcattatgccatttacgttttcataagttaacatagagcgctgggtctgggaaatgcagatgcagaactgggacttaagagtactatacgattcggtaagagagcaatgctcatgccaaacaaggctgtggtaaattaatgatgtatcaccagacgatggattcggtgatactattatcgtcaatgaaaacattatcttattttctattcattacaaatagttaaatctccttatctcagcattaatgctaatctcaaagtattgatcgtgtaatatctttgaaacggaaacatttgatatgaacctcattggttttgtaaggggaaatacggtcgacctctcattgacaggaataaaagcaattaagtttgatgttatgtaaaactagattataagttctttaatgtaaaattttgtgattatgcacccccaatttttggttttggatgtatagatttagttatgatcaattcttatttacgtgagcattaggctttaatagtgtataaactgggtccatccagtctatgtatacttccgcgcggcaaagccgcggttattttctagtataatcctattgtagattcaccaacccgtcaagacaattattgttcgttgtaagactggcattcaacatgcgttggaacctctcggtaaaggtttgaaccatcctctcgatcgcaacagtcatatctctgttcatagctccacatttgtcttcgagtactttgacaagttcctccctaagcacacagtccttaaattcatcgttggtgcatgtcatggttagtagaaaatagaagataacacaaagatattatccctatcaactactaggtgatgagagaaagacacttgcactcaagcatcttaccacaggcatacacgtagcaagagatgcaaccagtggacagaagaatcacggtaggaagtatagtgctactatgcctttttggtggttatcagttgagttattttatcttggacctccttgcatcattgtacaggaagtacagccattagtaggcatgaaaattcgagctgcattatgtggagattatgggtaccatatacccacagggctacgttaattacctgactggatatcgggggtaactcatagtaacaaaatatgtaaagataaggactcgggtatcatgttaacttgtatatcaagaaagtatctcgtagtcttagtcagttacaattgtaaaatatttatagaacttagaccataagggataaggtcttttatcttgtaatcccgactccttcgcctatataaggaagggtcgggggccccctaagggcagaatcacatccaagatcgttagatcaataccacaatcggcggaattacttctcatcgagaaggcctaaacctgtattacttctcatcgagaaggcctaaacctgtataaatcctttgtctcataacccattcactttcatagcttcttcgccacccccttttgtaatgccgaaatctagtttcgatagttggcgcgccaggtaggggttgcgtcaagtttttcgccgactagtgcgatgggatctacatctacatcaagcattgacgatttcgtcttccctctcgggcagacattccgcttcggtagcctcgacttcatcactaatagcttcggcaagatctctcttctcaactcggattcgaaccagtcgggaggagatggcatctcggccccgttcggtctcctgaactcggctgagatctactccaagaacctatccctcgagttggtttcaaaccactcgagagactccgcagaagattcctccatggcatccagcaactataagaaatatgaccttctgtgacgaattcctcgtgatatcggagctatttatcattagcacattccattttatgatgattagtatgagatggggtggcttagtgacgaaaaaaatgtattcgtctttaataccaactagaaatcgtcacaaagtatttcaatgggatatcgtgatgaatattaatgtaataaggggcacaaagcaaacatcatagatttatataatgcatttctagaaaaatatattaaatgttaaagcaattccccactccaccgccgacctctgggaggcgaagtacgaggtgctcgtcgcatcgtcccgcaccacgggcgggaagccgctcacctgcatcccacaggcggcggctgacttgtgacgcttacggcagtgagctgtagcctcccgtggcttggcatccagcggttagagtgggggctgacagaccactatggtggcgagatctagctgctacgatcccctgtgaggcgaatgagctgcggccttcacaagtgacctcggctgctgtcccagccaggcctgacgatggtgagtttatttcctgtagcgaagctcttttccaacaaggccagggagtgaatgataatagtgatgcctaacttcaatgctattagtttactcaaatgtctaacgcattgtaacactgaaatgcatataagtttctggatgtaagttactgaaacaaaattgtcttacaaaaaacggccgatctcattgttggtttgcatgtactttttcattcaaaagctattgcctgattgcctaattctcccatgagttgttcatgagacattgcatatgctacatgatttattcagtagctaaagacagtttatttccttctcaattcagtaagtaaacacagggctaagttacactcagtttgtatttaatggtttagggtgatcatgccaaataatttgttaaattaattctaatagaatcttctgtcggaaagacatgcaaacctacttaaaagataaagtggagtatttatgattgtgatgaagtgatgcatattttattatgctaatttaattttccctgtgtgatttgtcgaattactagcatggcaaataaaagattaggttcattccatcctaacaaccatcacagtgttttttttttaatattctgtacatgtgtgtgcttctaaccgtggatatatataaccattgtaccatgtttactgcacaggttattactaaactatgcagctgcgatctttaattgtcaagatgtttatgcaaactaactagattcgtataattagattaacgatgtttggaaaagtttctggatttgcatagtcagattaacatctagcggaccccattgatattgggtggtgactggtgacgaggtgcagccttattaacagatgacctccgctaagcctaatggtaagttctacttcctgtatcctccattcctttgaaaacaggccatgagggagtgatatcattgaggcatagttctactgctgtcagtttactctaatatatttagcattttttcggatgaatttactctaatattcattctaaccccaaagtatagataatttttttgatgtagtaataacagtatagacatgagtcttatgtgtgtgtcaactaataaactactctctttgtttcccccttgcatgctctaatattagcgcttttaatatttcctgttctatactttgcttcccaacaatgtaaaacacttctttttgtataaaatgtcagtcatcgcttcattgaatattttgtttttgtccaactaatgcaatatgtttccaatcttaactggcctgtttttcctagctaccagaaacaaagaaaattcgtgttattaacacttgagttcactgcagtacttggtttgtttcctaccagaaactgagaaaatatacccattttaattgagttcatgcagccaacagtatactactactccctccgtcccaaaaaaggcaaaccctgggtttgcgtgtccaactttgactgtccgtcttatatgaaatttttttataatttgtatttttattattgttagatgataaaacatgattaatactttatgcgtgacttgtctttttaatttttttcataatttttacaaataagacgaacggttaaatattgggcatggaaattagggtttgtcttttttttgggacagagggagtaagtcttagcatgcgcacggaaaacgaaagtgagtttgcgcacggaaaacgaaagtgagttttcctctccttgtgctgctgctgaccgcaacatatgcttcgtcgcagataaaagatgtttgttaacttggatagaactaacaaaaaataaaatcatattggtattactgtcctttggtcctttacaagagtgaacgaatcttgatcctttagtcctttacaagagtgttttatcattctttctagctcctgcatcagaaacttctaagtttgttcatgggatattgtaatgatatggttatcctcatggaactaattaaaattagattactatgtgtgcatgtatattgccaggtcaacatgaaagtatgcttttcatgattggttgcgtacataagttaattaatgttgttcctttttacttgcagcaaaaaaaggtgctccatgtaagggactttgggggtactctcatggcatttggtttagagatttgaaaggatttgtgcttgcctaggtgtgagcaattggttggatttggctgttaactgggttataaattttgtgttgtattggatgtttgtcgggttgtgttggatgctaattgggctgtaacctttgtgctatatgggttgttattgtgtttgattgttgggcctatatgggcttagcccacttgttatttgatactaatgtaaatgaatataataagattggctgaaaatggtgtggtataatgtttgggcctatatgggcttttgcaatggacttggtacatttattatttgatattaaagcaaatgaatataatagaattaggctgaaaatatgccacatcatagatgggctaggctaaaatctagtcgggcttgccattgggctaagcccataaacagggtgttcaatacatggattttaatgggccatcagatattttatgacgttttttatgttagatatgagcgtcacaaagttatgatgacataaggattgccactagattaatgatgaaaaaaataagatttcgtcatagaacgccattagatatgcatgataggtgacgaatgaattttcgtcacacgagcgtcgcatattacaaaacatgacggaattttatgtttttgtgacgtaaatgaagcgtcatctatgataagatttcttgtagtgagctttgcttaaatgccacgatatccgcctatcactatgcgcctccctgacgatctcgcggccattttcggctcaaggaaatcgtccccctaggtctcgatctaatctgactttgagctagatcagatctagctccagggaggtcggagtcatcctccaaccactcagctcttgctcgacggacgaaattgccagctatcttagctcccctaacatcggatctcaagcgaaaccagaaatcgtcaactacaacaatgacttcgacttcgataacttcgcttgctacaatgactactacgacgactactacggtgacctcaacgatgactacacttcgctgtacttcggcgtctttatgaccaacaatgagacagacgagcagagggcagcacgactggcagacgaagaacggacaaggttagaacaagaacgctaggagcaggagtggcagatattggaacgtgagcgtctggatcaggagcgccgtacaagagaggaagaagaacaaagacggagagaagaaaagggaaggcggagagatttggctcaatgtggacgtcgcactcgacaactcattggtcagactgttgtagatgacaccaacgtgtttctcacacctcagcagaatgcagtcggggcaatcaccctcatcgacaccatcctgcctgaggccccagactacgtgacgccaactctcaacaggatgaaggccatgatcgcggcaacacttccggacgattatagtggcagtcggtaacccaccacctcggcgcatcatcagttaggaagccgagctagttggtctaattctcgcgcttcgcactcaagttgggggcttcgagagcagttggttcactctccagctgttggcaatagagggccccgagtagatcacgagcagcagaagtcttctcatggcctggttgatctcagagaagccttgaatgcaagacggagagcgagacacggacgagggcaccaccactccacggagtgcattgatggcaatgatgaaggagtcactgcattcacacgtgacctgcgtcgagtgaattggccggccagcttcaaaccgactggcatcgagaagtacgatggcaagaccaaccctgagtcctggcttatcgtgtacactctcgcaattcgcgtagcaggaggagacaacaaggcatggcgaactacctgcccgtcgcattggctaactaggccagaaactggctcgctgggttactgcgaggcacaatcggttcccggggcgagcttcgcgaccacttcatcgccaactttgaagggaccttcgaacggccaagcactcacttcgagctctacaatgtgatacagaagcctaatgagcccataagggattacatccggcgcttttcagagaagcgcaacaaaatctctaacatgaccgacggcaatatcatcaccgccttcaccaagggagttcgcaacgagctactcattggcaaattcggacgcaaaccacccaggacggtcaaggaaatgtttgagaaggctaacgagtacgccaaggcggacgacgcagtcttagcttcgaagcagtccggcagtggctggaagcccaagaaggacagtggcaacaacggtgcaagtagcagcaacactcaccacaaggatcgcaagtgtaagcccgaggatctggttgccgccacgtccacttttcagcatcaacgaattcgtgtcaacacctaagacaagatcatgaatgcgccatgttcacttcacccgaactccaagcacgctgccaaagattgtttcgtctacaagcagtttgccaagcagtacgtcgctcaattcaagaagccgacttaaggggaaactgacacgtcaacatagaagaaggacgacaccgagccagctcaaggcactttgcaggattcaaggaaggagctcaaccacatcttcggagggccacttgcctacgagtccaagaggaagcagaagctgaccgaccgggagatcaacgcagtccagccagaagtaccacaattcctacaatggtctgaggttgcaatcgattcgatcgctcggatcatcccaaccgagtggtccacccggggcggtacccccagtactagacccagtagttcgcaacgtgaagctcaagagaacccttattgatggcggaagagcgctcaatatcctcttcgccaagactctcgacgaaatgcagatctcgaggatcgagttacggctgaggaatgcaccctttcacggagtcttccttgtgttttcatctacaccactcggccaaatcactatgccggttacctttggcactggggaaaactttcatacagataatgtctgctttgaagtcgccgactttgagacagcttatcatgcaatgcttggacgaccggcgttagccaagttcatggccatcccacattacacctacatgatgatgaagatgccaagaccacgaggagtcatatccctgcgcagcgatgtcaagcaggctatcacctgcgacaaggaaagctgcgagatggcccaatcttgcgagcaagcactcggccgagaagaagtctgtctagctacatctacttcaccagagggagacgtgcccgctaaaaatttgtccaagtcaagagaaaacgacgccaagaccaagaagattccactcgatcctttagatccttccaaaactactgtgataggcgttgagttagattgtaaataggaaagcacactcatcacctttcttcaagctaataaagatatatttgcgtgaaaaccatctgatatgcctggtattcctagaaagaagacgcgaaacctattaggcaacgactccgctgatttgcgcaagacagaagagatgtgatcaagaaagagttagccaagctgtttgtcgacagtcattagcgatcagtttcgcccgtcaatattacctaaatagaggagaacaagttatgcttgcaatgcatttttgtgttaaaataatatatattccactagcactaggattactaatctcttacacagaataagcataagatggaggagaatcgacaacaaaatggacgattaatcaaccggacgctgtcgataatcagacttaaaggaagatagaccaagaactcagaattgacacgatcgaattgggccaaaattcacaagtctgaagatagaagaggtcaaggaggccaccagtcgaattgtgggctggatgggcctgcccatggttcggcagaacccgtcgtgcagccgctggatccagggttggcgatggacgatgtggatggcttccctatggcggttggagggtattaccgacctttccaatcaccataaccgtcattaccagcttatttaaggccatcactctctccatttcaagacacacctcaagcaaaaagcttcatacatctctcaagtttagtatatagtctctagagtatagtggaatagaaatagaatagaatctttagttctccgagtcttcagaagaattcgggtatggctctagtagcttttccttcttttgtaagacttgcacttaatttaaaatactcttctttatactactttggtattgtattactttccgagtatatgatcgaaatgatcaaataccaactttattatatatccaagttatatttattatgatgctagcttatcagggagatgcaatggtgtgggtataatgatcgtatttacgatgactctatgtcatgacgatgatattagactagtattttgtaacttaagcgtggtgtttagattactggatatcattatttggggttatattctacggaagcgaggtgggccgctgatggtgacagctcagtacgggtattcctccgcgcgtgtacatagtcctccgcgtgtgtatatagtcctaagttaatttcctggggagggtactcctccgtatttagccccggttgggtagtcatgacagattgtcgtaaggaactcggcaatcaggggtggcttcttgaagcaccaggagggcattggaaagagggtattagctaagtaatcatataactaggatgtatgtgtaatatgtttgtatactagaagtataggaatatgatctttcgattttctttccacttagcttagataattatgaatgagagtattaatgcttctgcttagtgtcactatactctttgaattatattagcccctgcttagactttgattattgcaagtaatatataaattattagtatggttctctctattataatcttcccacgggattaaacaattacgatacccttggaatactctcgggtgaaatactacaatggtatatccgtgcgcttgcggataaattctgtaaccgtaatataccagaagtatttctgcgccattgctggcaattatgtttctagtaatgcgccatttcatcaaggaggtctttcatcccgactggttggctaacccagtcctggttcggaagaaaactaggcaatggcgcatgtgtgttgactacaccgacctcaacaagtcttgtccaaaggaccccttcggcttgcctcgcattgaccaagttgttgattcgacagccggctgcgagttgctaaactttttgaattgttactcggttaccatcatatcagcccgaagaagtccgactgcttgaagacttcattcatcacgccattcgggtcttattgctactttatcatgccttttgggttggagaatgcatgagctacatatctacgcatgatgcagaggcgtttcacaacccaagtcggctgcaatgtagaagcatatgtcgacgatgtcgtcatcaagaccaagcacaaggataatctcatcgctgatttggaggaaatgtttgccaacatccgagccttcaggatgaagctaaatcccgagaagtgcaccttcgaagtaccgttagggaagttgattggctttatggtgtctcacagaggcatccaagccaacccggagaagatcaatgccatcctcaacatgaaaccgccgagctcccagaaagacgttcaaaagctggctggatgcatggcagcgctcagctgattcgttccaagactaggcgagcagtggatgccttttttgaagctgctcaagaagacagaaaactttcagtggacccctgaagcctagaaagcttttgaagacttcaagaatttcctcacaactccacccgtattggcttcaccacacccacaggaaccgttgttgttatatgtctcagtgacatcccgggtggtgagtatggtgttagtcgtcgagcatgaagaggagggctacgtccaaaaagtataggggccgatttacttcattagcgaggtgatggccgacaccaaaacacgctatccacaggtacatatgttattatatggtgtcttaattactgtcaggaagttggcccattactttcagagtcactcggttacggtggtcacaaccgcggagctactgggcgtatcactaagtgggcattagagttgatggcattagacctaactttcaaagcccacacctcgatcaagtctcgagccttggtggattttgtggccgagtcccagacagatgtacctgcggagaagctggagtactgcactatgcatttcgatgggtctaagagaatttcaggcacaggggaggagttgtgctgatctcctataaattatgattattttcgaggatttaagccgcatatgctttgtaattgattcagtcattttggtgactataattttttttaaaccattcggttgtttattttttccttgactatatgtttaatttgttcaactaatcatatagtcgggggctacatctaattaggtttatctagtcgatgcacctagatttttcttttttagcccttcacagcatgagatgattgaggtactcaggatttatggtgaggatgattcaagtacttggattcttcatgaaatcactcgggagaatatcattaccactcaggagaaggttgtctcatcatctgtgaaggtcttaggggttactgtggagattatgggtaccatataccctagggctacgttacctgactggatatcgggggtaattcatagtaacagaatatgcaaagataaggactcgggtattgtattaacttgtatataaaggaagtatcccgtagtcttagtcggttacaattgtaaattatttatagaacttagaccgtaagggataaggtcttttatcttgttttcctgactccttcgcctatataaggaggggtcggggccccttgagggcagaatcacatccaagatcgtcagatcaataccacaatcggcggaatatatccccggacaggagtatggtattacttctcatcgagaaggcctaaacctgtaaaaatcctatgtctcataacccatccattttcatagcttgttcgccaccccttttagtattgccgaaatctagtttcgacgcatttgcaaatgaggtacactattatggtttcctttcagccgtgttccaaagtgaatgcctattgatatagttttggagctaaatgcaagtatgttcttaaacaggaaacaccagagatgttaaatcatctgaaatgcaagaagtggtacattgcagcatgcaagaactgctaccaagtactactatacaagaagaggtttctctttgcaaggaatactcattatctgtttacagttctgtattaaatacgtagtgcccctgttactttgttcaggactatggcctggtttagttccccaattttttttcctgactggccgataggaattcatgtattgacatgggatcactgttatagcatcactcttattatttgttgccaagttcattacgtgaatgcaaagtatgatcacattattacctgactggcattcccagataaccttgttgagaagactcctgccagcagtaccctatcctccccaaagttgagtgaccgactgagagagatttcaaactcattgaagcttcttagcactcggccagtgagcgtgagggcagaaaagtggaacatagaatgtgtccggagaatcaacacgattgcaccagagccaaaaactcctgaagtgcatttgtaatttgagcaagcggaagatcccaaggataaacttatggcccacagcactgggattaaggttaacctgtttttttttaattcactgactcattttattcgcttaatgtgtttaattgtaccttcttataatcatcttgcctgatgaattctctcttgttttttatgtcccacagaaatctctagctcaaga

SEQ ID NO: 28886 - DNA, 9471 bp, Oryza sativa
taatgtgtttaattgtaccttcttataatcatcttgcctgatgaattctctcttgttttttatgtcccacagaaatctctagctcaagagtgcttgacttttctcaacagtgctaataagtgagtttggcattatctttacaaccgacttcacaccacttctgcatttctaatgcatgtttgtttgtgtgtccattgcagggagcaattaaaaagcttaaaggtttgctctgaatcatatcgtggcagcccagattgcttctttcttaccattaacccactgatacatgtgtagggaatcggagaaaaaagggcaaactacatacttgagcttcgtgaggagtcaccagagcggcagagctatttaaagaggtgagcactctagatcaacaagggagtagccgttagacccaagcaactagaagttattatatgacaatgcaactcagagctgattcttttgctttcgcagataagtgatctgagagacatcatcggaatgaattcaaaagaggtactggagaatctgattgcaatgtgtacatttatctatgttctttgatcactggaagatggttttagttttcacaaacatttcactggattacactgtcactagagatattcctgaatagtattagactccagctgcttcattttgcaaactccatgggttttgggtgtactaaaattgccactgctttgttatcttcaccagatcaaaaagatgatgtccgggattatcgactcctaggaaagtaagcagcgcgagtgcgatggttctcctgtggagtgtgcatatgcttctttggtcaaaggtgtcatgtgtttgttttgtaatttttttatccagttgcttctctcaagagcgaatgctttggccaggagttggcgttctgtgagagaatcagtgctttgcagtggtttgctgctattatgtgtttcgtgtaatcatcatacagtgtggtaccaatattgataatggtgtggcgttgatgtgatttcctctcttttgatgtttgttgctataaatgccgatttattattttagaaaaaataatgagccgataaatattcctctctgttgatctgagaagctcagttctagttgttttttattccgacaaatatttgttctgatccgtatttgtttcgttttcgtattcgataatatttaactctgtttttgtatttggcgttgactattttgattttgatttaaaaaaaagtgaaaacggaaacggtagaaccggtttttgtcaagaaaacaataaaataaagttaatatgggtgttgggtttggtacggaaatgacatggacaagattagatgtaatataaaacttgctcttaagatactatgtggtgggagaaagtcctattaagcaaggcagatatatgttggatatgtagaacatgaattaatgggagggagaaacatagatgttaagtttaatgtgcttttattcaaaaatatagcaacctatactagaatatcacctattagtatgaatctgatggataggtctatattcacaatatgaaacatctacgttgaaacattttgcctcaaaaaatgaggttttacattccgccttccctaaaacctgagttttttttatttttaaaatactctatttctaaatgttgttatcatgtggttttacattatgcattccctaaaacctgagtttttttttaaaagatactctatttctaaatgttattatcatgtggtagtgtttcaacaggacttcatttaagacaataaagccctctagtctagtcctctctatactagaactctagaagtttacagtgcgtctcgcaccaacaccgaacctgggaagccacattggatgaaactcctacaaagccacccatcccacaatgcaaataactaccttctctcttatagtgggtcccaccatcagatgcttttcatcttccttctatctactctttacttttccccactcatcccctcccaaacgatcccctctctactcaactccggtgaccccgccggtgccacctctcccatcctcaccccaccggcggtgccacctcacctctccctcctcctaccggcggctccctccaccggagaggggcttggcgctccacggcggcagaggacacgacagcgacgagtctgggcgcggcgccacggtggcaagtcggggcgcagcgcagcggcggcgagtcgcgacgacggcgtggccgagctgcccagatccggtggcatcggctcgtcggggtgcggcggcggcggcgctgtggccttccaccgcggcggggcggagaggacgacttggagcggcacctcccccttcctcctccagcctccgtgccgtggcccgagcagctacggcgtcgttcggcggcaggcggctgcgcagcggtggcgacgacggtgtggggcggctgtgcttgtgcttctgtgtgtgcttttcccaatgcgctctctctcctcttcccagctgcgcttgcgcttttcacatgcttttcagcccaaaaacgggtgaccaagtttggctactcggtcttcacttggctacacatgtgaaggacgtggcaccgaatatgccattcctttctctcaggctgagcgtcacgtaggtgcattgtaaatgccctaatgtggccgcctgcatgccaccttttatcacgagagcttttagggatcgaagctttatatatgtccgatatagaactattctagggtcatgaggatatatggtccaaatagctgaaaaggagaaatctccacatcaacgcatggggtatcatccagtaaaatacacatttcccacgaggtaacacccacaaattcagttctcaagaatctcatctcctagccaatacccatggtctgattaggctgcactttcttttgactctctccaatatataataatacagtatattatcagatatatattctgaactgcaaacattatcttataagtgcatgatgcagagattgccgagatgattctccctgatccccaacataacttatgttggcatgtgctatgctgtttgcatctgaaatcatcttgaacgctcaacattataagaacatcctgcacatcgatggcaattaactatcaaatccaatgaatataaacagtacaattcgtacttcgtttcagctttcttttcctacagcataactaaatctaaacaactaactattctatagcatagtatcttaaaagtaaagtcttgaaaaagctagtatcggcttattgtggaattgacagcaagcagaaacagtccgtttaccacagttgatgaaaatacgactaactataatactccctctgtcccagaatttaagaagctgagattttttaccgtccatcatagtttttggtacctcccgatactataatcggagccatccatccagtgagatcaaacggttgacaatcactggtactgcgaggtacgggagtcccgtgtgggatacctcccacttcattcgcatgcgtggaactagaggtggccaaacgggcggcccggcccggcacggcacgggcacgggtccggcacggcccgtttcggcacggcccgttaggcacggctcatgaaacgggccgtgccgtcccgacccacgtgccgagccgccggcccaagcacggcccgtggatggccgggccgtgcccgtgccggcacggcatgcgtgtggcccgccgtgtcagtacgggcccgtgaatgaaaaatgggccgtggacggggcacggttggcccaggaaccgaaatggcgcggagggatgcgatgcggacttgcggaggtggctggcgggctgggccatcagctaggaggggtgctcaacggacttgcggaggcggctagcgggctgggccgtcagttgggagggatgagatacggacttgcggaaggatgagatgcggacttactacagtagccgtgccgtgccgtgccggcccgcgggctcggccggcggcccaagcacggcacggctactcgtgccgtgccggcacggcccgttactgtagtaggccgtgccgggccgtgccggctacaggttccgccgtgcctcgggccgcccgttttggcccggcccgtttggccacctctacgtggaacaagttgaagggcagaattggactttcgcataatagacagttttcgcagagacggtttgaatccccgacaccggcaatctcactcctcccgatccccttccttcctcgacggcggcggcgcagccaagctcgctggcctccgcctccctcgctacaaccagcaatcaccaccctgcccaatcccaacttgcccctcctgctcccggtccaaatccggccgcgccgactgcagggagccgatatagctcagggcgtcgacgacctcaatgcaccaacgaagagatgtccacagcgacgagctcagtgcccgcctgaacacaagcaaagacgagctcggtaccaatctgaagcaacatgaatcgtggactggaggacgaacaggatgctgctgtccatggcatgaccagtacatcatatcgatccttcactagtaggcaagcatcttcatctttccttcaccatcatctctcgcgtcagcctcgcagcttatgcttctccccgctggcgtcgtttgacctcctggccgctcaatccacggagcggtggaacatggaggtgtcaccacgccgatgcaccacgtcgcgaggcaggcgccgaggcgtcgggagcccagacccagctggccctggttgattgccacccgtccccttcgccctgttcgtgtcggtggccagcctatgcgcgtcgctgagtttctcttcgttcactacccatcgtacccctctagagatcaacggttggattgtaatcggtacctcacgttacatgtacctcgaggtacagaacgctggaccggagaagcctctaagaagttttagggttggacacggttattaaaaaagtaggtagaagtaactggtggaggattgtgattggatgagtagtggagataggcggaaaacatgaatggtggaaagttataattggttgggaagagaatgttggtggagaagttgctatattttagcaaatcctgatggctaaaagttgttatattttaggatggagggagtaccaattatgagatttggtcgagtctacaagtactccctccgtttcaaaatgtttgacactgttgactttttaagtacgtgtttgaccattcgtcttattcaaaaaatttaagtaattatttattcttttcatatcatttgattcattgttaaatatactttcatgtacacatatagttttacatattttataaatttttttaataagacaaacagtcaaatatgtgctaaaaagtcaacggcgtcaaatattttgaaacggagggagtacaacacaatttatgataaggaaggagagcacttctagcacggcaatttgctgtgagcttaataataagtcgtacaaaaaaatatcaaaaagttaatgagattactctatgatagatggagataaccagttttaacagaaaaaaaagagctatcaagtgtggttccgtagcacgtaccagtcgtgatatcttttgaaaggctgtattatctccatcagcttggggcaatcatttatataacctgactttatttcagagacagatatagcaccaacaatagagatgaggtctggacagctattaagtcgaaggatgagtcccttgagtgtcatagaactccccagatggctgttgtctatgcactctatgcttggacagtcgactaagcagagcttccgaagagaggatggtaatgtcattctcctctgcatattcaacttgggacagccctcaatacatagctcctccaagtgggaaaagctatggaggtcatcaaccggcagtaatgccatttttttgcaatattttacctaaatggtctttcaccacaggcatataagcgggcataagaaactcatcaagactcaacagtgcatcacatgaagaaatgatgacatttgaaagggatgaaaatactccgacagtgcgcctgctgcttgcctcaggctgtgtttagttggatccaaagtttagattttggttaaaattggagatgatgtgactgaaaaattgtgtgtgtataacaggttgatgtgatggaaaatgactgaagtttgaatccaaactttggatctaaacacagcctcagacacacctatggatgtgagggagctacacccacaaaaacgcaaatcctccaaggatctaaggttacttatccaaacttgcaggggaatagatgttaagaactcgcattgtattgtcagacttgtcaggagggcaaggccatgaaagcaactcacaaagtgatatgttgaatggccaaaatttctaagggtagcttttgtaagagaagagggtaaagctaccaaaccttttcaattgatgttaggacactgtcagatttccagcacctcaaggtgacaaacgttctttgattcttctgaatcaggaaactgtggttcaaagaatgatagactctgaatgttattgcagcaagaaagtataagtgaacttagaattttcagacagtctggccggagccagctggggcaagatttaccctagtagctatctattgccaagttttgaagattccaatgaggtaacaattcaatatgttcctctatcatctataagtcttcataacttgttcctggtagggtccatctcaggcattgtttatcacagttctccttattatacatgaagccttatgattcaattttctttaaggaaatcagatcactgaaaccttgaggatatcttttgaaaacacagcccttggcatttattgtctggaaatgatagaggcagctaacagatgaaggaagggtctcaaaagtagaacttccgaataagccaaggtaacgcaaatgttttgagttgcttatgctctcaggtaactttctcactgttccccgcaaaaaaaaactttctcactgttgaaagattaaaaatcaatacacggatattcaggagttccttgaacaaacagtcaatcacaggagcaaaatgtttaccacttcggtaagattcattgcatactagggaccgcagttttttattgtgtgtgcaaatattcactaattctgcacagctgatattttcagtagtgaatattgacagatggcgaacctttgaagggattttagctaggtcacttacatgttgtatgatgaagcactcatctttagagactagctgtgcagtatcatgcatcaagtcatgaattacatacgtaccatgctcaccagctgctttctgaaagaatgaccgatttaaaaggtcatcaaagcaagagggtgcattttcaagctccacataaccttgtgctaccgaaatatctgctagaaaatccttttcaaatttgtgatcctttggatacatggcacagattgagaagcatctttttatgtcctgtggcaggtaaacgtaacttagtcgaagggctggcaaaatgtcagtctcctcttgttctaatcgccatagctcacttttcaatatgtcctcccagtgctctatgcttaggttgcttttcaataagtgtccaagagttttggcggccaaaggtgaacccttcaacttgggaagtatagcttcaccaatgcgctccagctctggcctgttgcgacaactgttgctccaactctggacggatccgaatgcacatagtttgaagaaattccagaaaacaccatgttgcaatcccttcagttcatagtgattactgttgctgactaggttagcaaccttggaagatctagtggtgaccaaaatcatactgccctcaagaccattgcttaaagttctatgaaatgttctccatcctttctcatcttttaagacatcatcccacatgtcatcaaggacgagtaaaaacttctttgacttgacactatcacgtaaattaaccataagagtatcccttgtatcagaatcttgtaactttactccaagagacttcagaacatctcttgttaacctgtttacctcgaattcatccgagacacatatccaaattatgcagttgttgaagtgattccgcaccactccatccacacagatttgttgggccatggttgtcttcccgacacctcccatgccaactattggcaacacaagcaactctgtcctccttgcttcagctgtagtgttgcatgccacaggcctgcctctcttgtgtccacgtactcttagcttttgtttcaagtcctccagttctttttcacgaccaaaaatctcatctggctcgtcgaggacatgacatgtctctggtctgacaattttgtcaaacttcttgggtgttttgtgcaagcctaaactgttagattggtcaaaaacatgcttcagtctttcttggatttccatcactttcctgaatttgccactgaagttaacattgcccaagaactccaaaaagggttcatgcaagtgatcttgccctaaattcttgctcgccttcaccttcaccttgagagcataataattgtactcatcaaggaggtcctcggcatcgtacactacatcctttatctggcgaaggtgcccagcttctgtttctttgtggctatgccactcaaggcggtcgatgaggtcatgcattgtgggtgcaattaatggttgtttggatcacccaaaggttgtgctcaagcttctgaagatcatcctgaatctgatgcagtgtagctgttcttctttctccagctgatgctgatgctgatcctgtccctgctgaacccacttgctgttgctgctgctgttgagaacatacggcagctaagacgtgtggtgtgacccagttgaagaattcccggaacgcattggcgtcagcagcaagaccagctgctcccctcaatattccaacgaccttgtccatagccaattgagcactgctgtatgatcataaacgcaaacaaaatcaaactaaacgctaagattttggagcaggtggtcagggaatgttttaccagggacatgggtggcggtctagcctgaagattggtgctccctgatttttactgctttccttctcttgttacaaactcttttgtgggtttgtatgttttggctgtgtgcatcctagttatgcagaggccgggaattttcttagtatggttctatcaacttgatgtaatcgtctgagattaataaaagcttcctttataaaataaaaaagagttccatgtcgggagagatgcaccatgccaaagctacatttactgtatctagtggttcaaggcaaatctatcacctatgtatctactattttttttaaataaagtctagaaattagggcgggtctatattatagatccataactaaaaatggacaggaactttgttttgtgagagtatagcctataggaactaaagatatggttttattaaatacaattctatctcaaatagg

SEQ ID NO: 28887 - DNA, 12479 bp, Oryza sativa
  unsure (1)..(12479): unsure at all n locations
tctgcctgtacaactaaaagtattattggattaaatacaattctatctcaaagtaggcacataatttctcagaaagttctattagttgtggtgaaagcaacatgtaagacaacaggcacagtttgaaatttttctaagcttactactacattataaaattgacgaagaacacagaagactgaaatatgcagactttgggtacaattggaaaaacagtttctgttgataattgtagtactattatctgatactcaaaaaatatcaagctggcataaatggggaaaataattggatcacacacctgggtccttaatttgttcacaattctttctacccaatgatcagaccacctagctagctcctcttcttgatcttgctcttcttaatgtctgctacaagcaaagcgaccacctgcttattcaaatgttagaacaatatgactagagattagataggaaaaaagagtacagatacactagtttcagatagagtaccaatttcatctcccaaattcaaacgaagagaactagatgaaatttggaagagtacaacctccaatttcagttagttcttttcataggtagaacaagggactgaactcatttttgggggcataggttgcttccacgtacaattgctcggataaccctctgggaaattattaagaggaccccaggatgttttcagaacatggcagaaaaaaagagcctgccgctgccggcggtggcctccacgactcgaccgcgcacggttgcttggaatggaccctacattttaacaaaaaaattgagagcagaatttaaaatagattgtgttcaatttttatacatttttatctaaaagtattttagggctaggtaaataagattgtgaaatactcattaccacccttaacgtgccaatttgatattttgccatcctccaaacggggtttcgtttttgctgtctaaaagcatctccaatagcctctttaaattggactctccaaacacctgtatagctaactatctatctgatttggctaatcaaactagatggtcactccaacagactctctattaatcctctctaaaataacaacggacccacatgtcagcctctactcctcttcttcctctctttctcccccttcttccttctctttctttcttttcccttttctttccttcccgtcgtcaaccaggcggcgcatgcagcgcggggaggtggcaggtggcggcgcggcgcggggaggcggaaggcggcgcaccgcgggtaggcggcgcggggaggcggcaggtggcggcacggcacggggaggcggcaggcggcgcaccgcgggtaggcggcgcggggaggcggaaggcgacggcgtggcgtggcgcggcgcggcggcgtccttgctccctctccccacaggatctagaggccgccgctggccttgccaacctcggcccgctctgctcgatgaagcgacggcggcggacagcttcggggggcagcggcagagcttcgggcagggatggcgacggcgagcgcagaggctagcgacggtggcggcggctcgcgacgatgacctcgatgacgacccgacgacaacgactgcgcagaggaatagcatgtggggcccaccatttggcgaggagttttggctggccaaatctaaccagctagctagcgagtttggccatctgttggagctcttttttttttgtcttgaatagctaaaatttggcttggagagactaatagagaggctattggagatgctctgaagagccggcctggctcaacacgacattgacccacaaatggtgcagaccattaaagcatcaccggtacgactcatggaacaatccatgctatgctaaggtcgagttgtatgggcccaaatatgacacgtgggtcgacgaatgtgtattaatatgtttggcatatcaaaattaaaatataagggaaaaaaaggaaaaagaaaaagaaataaatgtgaaaaagatgataaaaaacaggtccccgacccagccttctcagtaaagcagcaacaacatcagtacgatacgagaggggaaaacatgagagagcttgttctctaacatgtgtgatctacaaggggcaaaatggacctattgggttggttgtccacgatggcggaataagtccactttgacttcctcaaatataagtccaatctaattcgtatccctcaatcgtaataccagatatcttaaaccctcgactattaaaaccaggttgacatttcgcggcggcaccgatggcagggcggcctcgctgttgtcgccgaagccaatggcgctgcttagggagtgggatggggacggggagagagaaggtgaggaagaagaagggaacaagaaagagaggatgacatgtaggcccacatatgctgacttagtggttggactaggtcagcgagccacgttagcgaaaatcaacctcaaagccaccgagaaagttgttttgcaccagttttagtagttgagggtttaagatatctactgcgattaaggaatacgaattaaattgtacgtatatttaaggaagtcaaagtgaacttactcccatgttggcacactcatctgtcataccacatagaccaaagtagcaacaaaaacgtaatggcaattaatagtagcatatggagaatggttgtttcttatagtggcaaatagttaaaatttttcggaatcacaaattctcatcttgatgcctcatgctcgcatgccacacagcatctaaatgttcttgtcatgtagtccatctattccataaaaaataacttctggagatgaatctggataagtgattgtcagattcatcccattcttcttataacggagggtgtatgtatcgctcgttgttatcatacactccatccgtcccataaaaattgagatgaatctagatatgtttgttagattcatcccattcttttttaacagagggtgtatgtatctgcgagacactatttcaaggatttcatccccaagaacagcagatgacgatcctattgatcgatgtaattgaagatagggtcgaagtgctcgcaccacaaagtttttcacagtatggaggcacacacgtgtacagtgtggcggagggcggaaaaaaatttaggtgtggccaataaactaccacacgcaagagctagcacagaacaagaattaagaaaaaaattcaatacacaatattgtacaacgcaacattatctcaaataagtcatagtaatgagcactaatcacaagttcacaattcattatccatttgcaaacaaatgtaaatataaaagtaggtataaaaaaatacctcaattcctcaagattcactgatacgctttgaaattgcaatgttctgaaattgtaaaaaaaaagtatatttgataaattttggtaaatttgcaaaaaagtactacggccgtgtttagttgttttggtaaatttttttttatgtacatggatatatatttgaactattaaacatagactaataacaaaacaaattaagattctgtctgtaaactacgagacgaatctattaagcctaattaattcgtcattagcaaatgtttactgtagcaccacattgttaaatcatagtgtaattaagcttaaatgattcgtctcgcaatttacatacaaactgtaccattattaatacttcatgcatgtgtctaaacatttgatgtgacagaaaagttaaaagtttgaaggaaactaaacacagcgtacctctctgtgatgccagtgccttcccttttctctttctgtccattttctgatgatgggagattgggagtgatgcctgatggctgctcctgcttatgcttgccttgcttggtgcttggtgctgcggcgccagccgccctgcttggcgcctgcgcggctgcgcccctggccggctggccactaactcgccgcctgccacgccgcgccgccgtccggcgtggatgccgcagctctgtggctgcgcccaggagcccggcagacggcgggacatttaactttatgtcacttttaagatgttgcaattaattatttgtcactcgttgtctatgacatatgggactatgtgtcaagtagcaaataatttaacaccccttataagagtggcaaatagttaattattccgcaaatggcagccatgcctctcctcgccttcgcctgcccttccacgcgcggcgtgtcgcttcaagactctagcagaaagtaccgcagtagctgctgtcggccgaaggggattgaggattggggagggggattgctggattgggtgttgggggaatcgatggaggtggatgagatggggaaattttggtctagggttacacaaaacaagcccaatggcccgcgggcactggagttcgccaacttcgcgaagccaatgggaggcaccgccatcaacacggggagctcgccacggttcgacgtgttcggcaaagacttcgggtgggggaggccggcgaccgtgcggagcggcggcacggacaagttcgacggtaaggtgacggtgtacgaggggccgaccggcgccgggagcatgtcgctggaggtttgcctgactccggtggcgctagcgaagctcgtcgctgatgaggagttcatggacgcggtgaccgcgccgtgaactgcaggggtgtttagattcaggagtgtaaagttttggcgtgtcacatcggatattatataggatgtcgcatggggtgttcggacactaataaaaaactaattatataatctatcagtaaaccgcgagacgaatttattaagcctaattaatccatcattagtaaatatttactgtagtaccacattgtcaaatcatggagcaattaggcttaaaagattcgtctcgtaaattagttgcaatttgtgcaattagttattttttaagtctatatttaatactttatgtaggtgttcaaatgttcgatgtaacatggtgtaaagttttaggatgagatctacttactacccattgatgtcagtatcatgcacttcctatccgtttgtttcaatttgtgagcagaaaaattgagaaatttcatcatcatgggtggcagagaaaatggtataacctaccatgtgaggtggtaggtggccagactctgacaatggaggatcagatcaggagatcatgggaaatgatttcttttaaactattgttgcttaaactatcacaaatttcatcaccatgcttcgctattgtttgtttgcacagtcgaaccaattagtatcgctgcttgcgtgtcttttaaatagttatgaacatatttaaaaaaattaacagatatgatactcgctatgttctataatattagaatttagtactggatgagacatattctagtaccacgaatttggataatggacttgtccagattcgtagtactagggtatttctcattattactaggtccttatattttacgatggcgtgagtatatcacttcataaatatacgacttggaatttaaattctataagatgcaacaaaattcaagtgtgaatatatatagcactgcacaatgccacggataagctacatcgcacatattctactagtctagcactgtacggtctcgcgcactcaccgcgtgaccctaagtagtctcgcatcctcatcacgcaaagtcgtacggtaacacgtgattttgcactttcattctacgacaacaacatagttttacaaatccctttttaaatgtgtatatttatgtaaaaccaagaaaaaaaaaagagaaggtttgcagccggtctccaccaattttttttgagagaatctattctgtgtaccactgagttcgttcgagttctcaatgatttgccatcaacattgcctctttgtttaatatactggcgactttataaattgttctacaatataccattaggttgagtcatcttttcaaaaatatccttatgaacatataaggttaataattgatttatctcattaggagtgtaaaaaaacttttatggggcctccttatgcacacaacatggaaatttaaatttgtataggagtttcaacttttttacaattctattttttctaaaaaagatactttataacttatctgttatacagtatataaaaatactttattattattatttttaatataaatcatctttcatacactacagaagatatttttatgctatcatctcatgtataagcaaattctctctcatataccacataataatatttgtttagaaaaaactaaatataccagaaaaaaatttaaaacctatgtacaaacttccatgttgtgtaaggaggccacataaaaattttcatattttttgaaacttataacgagataaatcaattgtttatcttgtatatctctaagggtattttgagtatttttaaaaggaggtccagtctaatgacatatcgtagaacaattgctaaagtcgccagtacatcatagaaagagacaatatcgatggcaaatagttgaactcgaacaaactcggtggtatataatagattctctcaattttttttcccacgcgagggcattcccgttagttattaagcaaatattaaaggtctatcacatctctcatccgcaaattctaaaaacatctttagaatgcatgattcaacactggaacataatcgaaatgtaccaataaaatgttatgcgtgttgaattacggagtgttacagaaaccaaaccatagaaaagtttccaaactaatgtttgaatgatacattagaaaaaacaggcaggaactaaggcataacctcattctttttaataaaactttttatggattggcttattataaactaccagtaacatgccatgtacggattagacaaatataaatatagatacctttttataataagtgtaatagggacaaaacattggatctgatgcatatgcatacttacgcttgtgagcgtgttgcacgcggtgggaggaagagaaacggaagatttccatccaaattaattaatccctatagtggaaatggaaggatttaatttatccctatacaggaggggacacggaaggcagtagagaaattgcgaaataatatatagggatcaatcctttatgccaaaggatttcataggattttttttcttactttacaaatcccaccagatattcttcccttttttctttgtttcaaaggagacctgggattataaatttaatttgttgttttgcacgatgtatgttttacaagcaaaaaggtagatttaatattcaacttttagttttggggcatctacaaatttgctactgacactggtggagaaaccctttgtagtcccggttcgtaacccccctttagtcccggtttccaaaccgggagtaccaatccggcactaaagatcgctatctttagtcccgggtgaaataaccgggagtaaagatcgatctttagtcccggttggtgttaccaaccgggactaaagatatagctgacctttttttttttgcatgcccctgttgctgcatggtttatatatatatatatatatatatatatatatatatatatatatatatatataaaccatgcatatatatgtttcaatacatatatatgcatacatatatatatatgtatttatacatatatatgttatgcaaatgcatatgtatatagatatatatatgaacaaaatatatttacattatagaaaatgtgtgcacatgcatatagaaacatatgtagtcatatattaattacaatccattatatgtcctagctagctacgatttcgacgtagtagtactcgctgctagctcagaagctaaggaccggtgaattgtgtttccgtcgtagtagaattcacccttgggatcaaggatttcttcgttgatgaatcccatgagttgttcttgaaccgccgcgataaattccttgtgtgtggtcaggttatccctcatgcgaataaactatatgaatgtatgaaattgattagtaattaaacaaaaaatcgctacgtaatgaaattttgaatttatttgtacgtacatcgagctctcttgtggtgatgatttggtctgcaaggcagtggcaatactcgcacacgtaatagccgcacaagttagttccctgcttttgctttgcgcactacaaataaatgacaaacaacgagagatctaattaatatacacttgtatgtatttgaatcggagaaatataaatgtagagcatgtgtactcacaggaaatttgaacttccgcctaagtctttctctccatttgccgcggaccaaatgacggaaccgataccaagccctacatggagtttaaagctatgattcgtagtagtaattaacataacaagattttcttaattaacaaaggaacttatgacggtacctgtctataagttcgaaaaccttgtcaaacgtagactcttttttatccattgagtcatatacgttgacggtgcaggcctccaggtcgatgagtaaaagcacccagtggaatctgcaatgtgcgtgggatgcattacatatgaaacacttagcaagttcgtacgggaatgaaatttggtatgtaggaagacagtaaaattaaactaactctgtgttgtatggcaacagtatgaacgtcttgtaatgctgcgccttcaggagatggacgagattgtcctctgtttcttgtggatattggtcgagcattgcgacgtttactttccgagggtcgatgaatccagtatcgaaaaccctccgccgtcgggccctttgaatctccattctacaacgataaaagggagtatattattttctatggtctacttatatacaaggacctaattaattaaaggagacgtatagtaagaaatctaactgaacgatatacttacaaaatccagcaactcataatagagacgtcgagggcgtccagctggtatagttcgtagattcccctgaaattgatccagagaatgtcatctccttgcaagaagtccgtgtccctgatcctcgctccgatcatctctctaccggtggcgctcatctccatgtacagctgatggaacttgtacatttgtgtgggtagggactgcagcagctcaggcttgacaagcggtttaccgagttcgtacatgtatttcacttccgccttttcgattggtgcgactcctagcaattgatccgtagttagaccggtgtcagtaataaattgttctatcgtcatttctttaccggtcaccaacggctcgatctcctggtttggttgctctccaagctgagggactggtttggactttccagaagatgctttcttcagcgttcgctcatagtccgatagcttgatggcctccttgacagatgcagacatacccctgaagaagttcctgacactggggtctataggaatcttcttttctggacttcgaggcttgaattgtctcttgacttctgatgcaacgtaagcgtcaagctcctcttgcgtgcaatcgtaccccgggtccttgttcttggcggtgtcaactttcgccttctttgttgcccttatgtgggcaagcggtggagctgggggggcccttgactttgaaggtgccggaagaggagcttgcgggggagtaggtgtaggagcacgaggaggagtcggtgcaggatcctgaggagtcgatgctggagcctgaggtggagacggtgctggcggagcatgaggaggagacggtgcaggatcctgaggaggagatggcggagccggaggagatggtgcacgagacgccgcttgtcgcccagggaggatgatgtaccgcctgcgccatagaataatggcatggcatgtgtctcgtagatgcgtctcaccgtctcctccagggtaatccagctcgaggtcctcgtacgcgccttcgaccaactcaacttcgaccttggagtatcctgctggaatcggcctgcagtggtaagtacctgaagggtccgttgggatggccatgcccgacgccaccttcatgttgtgagagattatttattagtaatcaacatatataagcagcaactagcggaatggctaaatcttacctttattgataagtttttcaaaggaatatgcagctcacatggtgtccgctgagtgatgtcatcaatgggacaggtcgattcgtcctgtgtttgcatggcgtccatgctctgtgatcctacctgccccgttgaggcgcagctgctacggtttcctgacgggctcaccattgcaggaggaatggtcggctggggatcatgggaccgatgtgcggccatgtgttcatcaaccttccttgccacctcctcttgcatgttgagttcgtagctcgatacccggaactctaggtctgcaatcttcgcctcgttatctctcttgctcctcatccgactcctgtacgtgtggatgtcctccttgaaaccaatcttccaaggaatcacccctttccctcgagttcgtcctggatgctctggagtctgtagggcgagtgtcagctcgtccctatctctgtctggtcggaacgtgccctgagaggaggcttccactgcatctgttagtcgtcgcgcagcctcttgtatctgatagccgaagaccagtgagccatcagctgggttgagcgttccaccgtgagcatagtaccagaacttcgatcgttccggccaattggctgttgccggttcgatacccctctcaatcaagctagcctccatctgctcccacttcggcatcgcgacgctatagcctcctgaccccaagtggtgatggtacttcttcttggcggcattttctttatttctttccatcatcgccttcccttgttcacctgtcttatatgcaacgaactcgtcccagtgatcccttagctttgggaatgtgtcgaagttcagtgtctgcccctttagtatatacttctggtacagatctcccttgaagctctgaaactgttctgccattttcttcagagtccaccttttcactttgtcctctgtacccgcaggaagggtgaatgtctcgagcattgtggtccacagcatctctttctccgaatctgggacaaagctctcatgatctccgcgtgcccttgttcttcgccagtacaccgtactgacaggcacgttatcccgcacaacccaaccgctgtgacgtacatagttcttggcggcttcggccggggcactaggacgtccatcttcttccacttccgttatgatgtgccgaccctcaagcttcttcgctgcacctcgttgcccgcgtgccctcttctgtccaacggagggttgactaccactagcctcctcctcctggttcccctccacatccctttccacgtgcccctgctggttcccctccgcatccctctccatgttcccttcctcgttcaagtactggtttggatcctcgttcccctcttcttcattccagtactggctgcttccctccgcgattgtatcgtacaatatctgttcctcatcgcggtcagccatctgttgatacaagaaacatctgctaagtcacgagacatttatgttttaacaatctaagtcatgtatgctaagtgtaaatgtcgtacattagaaccctacacaaccttacgtgctaagtctaattacaaatcgtgatataagctaagtctaggtgacgtatattatacaaccctagctagtaaataattatatactaagtctaattacaaataaaataatcttatattaaaactcaaataatattacatgctaatactaaaatagtcatgtatatgctaagtgtttcgtgcgtatatgctaagtctaattaagactacaatagtcaattgctacttgtcgcaccaattccgtagtcaataattacataccaagtctaattacaaataaagtaatattatattaaaactcaaataatattacatgctaagactaaaatagtaatgtatgctaagtgtttcgtgcgtatatgctaagtctaattaagactacaatagtcaattcctaggagtcgcaccaattccgtagtcaataatgtcatactaagtctaatttgcaataaaataatcttatattaaaactcaaataatattagaacactacacaatcttatatgataagtctaattacaggtctaataatcttaattaattgcattacaaatataacaatcatttatattattacgtcacttgcctgctccaattccttctagggctagctcttccactcaggcttgacggacgactccgacaacatgtcttttctgcaagataaaaaaaatgtattaggataaatgcgaagtaacatatatatatatatatatatatatatatatatatatatatatatatatatatacatgtatatatatatatatatacatgtatatatatatatatatacatgtatatatatatatatatacatgtatatatatatacatgtatatatatatatatacatgtatatatatatannnnnnnnnnnnnnnnnnnnnnnnnnnnnnnnnnnnnnnnngctacgtcatccaggcccct

SEQ ID NO: 28888 - DNA, 1304 bp, Oryza sativa
aagttctttagtcgcggttgttctcaacacccgggagtaaatatcttttcccactatttcaaaattctttttaaacccggttagggttaagaaccgggactaaagattcccgctattaattataagtcatatgattttcgcttacatatgtgtttataaaatagaagttaatgcattaacattatttaaagtacaaagattgatgacaattacttcgaaaaattatttttgtctgtaataaattaagtggataaatcgtaataagcaaatatatgacttataattaataaaaattccaatatatatatattcttagcatatatatgaatgatattattatattggtaaaaactctaattaagatattaatgtacatactgcatgatttaaaattaataaaaattgtaatcatcatatgtacttagcgtaggaattatattaaattaaatgctaaaaactctaattaacatatgtaaatgccacatgcatgatttaaaccttttaaaaattcgaatagtcatatataagtagcatatgaaagatagtaaattaaattgtgaaaaactctaatatatgaatgatagttttaaaaatatattaaatttaatacttttaaaaattctccagtcaattataattagcatatgaatgatagtaaattaaatgttaaaaactctaattaacatatgaaattgccacttgcgtgatttaaaacttttaaaaatcctctagtcaattataattagcatatgaatgctagtaaattaaatgttaaaaactctaattaacatacatatgaaattgccacctgtgtgatttaaaacttttaaaaattgtaagtatcacatataactaacatatacatgatttaaacttgttgaaacctctagtaatcgtgcgtaattaacatatgccatacatcaattgatttatatggataatcaatacatccaaaatagtttacatcgtgtacacaataattacggcattacatcggcggtgacggttgaccgcacgtactttctcctcactattgttccctccttgtgatcgctgcgtgagtaaggggtgtcttcatttgataggaggatgctagggtcaatcgtcaccgtaaaagggggttgcccatccaactgatcgtaatcctcgtcagtcttgtcctcaactccgacgatttttcttttgcctgggagaaccacttgacgcttaggctcatcaggccctctgcccttctttcctttgctagacatgttcttaacaaaaagacttgcgttacattattggcaaagacaaaatgttcctct

SEQ ID NO: 28889 - DNA, 823 bp, Oryza sativa
cacggaacaagagaacccttaaaaggaccatagtcaagttcccatatgtcctcgatggcaccgtaatacgtggcagttgttccatcgtgtcccatggcatcgacacgaacagcgctgttttggttcgtgctcttcatgtcttgggctctcgtgtagaatgtgtacccattgatctcatatccctggaatgtcgcgatcgacccagacggtcccctcgccaggaaggcaagttgttggttgatcgactcgttacccatgagatgttgtcgtagccacgcggggaaagtatcaatgtgatgccgtgtaatccatgcatcggacttaccgatgttcctggcgcgaactagagccaagtgctcctcgatgtaaggagctaccaatgaagagtgttgcagaacagtgaaatgggctttacggaataaattgttgtctaccgtcattattgctttccttccgagagttccctttccccgtagtctcccttcatggcgtgattcaggtaccccgattgggcgaaggtcttcgataaattctacgcaaaattcgatgacctcctctgttccataacccttggcgatgcttgcctctggacgagcacggttacaaacatacttcttcagaacgcccatgtacctctcgaaaggaaacatgttgtgtaggtacataggcccgagaatacggatctctttcacaaggtgacaaagcagatgcgtcattatattgaaaaatgaaggtggaaatatcaactcaaaactgacgagacattgcaccacttcattctgaagggcttctaatctatccggatcgatgactctgcgaaatt

SEQ ID NO: 28890 - DNA, 844 bp, Oryza sativa
tcccaagaaacagaggacatcttcgtccatctcctgaaggcgcagcattacaagacgttcatactgttgccatacacacaagagttagtttattttactgtctttcctacataccaaatttcattcccgtacgaacttgctaagtgtttcatatgtaatgcatcccacgcacattgcagattccactgggtgcttttactcatcgacctggaggcctgcaccgtcaacgtatatgactcaatggataaaaaagagtctacgtttgacaaggttttcgaacttatagacaggtaccgtcataagttcctttgttaattaagaaaatcttgttatgttaattactactacgaatcatagctttaaactccatgtagggcttggtatcggttccgtcatttggtccgcggcaaatggagagaaagacttaggcggaagttcaaatttcctgtgagtacacatgctctacatttatatttctccgattcaaatacatacaagtgtatattaattagatctctcgttgtttgtcatttatttgtagtgcgcaaagcaaaagcagggaactaacttgtgcggctattacgtgtgcgagtattgccactgccttgcagaccaaatcatcaccacaagagagctcgatgtacgtacaaataaattcaaaatttcattacgtagcgattttttgtttaattactaatcaatttcatacattcatatagtttattcgcatgagggataacctgaccacacacaaggaatttatcgcggcggttcaagaacaactcatgggattcatcaacgaagaaatccttgatcccaagggtgaattctactacgacggaaa

SEQ ID NO: 28891 - DNA, 3866 bp, Oryza sativa
tccaccagggaaccgtgaggcccccctttgtgagttcggccgggggcagcgggtgagatttgaggatttggtgagcgaaactgtgtggtcttgagggggttagatcccccaaagatgatgagacaaaaggggtttatatagattcgggcagctgagatgcgtagtaccctactcctgtgtttgggattatggatgagtgttacaaagattccttccctccagagagctctttcgccctacttctcatagagttcaggttttcttagagtcgtccgtttttttctcggtgggcaaggttctccttttatagttcaaggggataccatataggcccaacaacctaacttcctcgggaagtattaccatttttgcattaaatgcatgtcttgttccttaacttggaagccgcatacatgtcgcctcggtcgtggggcctaccacaccatgccgcctgacacggggggcgcctatgtcattcaccatttaatgggtgaagacttttgggctcctattacatcgggaaacgggagcctagctttgaacagagcaggaggaccgactccggctgggataagaggatgagaacctctcaccatcattatttgatgggacatgtcaggctgcacgccacctgacacacgagcagcgaacaggcgcactagctagttccatcggtcattcgaccggttgagtacactgcacgccgcattaaatggcgcgaccgctcgggtcgccataaatgcgggtaggtggacacctgtacgtggtgacctagagagggggtcgggggagccctacccctagtcacgggagggggccgccgacgcccgaccttgggcccgatcctttctcaggggagggccacgtggcgcctgtgtcagacttttacctctagtctcggcgagggagtggccgccaccctatctcgggcctgactccccttgggggagggccatgtggcattgggggggcggcctcctccgactagtctttgggaaggagtggccgccaccccacctcgggcctgactccccttgggggagggccacgtggcatttgggggcagcctcctctgactagtttttgggaaggagtggccgccaccccacctcgggcctgactccccttgggggagggccacgtggcattggggggcggcctcctccgactagtctttgggaaggagtggccgccaccccacctcgggcctgactccccttgggggagggccacgtggcattggggtgtagcctcctctctctaaacatgatacccccgggcccatatcaccgacagtagcccctggcgttagctctggccaaaacctttgacaggtggtcagggttgacgccaatctgctagtcagttgacatgcgggcccgatcttctgtcctatcattctgggagttgggcggtgggagtttagtcacgttcatacgtcgcctttacttcccactttcctcccggtctccgaggcgctgcaggctcgggagtttagcccgtaccttaggtcgtgaacttattttctgtatatactcagcaaatgttgttagactctctcgggcccgtgaccttacgccgcgtacctcgcttgcccctgcctcttgttaacctctgttcatgttctacttcatttattcaaacgattatttttgcgtgagcgtggggactgaactttccattgtcaacaatctttacccgctatcaagccaggctgggcgccgtacccagccggcggggccaaagctagctgctacggaagagccagcacagggggccccgggcgtcgacggcgaccagagctcgacgtagggctaggatagagctaggaatcatagcccccatacttctagcaaagaatcgtttgaatggatgaggtgaatacaaactttttgttaccaagggaggcaagccagcgcgcgacacgtgggtaccgcgggaccgcgaggaagagatgggcgagagataaacataagcaataataattctatgcaaacgatcatctttgcgcgagtgcgaggactaaattttccatagccaacaatcttcacccacgatcaagccaagctgcgcgctgtagccagccgacggggccaaagccagccgctacggaagagccagcacagggggtcccagacgtcgacggcgcccagagctcgacgcagggctaggatagagctaggaatcgtagcccccacacttttagcaaagaatcgtttgtatgaatgaagcaaacacaaaccttgcttgcatgtcgtgacctttcaaacctttagcttgaagagggcctccctccatgggtccctaaccactttgggaagcctgcgaccacttagcaaacgaggttaggttcccacaagcctgtgtccccacgctacacattctgtttgatctttcttttcggtggcctccttccaatatctctcccttctacacagacgactactttcgcccgagtgtgagagccgaaaaactctagagccagcgatccccgtccacagtcgagccaggccgggcaccatagccaaccggcgggaccaaagctagccgctacggaagagccagcacagggggtcccgggcttcgacggcacccggcgctcaacttaaggctagaatagggctagaaaacttagcccctacacctagcgaggaaacgttcatgtagatgggagaggaggttgggcttttaccactgagggagcaaacaaatgcgcaacacgcgagcgtcacagggccatgagaaaagaacgggggaaaaataaatataagactccaagctgtattaagctgatgaattgaaaaattgaaaatacttgaaacttgaaaggactattagttgagccgggccaggcaccgtagccagccgacgagaccaaagctagccactgcggaagagccagcacagggggtcccgggcttcgacggcacccagagatcaactataagagtcctcccaggagtagaccgaggtaggcagcaggttcatgagttaaccccgcgcttggcccctgagggccatggggaagaagctcgccatgacctgatcatcaccccccgccgcctctatgatcgtcgtgcggatctggagggactcggaggggttgacgccgtcgtcatacttctcagtgaggctgggccggaacttttgggggccatcggacattccgaagacttgcctcaaaggcctggtagccaagcttaactggtagggatgtgggggccttgccccctgcctgaggtggcgcgacactcctgaggatgctgcgccttcccccttagcggcggcgcgacactcaccacgccggcgctcgaaagaacctcaaaaatcacgaacgcgccccctacctggcgcgccagatgtcggagaatgaactcctccaccagggaaccgtgaggcccccctttgtgagttcggccgggggcagcgggtgagatttgaggatttggtgagcgaaactgtgtggtcttgagggggttagatcccccaaagatgatgagacaaaaggggtttatatagattcgggcagctgagatgcgtagtaccctactcctgtgtttgggattatggatgagtgttacaaagattccttccctccagagagctctttcgccctacttctcctagagttcaggttttcttagagtcgtccgtttttttctcggtgggcaaggttctccttttatagttcaaggggataccatataggcccaacaacctaacttcctcgggaagtattaccatttttgcattaaatgcatgtcttgttccttaacttggaagccgcatacatgtcgcctcggtcgtggggcctaccacaccatgccgcctgacacggggggcgcctatgtcattcaccatttaat

SEQ ID NO: 28892 - DNA, 5927 bp, Oryza sativa
gtcagccttctccctctagtctcggctagggagtggccgccaccgtacctcgggcctgactctccttgggggagggccatgtggcattgggggggcggccttctccgactagtctttgggaaggagtggccgccaccccacctcgggcctgactccccttgggggagggccacgtggcattggggggcagcctcctctaactagtgtttaggaaggagtggccgccaccccacctcgggcctgactccccttgggggatggccacgtggcattggggggcggcctcctccgactagtctttgggaaggagtggccgccaccccacctcgggcctgactccccttgggggagggccacgtggcattggggggcggcctcctctgactagtttttgggaaggagtggccgccaccccacctcgggcctgactccccttggaggagggccatgtggcattggggggcagcctcctctctctaaacatgatacccccgggcccatatcaccgataaggatgaagttaatatctaggtttttatacttttgtacgaagttaatagtagtcactagtaacgacattaattgttataaagaagctgtcatatttagtcatgtcagtgagatatcagctaggagtaccaagattaatgtttcccaggaaagaactttaaaatcctgctgcaacgggtacgtaggacatccagtaccaatagtagtgaagcgattgtcaccttaatttagagtctatttgaggaatttaaaattttaaaaagcagctgattggtaaccattttctgagaatctgaagaagctggtatccaagtttctaacttctagtttattttttaatttttacaactataatttcgcagaatctgatcgaaatgttggactgtttagtggagcttttgattttaggagaagctatagcagccagaagcagctccacgaaacaagccgtacacacactcgacttcttaaagcgctttattaaaaatcactttatttaggaatgtaaatagttggaaactgtatctatcattactatttctttggaaaattctcgattagttgagaatttatatatttatcaatttacttatttagtggtgactgcaatccatggcagaaagaaactagaaaactcacactgaaaaaaactagaaaactcaaattttaattatatatacacttgtctaaaattagaaattgtagaaacggtaccacctctataaaaataatgttaggttcattgagaaattttcatcaacgatttcacccgtaactttattattactcccactagtatactccctcggtccctcgttactcctgggggcagtggaccaagtcccaagccatttgagccatagcgcggggtggaagtaaaaaaacccaccctgtagtaattttttagtggaccagattatcctgtagagtacaaaagctagccgagcttttatccccaaggtgtatggagaggcattttcatctctcagggacatccctatcacctaaatagtcactaaaaaaaatatttgataacatagatcaatatatcactcacaaacatttaagaccacattcgacttcttcaagttgaaaaaaaaaacaaagtaaactgaaaatagttaacttacattatggattaattgcaatttcagttcgaaatttcggacccttccagcaagtgattatctcagccaaaattttaagttttcctaaaaattttgcgaatttggtcaaaatttaatcaaattcagttaaattatgctaaaatttcaaaaaaaaaaaaatcggtccaacaagtgccgaaaatctaatgagcgaaattttggacaaaatcgaaattgaaaatcctgacatacattagcaattacttttttttatttttctacagaataaattacacccacggtacaataacttgacaggtggatatgatgtagtgcaagaatttgagaattgaatgtctgaatgcaacaacttggtaagtgggtgcgttctagctagtattagaacttgacaatttagtattttggtgcatcaaacttggctaagcatgtgctaggtaaggtttttttcatgatgtcaatatgccatcacatggcaattctatggatattaccttataatattgaatttattctttaagaattacattgcacatccaatttacatcaccggttcggattttcgtttgcttcaccttctcaaatctcaaccgaaatacaatattttctacattgtaaagtttaattggcttttagttattagttattagaatagaaaatttaatatgtttatacaaatccgcgctagtatattgtcaaaataagtacttaaaaatttaatgtgtataacaagaaatgctcgaaataattaagttgtcgcatcacttcttaacttattgtaccaaaatcgctcccttgtacccgtacactcacatggagttcttagactaaattgcacccacctgccaggttattgctagaatactcatttctcaagtttttacaccaaattacacccaccttaagttgatgcacaatgaatacaatttacgcttttgttagaacttgtaaaagttgaatttgagtttgctttctgtagtgatatactcctttcatccacaagagttatatatattacctttatcaccaagatcaggaaaactcatcttgtatgtaataaagtttaaggagtatatgcatgaatacaatcaatgtattaaaatggttcctcaggtttcaattaaacatttaattttttctctctatttaagtcttagatacatgaaaactacaaatatgactaacttatttgaaaaaaattatagaataaatctaacatttgtggaaggatggagtatttcatatcaatctactttttaaaaaaaattaatagctatttgtggaacaatggatatccacgggagaaataaaaacactttttgctagggtgcatcgatccatcccctactctatcggttcacacataaatgctagtagtaacaagtttaatttagaaagcatgcacacttaatgacgttagctgtctagctgatactacctccatcccaaaatatttgacgccggtgactttttttaaaatgtttgaccgttcgtcttatttaaaaaatttaagtaattgttaattctttttctatcatttgatttattgttaaatatatttttatgtatacatatagttttacacatatcacaaaagtttttgaataaaacgaacggtcaaacatatttaaaaaagtcaacggtgtcaaacatttagggaaggagggagtatatgtttatatttttgtcatctgaaacactgtaacctttatactccatccgtttcaaaatgtttgacaccgttgactttttaagtacgtgtttgaccattcgtcttattaaaaaaatttaagtaattatttattcttttcatatcatttgattcattgttaaatatactttaatgtacacatatagttttacatattttacaatttttttttaataagacgaacggtcaaacatgtgctaaaaagtcaacagtgtcaaacattttgaaacggagggaatatatattttttgaaatatcataagaaaacaattaagtatcattatagagactgttgatgctgtaaacaacgtacggaggagggagtacgtaccgcagatgaaggcaggcatgcatggctgcgcccctgaaccatacatgcagaaactgataaactggccaagcaatcaattatccccgcattatgtttgatatacgatcgaaagcccagcccaggcaccccctgacttatattaatcgatcgccgcatgcacccatgtcagcaagtttcacagtttgacactcctcatttcgtcgtcggtcgcagccatcggccggtcatggtcacacgaacagactgcctaacattatacagggaaattgatttcatccgataccctctcgtttcgtatatgccacctgaatattcactaaaagaatacaaaagaagttagcaacatatattaatatgaaatatatcactccacaaatatgcaggtttaaattcagcttctacaagttgtaacaaaaataacaaatatagttgtgaatgtgcaataattattttcactttaatttgttatttttgttgcaacttgtagaagttaaatttggtcttgcgtgtttgtataatgatatatttcttattaatctatattatcaatttttttaattttttataactatttagatgatatgcaaacaacgaggatgccctctcgagtgatgaaaatccacatcccattatacaagactgtggtatttcctctgagtgtatatatgatgctattagaaaaaagaatagaatactagtacactaagaatcttttgtttcagtttgaacgacgtagtacctctgtaactatataatttcgtgccagatcgaaactatgtgatattggaaacgttatttcagttgatccttttattagcgggagtcgttgaaaatctatcccatcactctttcatattttccccccttctttttaatttacttctaaaacctcatggttgcatgcccatgggtagagactctactagtgagataatccaattcaattacttagagaaaaaaacggggtcacacggtcacaggcagccaccccgcttgcatccttccctctacctacctacctcacctcaacaccttacctcgtcttcctcctccatcttctcccctcacgactcctccaacgccctcctccccacgccacttcaccccctccctatatatacccacatccatctcctccatctcaccaaaccaacacaccaacctagctaactcactcactcactccttcttcttgcgacctagctatcgagctagagcttccaaaaccctagctagctagctgagacagttagtttcatctcgaactagttgttgatatgggcagcttggacaccaaccccacggccttctccgccttccccgccggcgagggtgaaaccttccagccgctcaacgccgatgatgtccggtcctacctccacaaggcggtggacttcatctcggactactacaagtccgtggagtccatgccggtgctgcccaatgtcaagccggggtacctgcaggacgagctcagggcctcgccgccgacgtactcggcgccgttcgacgtcaccatgaaggagctccggagctccgtcgtccccgggatgacgcactgggcgagccccaacttcttcgcgtttttcccctccacgaatagtgcggccgccattgccggcgacctcatcgcgtcggcgatgaacacggtcgggttcacgtggcaggcgtcgccggcggccaccgagatggaggtgctcgcgctggactggctcgcgcagatgctcaacctgccgacgagcttcatgaaccgcaccggcgaggggcgtggcaccggcggtggggttattctggggacgaccagcgaggcgatgctcgtcacgctcgttgccgcgcgcgacgccgcgctgcggcggagcggcagcgacggcgtggcgggactccaccggctcgccgtgtacgccgccgaccagacgcactccacgttcttcaaggcgtgccgcctcgccgggtttgatccggcgaacatccggtcgatccccaccggggccgagaccgactacggcctcgacccggcgaggctgctggaggcgatgcaggccgacgccgacgccgggctggtgcccacctacgtgtgcgccacggtgggcaccacgtcgtccaacgccgtcgacccggtgggcgccgtggccgacgtcgcggcgaggttcgccgcgtgggtgcacgtcgacgcggcgtacgccggcagcgcgtgcatctgcccggagttcaggcaccacctcgacggcgtggagcgcgtggactccaagca

SEQ ID NO: 28893 - DNA, 42553 bp, Oryza sativa
atcagcatgagccccacaaatggctgatgacctgcctcgactgcacctgcctctacgtgcgcgacacccacggcctcaccggctccctcgagaccaacccggagtacctcaagaacacgccagcgactccggcgaggtcaccgacctcaaggacatgcaggtcggcgtcggccgccgcttccgggggctcaagctctggatggtcatgcgcacctacggcgtcgccaagctgcaggagcacatccggagcgacgtcgccatggccaaggtgttcgaggacctcgtccgcggcgacgacaggttcgaggtcgtcgtgccgaggaacttcgctctcgtctgcttcaggatcagggccggcgccggcgccgccgccgcgacggaggaggacgccgacgaggcgaaccgcgagctgatggagcggctgaacaagaccggcaaggcgtacgtggcgcacacggtggtcggcggcaggttcgtgctgcgcttcgcggtgggctcgtcgctgcaggaagagcatcacgtgcggagcgcgtgggagctcatcaagaagacgaccaccgagatgatgaactaagtaaagagaagattacaaataaatacacatatttagaacacatatacgtttttgatttttttttttggggttttagatgcgaatctgttgattcattttgtgagctatttatacctatggatatatggatcaaaataaattattatttggttgtaatttttttaaaagatgaactgatactataccttacacaagaaatacaatatgataaaaatttatttattactttcccagaatattatttttttttgtgttcattaatgtgtatatatcggcattgtgctagctagctaggtaaacatccggtgactgattttttactgaactatataccgatcagtcacacaatttttagccgtcagatcgtgatcctaggtgtctcattgctccttacaactctaccttgtcagtaatcgctattaattaccccctctatatctcacttcaatggagcatgccggtgaatgagactctcgtctcttcgttttttccctagtagccgagggcgcacacgggaaaaggcaccggtgttggttattcttgccaccgaaagatgacgagagttgctagattcaatcgtattcttgctagcatgatcctcgatcttcacctgcttcatggtgtttgtagatttgtatccaaattaatcatctggctgatgctattcattttactaataggaacccacatatatatatatgtacggcggagatgcgtgtgtttttcaaacccgatgacttttctagtgccaatggttcaacatatactaataacgactaggttataccctgctctttgctacgaaattaattatggatgaatacacattaaatattatagaaatgatgaaaattgaaattaatccggtgagaactgggtgaaccggatgtcttttttcgctaaaaaccggtgaaccagactagtctgaaccagaccgtttttacatttctgccaacacgtgggctggcattgtaaggtccatcatgcacaaaaggcccatatatggtttgttcataatataaggatagttaaccatttgggaagggattcgaaactagcctggtgggtaccgtgaggtgtcccaacttgctatttactccctccgttttatattataagtcgctttcactttgattctactaaagtttatgttaagtttgatcaagtttgtaggaaaatatagcaacattttcaacacaaaacagacatattatcaaaatatattcaatactacatttattaaaactgatttgatgttgtagagatgttactatttttttttaacttagtctaacctaaaaaagtttgactaggataagagtcaaagtgacttatgatatgaaacagagtacttaactagctcaccatatcttagggaaaatgtatagggtaaatacatgctatgattagaagacgttttcacatctatagtccttacaagtcgaaagcatgtgaccaaagcaacaaaaaagaatatgttaagactagctatacacatcttcgatcttattggtaaaaaaaatgcaagattgagtgaaataattaattctaaaattaacttataaaattcaaacaagcacgccctttatagcttacaatacaattactttttacgtgactctcaaattgctgaataattaagacatgcatgtgcaacttattaattaattcagagctgcggttcttgccgggcatttccgaagatcaattcaaagattagtagtactacgtacgtgaactcatgcctactacgttcataagttggattatcacggcgtgtgtgtaaattcgttggatccagtagctattttccaatctcatgtgtactctttcctcgttaattaactgatatatacagatcacatatttaaaaacaagacgtacactggccacaaaatcccaaattaatcaaaggtggtgggggggtccattatatatattccttgtacatatatgcatataatcaatgagtgaatgaatgaattagctagccacaaagaaaacgacatatatatgattcgcatctaatcaataattgaaaacatgtagtattatttttaatcaattgtgacgccacggacaggttccgagatcgaccggtctagaataggacacggactaattgtgccatgtgcaattatctcgctaattagccagccccagcagctgacttgctgcgttcgtttggagttgttccaactcccccatctcgtttttcatgtgcatgtttttcaaactgctcaacgatgcgtttttttaaaagtttatatacgaaaatcgctaaaaaaatcatattaatatattttttaaaaaagctaaaacttaattaatcagtaaacgctgcttagttttacgtgccaggagctagcaactaattaagacgcaattaatattcttcgcagggtgtggtaggtagattagttgacaaacgtaatcgactacgtgatcaaaactaatttagtttgggatatgaattcgaccgatatcagctagctctcctagctagtgagagatcaaaagcaaaatgaattgcacttcctgcacgaaaccaaacacgaatatacgtacgtactttttgtgcgatgctttagtttgctcttcttggaccacacatcttctcccttctcagctttcatactacgtactgtgtcagtgtaaacgttttcagaatttatatgatttgctgttcacaagagaactcgatgatgcgatttggcatttacaagtgtgcgagttatataattaatttgccatcgaacaagcatttcttttcgtttttgccattgttgtttttttacattaattattctaattagtttaactttgttgattaacctgtatgggaagacccctactgtactccataaaaaataacatgcactaaaacaagccgagatcgatttagcttttttttttattttcactgacactgaaatagcagtagattgattaatgagccaatttcagtaaaccccatgatctatgaccgaagttgcgtaaaaccccaggtattatgaccagtgaaacataagagaatcttttgtggttcctaagtttaacaaattttaaagaaaaagtttaacaaatttaaaaccccatccctatacatacttggcaaatatttacttaatttttttaaaaaacatagaatgtacatgaaacttttagttgttgatttgttgattaaggttgtcagtttaacttttcactactttgaaaaatattatctcagatatactgaaatcaaataaaatttgaaccgggtgggattttttgaaacatttagaccataaaacatgtgcttatatgccacaaatcataatatatgtgattttttgaaattttgaccataaaacgacatagggatttataaaatttgctcttaattaattgaattatttgaaaatggcattgaaatagtagtagatattgcaaacctcccaaggcgtggtttttcggcatcgtaaaaaaaatgaaagattgataacggaggttaactatactaatggtaaaaatggtaaaataacacttgtatgatagtacatattattgtacctagaagttgtatatttttatcgatgacaaatcgtagaatctagcgcttgtcagtggcaaattattgtgcatgcatatatagttcttgcataaataggtcgtatataagcttctatttgcaatatatatacatatgagaaaattcagagagttcctttttaaagtacttgtagcaccaaaaataactcggtacctcgagatacttattattacatggagataccaagtttaacattagaaaatatggaatctcatggtatacctttttcttaaagatgataaaattattgtatacataaatcgtcattctcaatctttttcgctattgtaaagatgatgaatatataatgaatgtgtttatggatagacaatggattcacctgcggataatactagatccacctttattatctagtgttatattctctccgtcctaaaatataacaacttttagccattaggatttatcttaaaatataacaacttctccatcaacattttctttccaaccaatcacaaccctctatcattcatttttaccacctacctccactactcatccaatcgtaaccctcgaacactcatttctacctactttcttaataaccgtgtccaactctaaaacttcttactccctccgtcctattttaagtgcagccatggttttccgcgcccaactttgatcgtccatcttatttgaaaaaagttaaaaaaaatttaaaaacataagtcacgagtaaagtactattcatgttttatcatctcataacaaaaaaaatactaattataaaaaaaattcaaataagacggacgatcaaagttggacgcggaaactcgtggttacacttaaaatgggacggaggaagtatattctgggacggaaggagtagattgtatggtcagtcaactagtcttctatgctcaactataatttgtgtacttttactatacaaagtcaactctagcataattaatactcctgcaagctagcacaattatatatgcagcattcatctgtgttaattgtactacatgaattgatgctatagctagctaccaactaacttttgcaaggagtacagtggttctgctagctaggagagtatacgtgtatggatcatggacagttatcagttccatcaggatggagaagtaaattactaattgaaatgtgctttgactttcgatccaccgcatgcccatctgttactttcttgtttcagtattaacacgttatatctaaagccacacaagtcattgacgatatgatcgatcgatctacatgaaccttaatttgttgaagtttatatgtatggtgcctggtttggaggttaacgtaattgtcatgcttgcaaaggcatgaagttgatttatcaagaaggatcgtatgtgatgggtgtaaatataatggtctttaatttatagggagcgaaattaaaacatatatatacacctagttatatagacgcagagatcctctatagtactgctaatgcagtagtagaggctgacctgtgggtcaggcaatccccataagtcctatataggagtatatcctttctttttaaacttgagttaatttatttaatttgtggatatatgaaaccaatagccaaaggccttgcatgcattctctaggaaaacaatattccagacctgactatgtacggagactcaaccgtggtaggagtaccatgtataaccacatttaattaaataaataaataaatttgttggaatgatattgatcgctgcaataaatgcagaaggtagattgtctatgagttcgtttcatgctgggcatatttacaataaacaatgtagcaacgccatattgcaacaagtttaaagagtggttatataattaattaatatgacatctatacctttaaaagaaatttaagtatttcggtatctgtaagacgtctcaatgtcatggtcggtgaatctgacaatggagtattcccttcattttttttaaaaaaagctaattaacctaactagggatgagatattaatttcccattctttaagttttttttaatggatgaagaattagtatggaggagctagcgatcaaaattaaagcgacgatgggacaatgcaatgagaagcggtgtgttgtatgagtgggatgacaagaagcagtgattgttgtgatggcgcatcttatagtggggcatacaatagctaacaataatgggtgtggattttcgtccctcgagagaacatccttgttgtttgcatgtcatctaaataattattaaaaaattttaaaaaaattaacaacatagattaatataaaatatatcactttacaaacatgcaagaccaaatttaacttttacaagttgcaacaaaaagaacaaattaaactgaaaatagttatcatatgttcgcagctatatttgttatttttgttacaacttgtagaagttgaatttaaacttgcatgtttttggattgatatatttcatattaatatatgttaccaatttttttaaaaaaaatttatgactatttagttgttatgcacgaaacgaggggatatctcctcaaagtatgatctatcactttcccaacaataattagctaggctctgttcgctgctggaggttcccaaccaggaagagtgcgtacggaaaatggagcggtccattagcgtgtgattaattaagtattagttattttttaaaaaaataaatcaatatgattttttaagcaacttttatagagaaacagtttttaaaaaatgaaccgtttaacagtttgggaaacgtacgtataaaaaacgaggcgaggggggttgggaaggagctcttacgaacgagctggacatgacatggtgcagcttgcacaacatggcacttcaaggatcgatactgtgagaggcagagacagaagtactagcgcagcagtactacgtgaggcatctctcggatttttaatttatggccgagtttatttccgaactttttctttaaatttttaactttttcatcacatcaaaacttttctacacataaacttctaacttttccatcacatcattttaatttcaaccaaacttttaattttgacgggaactaaacacaccctataaagttattgaatttttaagatatgtttagcctttcggcttattaaaaaaattattttaattaatttgattcatcgtcaaatattcttataactatgatttaaacttttatattcgcacaaaagttttaaataagatgaaaggatccaacgtttgtaaataaaccaaatacgtcgtatattaaaaataggttgtaattggtatggcaggaggactgcaccttacgttaaggcccatcgatctaccatttgcggcggacatacggtttagaaaacatgaattctcagaagactctgaagttttttatataacagaaaatttattgaatcctcggactctatcacatgacacacgaactgtattgcaaagatacagtatatatatatatctccgtcttaaaataaataagtgtaattctgtatacaaattttgttctaaaataagtatattcctgtcatactagtacttgttacactaaccatatccaattcaaatttctctctatcttaccctcaactatcctcctacttaatctctacacctctcgtttaataattaatatgggtcacttaggtgatcttttcttccttttatttttctctttcacttttaaaagtacacttatatatgttgaaacaaagaaagtgtacttcctctgtctcacaaagactttatttttcagcttttggatataacatttaactcctcttatttaaaacttttctgtgattcaatatttttattgttattagatgataaaacataaataatactttatgcatgactaatttttttaaaaagattcagataagacaaatggttaaacgttgaatacagaaatccaaaaacagagtcttcatgaacggagaggagcctagtcatatagtactccataaaacttgagataagtagtgacatatactgtttagcagcttagtcctattccctccgtcctataaaaaaataggactaaatgtgacacattctaatatacgacgaatctaaaaaaaatatatttttaaatttatattagaatgattttttatgtgaccgatgaagtaatgcgtagggccacgagatcacgacatacatgccggtatcagggaatctaattactacaacgaactatagtagtattacgtagtacgtccgtgctgtttcgaggacctacaatttataatgggctgtcggccgttacagctgagctacctacctatagctagctgagctcgattcatccatccatcctctctccacaatactactgctacgtacgagttcgttttaaaatacatcaactagatgcttggacggagattttattaatgcatgattaattaagttttaattattataaatttattttatttttaaaactaacttctttatataaagttttcacataaaactcaccgtttagtggtatagacaaatttactacaggacattataactttgtggttttagctgtaggataccgcgaagtgacttttgggggaagacactctcaaatgttgatatttgctagtggacaccgctcattaaaataataattttcggttgaatagaagagataaatcgcgtgaaatataaaaatacccttgggcccacatgttagcactcctatctttcttcttttctctctcttcaaacatgcagggcgaggcagcgtgtggaggcccgttgctggcgcgacggccgtgcaggtggcactacgaggtgtgttggcgaacgaaggcccagcgcagggtaaccgcgaagcggacggcgtcgcgcctagcgacctcggtggtggcggggacatcgaacacgatgaggaacgccatctccggcgtccgctccaccgcgtccatgaaagttggtgtactagttcaccctcgagaacgccatcgccgtgtagccgccgttcgtgaggcaccaccacagcgacgtggcggcagagacgttcgcggtccaggcgagcaccgctgcgagcacaacatcgtcagcggcggcgaggagcgcggtgggggtgatgaaagcgcacacgagaatcgggtagggcgtctgatggaggccacggggcggacggaggaagacgagcgcgtagacggagaaggggagcatgaagaggagcgcatcgtggccgagcgagaaggccatgccgccggtgacccgtcactctggcgggcactcaacctgctccacaaccaccttgcgcacttaatgtcgtgggacgcgctgacggaggcactcgcgcgtctccacgacgacgtccgccgccgcacctgcacgacatttgtgccatctgcacgtccgccgtgccactgcacctcgccgtgccacccgcacggccgccgtgagccccagccagacgcaccccgcacggcgtcaccgcgagccaccgtcgccgccactacgcctcgccatgccgcccgcacagccttcacgcccgtgccggtcgtccgcacgctgcctctcctctcagagtgacgctggaaggaggaagatagagagagaaaagaagagagataggagagctgacatgtgagcccaagagtatttttgacattaatttcacgcgatttctctttcttcaaccggaaattgtccaccagtaaataggcaacatttgagagcgtcttcctccaaaaattacttcgtgcggtgtcctagaactaaaccatgaagtcgcgatgtcctgtagcaaaatttggcttgaaaatatgtgctaacaaaaatcgaggaagaacctaccccttcatcacaaacgaaatggagcctgaggactgaataacacgtcgtagtaatacaaatctatccctttaattagttgtaagttgctagtatatttcaagatggagttaatagtatattgcatcgatatattataataagcttaattagtagtggcatgcatgtaagctatggctcgataaacttgcagacgttcctcgacgtcctcgtgatgcaattaataattgttttgtctgcttctcgatcgatcaatttaaatatttggtagccatgcatgcgttgcaaaaaattggatcaacttgcatttggatcatcatacatttatatgctgttctagtcacagctagccctaccaagatatatatagtcagaatgaatacactgatggtaccaagctagcaagcaaagcgcgcagctctctgtatcgtaccttagctgagccatcaatttatcaaactcattcgtacatgttaatacaggcaagtagcacctagatatactccctccgtcccataaaaaagaatctaggatcggatgtgatatattctagaacgatgaatcatggcatgtgtatgtccagattcgtaatactataatgtttcacatctgatactatattgatttttgtgggacggagggagtgcgtattatctagcacaaataatgcatgattgtgacgccatatatattaattatctagatgattaccttatacttgaacaatgaatgtgggaaatgctagaatgacttatattgtgaaacggaggacgtactgggttttgatatctgtcggttcgctgattttttttactagctaaaaaacttttgacaggattttttttaaaagaacttttcaactttgaaatataactataagataattgtagtaaaattaacgccgttgtgtcgcgtcgtaagtttaactccctcacgtacgccacacgtgtgctcgattttttttttaattctcctcacgtacacgaatctcaacacatctcaatatggatcggacgatcaaaaattcaaaagtttctaactcatgttctccattgatggtagaatagtgttatgtctttttccttatttgctagtcaattaaacttgctaaatgaacaacattattagactaaacttgcagaaattgaatttagattacataatatattttcccatattaattagtaaaatctatactaaattatttttaataaatttaagtaagttactagaatatttgtcttatctgaacagcatgattgacatgcaagttgtcgaacattgattggcaagtgaaactaaatatatggccctatatcatcgacaatttaaaattttccgcttctcaaccataagtccataacttaaattcacacttgtacaactgtaaatgtatagtgttttttttttcagggaacagtacatatatagctcaacacaccaacaaccagcttactcaaaagtttgatatacaattaaggccaaacaaatcacctgttcctttttacccgtactacacatgacttatgacatgtttcttgctggtatacaagtaacaaaaaagaaaaagaaccttacccaaaaaaaagaagaagatgaaagcccaacatttatatgatggaccatagtaattttgaatgcacagtatgaatataatcacacacacacactgcctacgtggagagagtatttattattccacgcacctctcgttgtcgccattaattacttctaccaactgcgaccagtaaacaattaatcaatccatgtatcgaacggacacgacacagcaaataacagtggctttacactgtcgccgtcgagctcgatctacttgtcttctccggcgtcggcgacgatctcggtggtcgtcttcttgatgagctcccacgcgcttcgcacgtgccgctcctcctgcagcgacgaccccaccgcgaagcgcagcacgaacctgccgccgaccaccgtgtgcgccacgtaagcctttccggtcttgttcagccgctccatcagctcgcggttcgccttctcggcctccgcctcgccggcggcgatggcggcgccggatttcctcggcctgatcctgaagcagacgagcgcgaagttcctcggcaccacgacctcgaaccggtcgtcgccgcggacgaggtcctcgaacgtcttggccatggcgacgtcgctccggatgtgctcctgcagcttgccggcgccgtaggtgcgcatgaccatccagagcttgagcccccggaagcggcggccgacgccgacctgcatgtccttgaggtcggtgacctcgccggagtcgctggcgtggttcttgaggtactccgggttggtctcgagggagccggtgaggcggtgggtgtcgcggacgtagaggcaggtgcagtcgaggcaggtcatcagccacttgtgggggctcatgctgatggagtcgacacgctccacgccgtcgaggtggtgccggaactccgggcagatgcacgcgctgccggcgtacgccgcgtcgacgtgcacccacgccgcgaacctcgccgcgacgtcggccacggcgcccaccgggtcgacggcgttggacgacgtggttcccaccgtggcgcacacgtaggtgggcaccagcccggcgtcggcgtcggcctgcatcgcctccagcagcctcgccgggtcgaggccgtagtcggtctcggccccggtggggatcgaccggatgttcgccggatcgaacccggcgaggcggcacgccttgaagaacgtggagtgcgtctggtcggcggcgtacaccgtcagccgcgtgatgcccgccacgccattggacccgctccgccgcagcgcggcgtcgcgcgcggcgacgagcgtgacgagcatcgcctcgctggtggtccccagaatgacgcccccgccggtgccgcgcccaccggcgacggtgcggttcatgaaactcgccggcaacccgagcagctgcgcgagccaatccagcgcgagcacctccagctcggtcgccgccggcgccgcctgccacgtgaatccgacggtgttcatcgccgacgcgatgagctcaccggcgatcgcggcggcgctattcgtcgccggaaagaacgcgaagaaattcgggctcgcccagtgggtcatcccggggacaaccgcctccctgagctccttcatagcaatatcgaacggcgccgacgacgacggcggcgccgactgcagcagccgcaggaggtagcccggctcgacgccagggagcaccgggagcgactccaccgacttgtagtagtcgtagacgaagtcgacggccttgtggaggtaggagcggacgtcgtcggcgtcgagcgggcggaagggctcgacgtcggcggcgaacgcggcgtaggcggcggccgggttggcgtccaagctccccatgtgtcagtggaggatgacggtgaagctagcttagctttagcttagttggttagttcgagatgtggttgagctgagctaagctagctgatggagtggagatggtggtgggaggtgggaggggatagatggggtttatatagctgtgaaggaggaagaggaagggcgagaagcggcgtggcgaggcgggcgtttaagcggtgagagctgtggttggtaagtgagagggagagggagagaggggaggatgtcatggcgtggggcatgcatgtgtgcagcactgacgcgacagatgtaacgtacaacaaccggtgtgtttggttcacggtaaaattggaagtttaggtgaaattagaaccatgtgatggaaaagttggaagtttatgtgtgcagaaaagtttcgatgtaatggaaaagttgaaaatttgaagaaaaattttggaactaaactcggccgaaccacagcggctcgtggagctagaaaatttttcgaatacgaatctaaaatcgaatgtgacatattccagtattatgaataagtacgaatgcatgcttagattcgtagtactaactagaattaactagaatgtacttgtttgatttttttatgggatggagcgagtacgacgtcgtgcgattggtgggctaatatatattttgagtgagtttgttttgtacgctcttttttttacgtttttcgcacgcacatttttaaactatattgaacagtttgattttttttagcaagttctatatgaaaaatgcttgaaataatcatactaattcgatagcttagcacgtggtaactctacatcagcaataatatgctgattctattaataagcatgtgcgactagagatggtttttggagtgaaattaagtaggggtgggttttgtaacaaaataacttatagatattggaatgccaacctccaagtgacttatgtggtggtttttatagttttctatatatattactattgtcctaaatagcttctattaagcaaaatctattccctgtgtatgtgtaatgtacgaacaatgtgtactacaattactcctcgcatcgcatggatgcatcccttgatcaaggtagcgtgcattgtgaaaaaaaaaacttatctaattacaacacaagtgcatgcatgtgcaccctacatctactgccattagattagtttttaagacatccggccagtaggctaaattaaggtgcacaactgcacatgcatatatggcaagtcaacatatgcatgttcatatacgtacgtgttctagacgtgttgtacttaacatatgcatgtgctattgtgtccgtttgatgaatggtatagtctttttttttttttggttttgagaaaggaatatattgaagttgttcatggattggggagcatgcataagcatgtgtgagattaattgcatggattcatgagtgaatgactgatctgtctgcctttgcaatgaaatcaatagataatctgtctaccttttttttagtttttttaatatgtttcagttaccatgttcaggaaacgaggcaatggaccctcaggatattaaaacgcctgtatttaggggacatcaattctccatcatggtcaacggcgaagattcgatcaaccgctacggtaaagcatttctcactgcataggaaacaagtggcatatgtacatatgtactgtgtactgcttggttggtgaatgaagttaatttagatatatggtcccttcgatcccaaacatatgttgctctataggagtagtagtaactcctaaatatcatgtaaattgtttttactgtgtatgcattttttgaactatacactccctcggtttcaggttataatactaaattagtttcaccaaatcaataattgaatatattttcataataaatttgtcataggttgaaaatgttactacttttttccacaaactttatcaaacttaaagtagtttgactttgaccaaagtcaaaatatcttataatctgaaacagagagagtattacttttctattttccctaaataaatggttcacattaatgtatcagattgtaataaggttatgtttggatagagggaaaacaaagcatgtgaataaaaaatgtaggaaaagaaaacagaatgtaccctatattaaaattacaatattacatgtctaaaatggattaactggaaatcaaaagaaagtacatatatatattgattgcagtggtgaaaaatatggatggagggaaacatatcctatatatgcacacatgtggacacttcgtgcgccaactaattacaaattaatgtcaccggaaattatagaagaaaatatatataccttcattactattacatattacactttatgatagcttaaaactatcataatttttttatggaagttcttccttggttgcagcatgtgaaacgtgtgctttatatataattaattgattttcattaaatttccattttgatcaatctatatacttgatctcggattagaaaaaacaactagtaggactgtaaacaactggctcgttggtcgatcgctactcaagcacagccactagaataagcaaagcatcttggatcaaatataatttttcccttgtgtttaatttgctcaaggaaaatgaactggtcacatcaaagtataagtggcactctacagataaattcatggattaatttcttcttccagaataggaggacttttcccacacttttgttattatgaaatcagcatgagaagaggccaggaaacggtcaggaattgtttttcctttgggttaatcactagggagttattgtatgaaaattgagaggcaaaaattcattcacgtgcgatcgttaactgtcaggaaatagtttatgacaataatgtcctatttaatttcattgtaatatatggtttactcctaagttaattaatatgttaatttgtattctatccgaagagctgaactttttgtgaaacttaaattaccagcgtttatgtatattagctagttcatgcatataggattcgtataaacagtataaacatataatgcacagtttctatgtcttgccctactatacgagaatgcgcgtgtagatgactatacgtacaccaacctttcaattgtcagtactacaaaaaacattttagcatgcatgtaaacaaaatagatttttgcaggtggccaatcagaccgcctacgacttaaaagtcttaaaaaataatacattgtcatgagccgatagccagccacctgcaaaaattaattttgtgatgttcgtgggcgggtaagtcctgccatccgcctgtgtaaatattttcagtgctataaaaatccatagttgatgtcactccttggccagcaatggctttccgctaccaatcacagcctaatcgatccccatccagtccatagaaattcagaaacatcaattcccatcacagcctcaatcaatccccatccaacacatagaaattcctatatcaatagagcatcacaatttagcccattcacaaatctccaattgaatccattcacaaaatttccaaatgaatcaatccacggaacgcatagtcagcaccagaacaactaggggcagagaatggaggcaataacaatactgaacggtgctcactgccacccttaatttgctacctccagccggccggcctcctcccatctagcccccaccaaagctgtagtcaccgtcgacacaccgtccctttgcccctcggtggagagtgagggagggagagagggggaggtagctaagagagagtgattgagacataggctgtgtgccgctgtagctctcctcagctgtactgacattaacactgctcccacgttaattttgcaagcgaacctctttatatttacaagccacaacctataaaaatgagggtttttttttgtgggcggtcatatttttccaggagagattgtctagatcgcttggaaaaacgaaatataggtgttgggaaaaaaatgttctctagtagtgtgtgcttgtttttgaggaggctctcacatacttttatatatactcctccatcttaaaatgtatgacatcatttatttttcgtataacgttgataattatcatcttattcaagaattacataaaaattacttacttgttgtgacctttttattatctttcttatcttaacttatgcttttactgctaaacttttaaataagatgaatggttaaacattatataaaaagttaagagtgtcatatattttaagacgaaggaagtatatactccggatatactagagagagctaccgatcgagagatcgatgagaagatcagatataggaggactaacgaaaccggaggcatcagaagttcaaaacatggcgcgttcccatgggtcgtccgtcctacgtatatatatttcagtcagttaatttttttacatgtttgatttgcagcggccagcagcagcagaagatgcacgaaacctggtgagaaatctctctgaaagtccaaagtcttcacctaccaacaacactgattcagctgcatgactcgacttgcagtgcaacgtaagatatcgagcgaatcaacagatcgacaggttgactgcctgactgactcagagaaaggagaagatcagttttaccatggttataatctataattaaccaattaatccactagttaattaacctagtcattatcgatcatatcacgcgtggtgcacacgtacacatacctcaatagcaagaaaaccaagctaaagctacccctccatttgaaaaatatttttcaagcaatttatgctagcttgatcttaaccaaattaagaagcacttccaaatgtaattagttataatacaattagaaatgaaacttatgcacatttatatatatagacacatgacaacaaatatttgaatggtatatatgtaaacgtaattcaacttaattaattatcgaatttctgcctgggtttgagtcccaaactcgatcgatacggtgtctgctcgtgctagatgatcgagtctacgccttcaatcttatttagacgtgtgttaggtgtgtgtgaaatgttaaaatataattcaacttaattaattcatgtacatacaactaaattgatggcatactagacggcttacaagttattaactaatttacagtttttaccattgaattgatcaagcaacgatcggttctacgtactgtactacatatatttacagatgaatgcatataaaggaaaccactgtaactttaggtgaatgtgaactatctagtccaatattgacctagttaatctcatttatttatttgctgatcccaagctagggcatatacttgtcacacaagaatataacccttattgaggtatcacacacacaagttcatgcatactactctgttaaaaagaaaaaaaagagacaaatcctagctacgaatctggacacacatatgtccaagttcataggtaggattacgttttttttttggatgaaaggggtatgcatctgggacaacgttgcccttttttttaaaaaaaaaagagaggaagttttcaaaaaaataggacaacgttggcacagttgcggcgtttgactcttttgacatgggacataagtatatagatgcataaggccaaatcgttctcatattatttatctcttggtgtactgttaccacaattcctaataagaatctgatcttgcgtgagtagctggtcaaaggcttagatttgatggagaagtgtacaattagtactaccacatcttagaggaatgaactgtactttctgtcatttttttcttgctatgaaaagtgaaatggtctacggtaataacttatgttcaattccattgaaaaattttttagcacgcatgcatgccggctagagctagagatttcctggtagttgcaacttgaaagcatatgccccgaattgcaggacactcgtgctcttggaaaccgtctgctagctagtgtatgcggcgtgtcaacaaatgcatatactcttgatcaaagagtgtattgactaattgacttatgcacatgtcccgatgtgttttgaagaccatgtcgatattctctagacattgttttttttatttaaaactgttgctactagctagagggggtatatatgtgtgtgagtttctccaagaaaacatgtttgatttttcttttctttgttcagaaaaaaaatcttgtatatatatggccattatcgattattagcagctagtgcagttatttgctgatatatagaaagatagtgacagatgaatgactaaaagctagtatgtctagtatatagcagcttgtttgtgttctagttggctaggtagtgataggatatgttccaaacatatggatgcgactacatacatcttttgacaagtaactgctatttagtccacattttacatgaccagaagtatgtcatttagtaatattaggttgagtttggcatgcagctaagtgcttagatactacttctcacagaactatattgtctgctcttgtatattgttccaccacgagtattgcatgcttcaattcagtgttcaatagcctgttcatttgtctgctatatatcacgtgcattgtcatattagcactaatatatttctttcccatggatcgaacttaatgtttacaaaagcaattttacttccttttctcttctaaaaatgattaacattaactcatgattctattttaaaatagtcaatttaccggcagactttatggtaacaatattttgttgattttttttttcagatagactactgccttctatttgatgttgtgatgtaatgtttccttaactaaactcatcaacaatatgatttcgctgaagatatatatggtcatgactatagtaaatcgatcacttaaataatcaacgttgatctctggacctgtttggtttagtatggtagtcaaaagtgatttacagagaaccagttcaaagaaaccgtgatcgagaccagcgtgtggacagaacgtattattagatcgatcttagatttgcaagagttattattaactaataacaagatggtgaaagtagtttacattaaggactgaataaatttagaccttataaaatgcatgtgtagaaacatcatcagccagctaacctaataaatactcgcctctctaaaatatagatacttcttgaacttaaaaatttgtttcaaaatatttcgaaactgttacatgcctgactaaccacacccctcatttaatattcgccaaatttaaacaataaaaatattttcaatgtttgaactcttgaaaagcaaaaaaaaatattgatacttgagaaattgtcattaattaattatatactccctagaaacggttggcttagttaattaattaattcgtgtcacgtcacggacagcgacaaaccgatcaaaatcaccacaatttcgagtcgagacagctttcaaaatatattatataactccacgtgaaccaattaataattgacagcgtcgaattttgtcttgcagtcgcaatcaaattagaaattgttttttttgttgactcatctctatggccttgttcaacagataagttaaccaaatatacgtgtttaattagctttcaggggttaatgaccgatttgactggctgcatctgtacgaccttacaaaactagaaaacgtccagatgcatccgtctactagtatttatacaagcccttggactcagttagctaattcaatgttaattaatactagatgtttgtatttctgctaaattatgccatcaccaaaattgactactccatctcattggcgacagagtagaacttaaatttcctgacggttggaatgcatgctgtcatgaattgtttaatcagttatgtaaatttagatatcgtcattttatacacagtagatgaattaaacattaaaaaattaagctgaacaaaagcgttgacatatggagtgcgtagttgttgattcaagcttgtcacggattatatattcctgactaatcgaagcgtgaatataatactgttgctaattgaagtttcaacggcgagagtatatggtaagattaatttttttatgcatgcctcctcttcgaccagggagaggggaggtgctcgtcgatcgatgagaccaaggtgtcgaggaagcagcagccactactacaaaaacacacatacaaattggcacaatagatgctggaagagctaaaaccgatacctatagtgttttccccacctccacaggctggaaatacaaacaatcgacacctttaagtaattataagtgaaccggcacctatccagcaagccgagccgatcgagaaagaaaagccgggggcgcgaccgatcaaggggataaacacgtccttatatctttttcatctgctcttcttggcgacttagcatcgaagacgctgttgacgagccatgctgcatcactgtcgtcacgcgcactcctcaacctcgcttgtcgctattgctctgctggccgctgccctgcttctccaaggttgtttcaaaaagaaggcggagaagagagaatgagttaggatagagggaagaagagaaagaagatgacatgtgggcctcattttatttttttatttttttaataagagggctgccacgtggatggtagccaaatcagtcgaggaagggagccaggatgagtaaaataacttctcgaacaggctggtgaagggatcgaaaggagaaattgtgagtaaaaggctcccaaatcgattgagatttccattaccaaatcgaagcttctattgctacttaagacagacacttaattaggtgtgattttttcttcttgtgttgcaacagattttcttatagatcataaaaaagccactttatattgtagtaagtcaataggctcataacaaataaatatcactgtttaaatattgtccactatttggatccactctggatggctaaggttataaataccaattaatcgagagatcaataaactggtaaacagtaggtacgtaaagttgattactacttactctcgaactaatatatggattcaagattttgattgaaaaaacaattacatgaaactgacttgataccattgccaactgattttaatataattaaaatgtttttttattatactacttcttttaacatacccagattcaacaaccgaatctaccttccttctcccgtcctctgatcaaaccctagccaaattcactatcgtgcagcgattggggaacccagcaaagctaatgaccgagatcttcgaccttaattaagttcacctccaagttgctcaatgtgcgaggagatcgaagagcactcaaggtgaagaaggcgatcgagaagggaaacgagttaaataatttctttggatttaaagaatataattcgtttgaattaaatattttaaaaaagttttcaggtggggtcgacagataaaaactcatatccttaattctctcaacacattcattcttttaagttttaacctcatatatcttcggtcctatatagatctctactcactgagctgcacggcgagcggcggcgtgaatgcccacttgtatctctactctagcaacgaattaagcagcaaaatataaaccttgcgatgaagacgacctctcacgcagatggcattctatttccttgacttctctgctctggcaatggattgatgtgatttttgttattccttttctgggattattggtcagtgtacttctgatacttgtataaggcagtgatgattacctgattggttttttaattgatattttatctttttatttgtcagttgtgcgcgattaggattttggatcgatctccgatctctgagggcgctgctcggtcagacttatggacaaaaaaaaatgaaaagttactaaattttaaatagtcattaagataagataagataacatgcggacttgtataaggcaggcaacattaaggcagagaattaccaatctgacttgtataatatcagccacaatcttacaaaagctgcatcaaccatactaacaatatatatatagaaccagttcatgtgtttcacaacgtttgttatgaccatccgatgcctgacatgcaaactttctgctacattaccgaatcagcataaacaggcttccttgaaatgagcgaccaagctacactaactccaagcttacagaagcccatgtctagctcaccattgcttaaaccggctttcaatgctgtgaaaaccatctctgcttccacaacactgtcatcaactttccatgccctgacatgaactttcagctcgcccttatcttcaacagaaacaacacaccgtgaaagcacaatcttgccatcatcaccagtaacaactactttctgatcacctctagaatcaagcaggagaattctctcatcatcaacactggcaatgttcttttcacgggccaaatccttccaacgaacaccagtggtaaaggcagcaaattgaccatgaaaaccatcaggccatgacccacaaatgactcgcacgaatattgtggcctccacagatgacacgatgtagccaagtctgaactccagtgtgcttagcttgcttgtgtaagaaccagaattaagcagcatacgtgaataacgcttaccatgacataagagtggcacagctaggtagctcaagtgtttgtcctcagattcagttgtacccttcactttcagttcaacatcgatgatcacaggttccggcattgacaacacaatagcacgggtaaaagaagtagtaaatttcgttcctacaaatcatgaaactggagtaaaagaaggcataaacatgagcagcataatccgtactacagaaatcacatgagcataaaggccatggtaattttcaggaagcaattaattatatcagatcaccatgcatataacatcttcatgatatatagctgtgttaagcagcacagaaggaggcaattaaacagatcaatggaatgttaagtaaaaaagaggccagaaattaacctgttcagtgagggtttggcagttgtcccttgtgcggtggaagagaacattgcgattacgatcaacactatcgcgcatggtaactataccaaacacatcaagcggccactgtaagcccccacttgtcgctgcaaccttgacagagaagatctgtagagcatccaaggcataggcagtgaaattatctagcgcaggcttatgagtaaaacgcattgggggggatccttgctgcatgttcgaagttgtataagaatatattgaagtgagttaaagatcaaatccaattgcagcagcagcagcagcagcagcagtaacaacactagtgaatataactaactagcaagtccatgcactactagaaaacaaacaattaatagtattctggacagacacttgaaattttatagtttgattttgatgttgatttttgtggtttttcatcatggtttattttttagagccaaaatttgaattttgtgggttttctttcgtggtttattctatagtactccatctgtttctaaatatttgataccgttgactttttagcacatgtttgaccgttcgtcttattaaaaacttttatgaaatatgtgaaactatatatatacatataagtatatataacaataaatcaaataataggaaaagaatcaataattacttaaaattttttaataagacgaacggtcaaacatatttaaaaaaagttaatggcgtcaaatatttagaagcagaggaagtatttgctagataagcgtatgcataagagaatcaacagacatggagagaacacaattcatggtctggatatatcttgtagcaccaagccaccaattgtatggtgacacaaaatattacttaatttgaatgagactagctagtttacttaggaaggagggaggagatgaatatgattaatggaatggaaaacaaatgaactcactcactggcgtcttggaatgaaccatgatgagcggaatgcacatcgttccagaatttgcgatactggatagcctcccagttggattcatcctcgtcctgcgaccgcatcgtctctaggtatgccttgtcctgctcctcgatgctcttcctcaccctcgcctcccactcctccgcggtttccatcctcttcctgggtctcgacgccttcgatgcggcgtactcctccgcggtcttgccgatggattcgggaatccctcgctcttctcgatgtcggccatggtccaaaccctctccaccaccggcggcggcttgggctcttgcttctcctcctcctctaggtcggcttcttcttcctcgtcgggttggggcttgctcgtcgtcgtaggcgattccgcctccgtgtccatctccatctcgtgagggcgaagcttcggaaaccctagctctgttccgccgcccgccgctgctctttttttttttgttttttttttttttgagaataaaagtcggtaattttcattcaggagtaggtcagatttacatgcacatggagggttagcagcccacacatgaggcccaaaccgactgggtcgtgtatgatgcgagtcggcccaaactgattaagcctagcccacgctgcgcagcccaaaggagaaaaattggcccaccgttggtaacgcaaccggctgtagaataagtttatctgaggtctctttaacttgtcaacgaatccggttttcatcattcaaccagaaaaatacatcaggtcccttcactctcaaaaccgatacaaaataagtcctagttctcacgatggccacagtggtcgcggcggcggaggaggatcgccgcgacgccggagctccggggtcagctcaacagaggggagtctaaaatgggggagctgtatactagcgaggggctaatgcaaaatggtggtttggaactcaggtgatacatacattatatccaaaactataggtaacactaccctggtcaagtttaaaacaccggcaacttccattaacaaacgagcgtccactactaattcatccacagcggcaggcataagatgttctgttgctagtaacagagttcaatcatcggtgacaatccacacacaacaatctcaatattccaagttgaacacaggctttaggcctaccgatggggctttttagtaacacaacatcaataattagaataatggtatggtctgatattaaaagttttaacaattaagctaaagctaagacactaattccgtgactttaaataacacatccatatatatgcagtataattgtaatatcggccacaaatcttacaaaagctgcatcaaccatgctaacaattaatcaccagttcacgtttcacaaccattccgatgcctgaccatgcatattttccagtactacagaaccgatttagcaagaactggattctccgaaatgagcgaccaagctacactaacttcaagcagacagaagccaatgtctagctcaccattgctcaagccagcttctaatggtgtgaaaaccttcacttgttccacgacattgttatgatcaacgagctcccatgccctgacaagaaccttcagctttccaaccttctcaacagaaacaacacgccgtgaaagctcaatcgtgccatcaccactgacagttactacgttctgatcacctctagaatcaagcaggactattttctcaagttcaattccagctaggatgtcttcagaggccaaatgcctgaatctgacaccagtggtatatgcagcaaactgaccatgaaaaccatcaggccatgacccacgaatgacacgcacagatattgtggcctccacagatgacacgatgtagccaagtctgaactccagtgtgcttagcttgcttgtgtaagaaccagatttaagcacgtgtgagtaatacttaccagcacataagagtggcacagctagtaagctcaagcgcttgtcctcagattcagtggtgcccttcactttcatttcaacatcgatgatcagaggatccggcattgacaacacaacagcacgggtgggccctaccagcactaaatttcgttcctgcattgtatggaattaatgccacaaatgaataatcatggaactggagtaaaagaagacactaatatgagcagcataataaacagaaatcacacgtagcataaaggacatggtaattttcaggaagcaattatatctgatcaccatgcgtaacaggctattttccagagtgtcaataaatgaggccattgacagaattgaaaacgacaaggagaaactgtaggtacaaagactgcatgttatatgcatgcttgcacggttatgaaattaaattaggaagggcggacagctgcatgttggaggtaattaaacagatcaatggaatgttaagtaaagaaaaaggtcagaaacctgttcagtgagggtttggcagttgtcccttgtgcggtggaagacaacattgcgattacgatcaacactgtcacggatggaaactataccgaacacatcaagcggccactgtaaacctccactcgtcgctgctaccttgacagagaagatctgtagagtatccaaggcactggcagagtagtaacccagcgcaggcttatgagtgaaatgcattgggggatccttgctgcacgcaccgagttgtataagaattgaaatgagttaaaagattgaattaatccaattgcagcagtagcagcagcaatagcaataacaaaagtagtgaacataactaacaacaacaagtccatgtactagtagaaaacaaacaattaacagtattccggatccggacagacaaccccaccgcttccttatgtctataaaccatttgaatttttagaatttaattctgatattgattacgtggttcttcatcgtagtttattttatactccatccgtcccaaaatataagcatttttagcttccaatctagacaactgtttgtctagattcatagccaaaaattactatattttgtgacggagttagtagccaaaaattaaagttcaatatttaatttggattttgaaattgtttttttttcatcgtagtaattgcttgataagcataaacataaacagcgaaacgttgcacatcacatgaagagaaaacaattcatgataagcatatactctcttcgtctaagaaaaaacttaacgtagaagtaggaggacgaatttgaactcctacgagagtcacatcctcttctaggttgaattttttctcaatggaaaaacgaaaaaacctcactgacttcctcgaatgaaccacggctgccggaccatgtatcgttccaggaattgcgatacgcgatatagtcccagttggattcatcgtcgtcctgcgaccgcatcatctcttcgtatgctttgtcctgctcctcgatgttcttcctcaccctcgcctcccactcctccggggtctctatcctcctgggtctcgacgcgaaggccgccttcgatgcggcgtactcctccgcggtcttgccgatgaatctcaggaatccctcgctcttctcgaagtcggcgctggtccaaaccctctgcaccgacgccggcttgggctcttgtttctcctcctcctctagctcggcttcttcttcttcgtcctcgtcgtcgtcggcctggagccgccgcttcccgagcacccttcctcgactccgccgccgcgccgtcgcccccgacgacgaaaccttaccagtcgccgccatcttgccatcgctcttccggtcaacctccgccatctccatctcgccggccaccgcaacgctcacaacctcacctggggtctgggtggtgctcgccgccggcgagcttcgaaaaccctatatgatgcgaccgcgtgcttaaaagtcggcccagccacggtgcgaagcccaaaggtgaacgttgggcccaaagctgctcaccggatgttgggcccaccgagcaattaaacctctggaacagaaaaaagttattcctaagggtaaatttgataacgccatttataaatttgtcatgtgaaaaaaaatcccatcactgttcattaaatctgctgaaactcaaattgtgccattgccatcaggatttctgtcaacacctccgtattgaggagagaaaaatgaaaatattgcactttcatccacattatctccttcctctctcctcccttattatctgaagaagcatcccaacaactaatccaaatttgatcctccatatgcctatatagatggtaaaaaaaaaaccctccttcatattccttcccacttcaactgatcatccatattatattctccatatcacacctttctatattttagtaatatttaccaactaccgtgcacttatattatatttgaacgactatatttcatattttatctccttttctctgttattctctatcttctatgctcttttctctaatacaagtctgcagagcagtcgaggtggcccgtaggagcagaggtgcgcagacagcgacgacggatgctgaggtgggcaggcggcgcaagcggccgacgggcgtggaagtggccaagatggccggcgggagcggagccgcataggcaaaggcggtggatgctaaggcgggtgggcggggaagcggcggcggtgagcgacgggcgtgggtgtcgcgcaggagacaacgccggatgctgaggtgggtaggcggcgcatgtgggtggtgggatcggaagtggcagcgatgacgacagccggtaggcgcggcagcgacatcggcggccggtgggcgacgatgacgatggaggggaggttgatccagaacttcggatggggacgagagcgcggacgttgagatatggcgttgatgagagagaatcactatatttggccgaactctcttcgatttggcgtatcgtctatttttggaggcctcgatgccatatctactggagcaccgttttctcctccagtgcgctatgttttggatggagtaccggatgaggggtccgctggggatgctcttaggcggcacacatgagggggtggcttcaatccaactttgaactagaaagaagagcaccgacacactgggtgatgactcttagaatcctgtgtcgatcgtgcatgctcgaattcattgccggtaacctagcctcttgtcatgatagcctcgatgagatgatccgctctctactcatcaggaatgccgaagaagatgacaatattcttcggtgagatatggatggaatgggtttaggaagaagataacaaaaatcttggcgacaatggtatggttatacaactttacaaaattctagtagcatgcagtaggttttacgaatagttatgatatttttttaatatgataaatttgtaatggcatggccaaatttgcataattttaaagtaaccaaagttatattccctcaaaaaattttatctctgatgaggacttaggagtaagcatgcattaaaataatgtattcatattgacgggaccgaccgaggatcgctgtaattttgaatctatgtggcgaccactggtgatctggcaacaattactagtcggcatatcttagaagtttactactactccttaaagtcttaaaattttgatgaaataattatgcaactgtcgaatatttatgactgaagtatttatattggatataacgtgagaatacttttgtttaatttgtttaacatcccttattccaaaatattagaaatcttctgctctaaattatataaaatcatacaacttaaatcctgtggtagtatcagcagctggtttagctggcgccacatcctagtaaaaaaattatggtggggcctaatgtcaacaccatgcacacgaggtcaacgggagggggcgttggctcgtcgtctttgtcagaaacggacggcagctcgtcgacgatgatgccgccaccacccgagttcgacgcggggaacggcatgaatgccagtgccgaggtagatggagtaggaggttctggagctggcgccgatgccctctccactggcgctgacaaccatgacgccgtcaacctcggctcggcgagacgttaggcatgcatgcgggtcgacaccagtcgcggtcatagcctcaccgtccatcatcttcttcatcttcacccgcggaccaactcgaagaggccaactaagaacatcgattcctgcatcaccaatccacacaagctttgcagcttcctggagaggggagggagatctcctctcttctcttgttctgtttcttggactggtccactgtttttgggtggcagtgccattgatctggtgaatatgcagaggctggtctcttgatctgatgatggcgagcacgacatcgacgacgaccgcggtgagcggcgcgtgcacgagggtcaatacctgcggacagaggcggtcaagtgtggtgcggtgcgatggcagcgggggcgttcgccgccgctttcaccgtgaagactcgggtggggttggtggtggctgtgtgtagccgtgcacaaggcgtggttccgggtgcgaaaaagagaagaggaacatgtgagtcccaccatatattatttattgttttttatgttagctgattaggatgccacgtcagctaaaccagctatcgatactttcatgggtgggtcctatgttgcacggttggttttgtatagttcagggatgtcaattaaacaaaactcgactacagttgagggacagaaagtggacttcttcccgacttgtagatgaccactcatggtccaccgacttaagttggttgggccttggcactgttttttgggcctaaccggaccgggcacagactcattgcttatctatctacccctaatcatccgacttgcaccggcggcagaagaggcggagcggaggggatctagggtttccgagggtcgccggcggcgaggaccaccaccgcctaggtgagtcgagttttgcggtggccgtgccctcgcgagaccgacatggaggccgagcggaggagcgaccgcgaaggggactacggtggctggatggcggcgggctcgtcgtcgggggcgatggtgcggcgggagacgaggaggtcggaggtggggttggagaagtcatcgtcgttgccgccgcctttgcccaaggaggcagtcaagattgacaagaagaagacgaagaagaggagtgactacagtatcgaggatattctgaagattcttgatatgagcgaggaggagttggctgtagtgaaggaggagtgggctgaaatggaggcgaaggaaaaggaagaggcaccaaaggtgaaggaaaccatggtggagtgggaggcgagggtcaagaagaggattgaggaggagaacaaagcatatcgagagatgatgcggtcgcaggacgacgatgaatcctcctgggacgctatccagtatcgcaaatcctggaacgctagatggtccggcacccgtggttccttcgaggacaccagtgagtttgttttgttttccattcatcgatcctctgttcctcctgcctttgtagtattaacctagcttcagattgaccaagcatttttatagccattgctgttgtctgttacttcctcaatttcatattatataaattgttgctttgatttttttcctagtcaaatatttttaagtttgaccatatttagagaaaaacatagtggtaatatctccaacacaaaacatacatatcatcaaaatatattaaatgttagttttgacaaaactaatttaatgttcttgattatgtaattttttttataaatttggtcaaatttaaagaactttgactaaaagaaaagtcaaagccttataatatagtatgaaatggaggagtacttcctagtatcatgcaagaattgtttgttttctccatcgacaatagttctaattgctactccatattttgttttctccattcacaacatggttgttaaggctaaaaggcgtcctaaggcgaccccggactgccatagcggtaaggcgtaaggcgaggcgacgccttaggcactccataccaattagatgacaaataaaataatctaatatgatagcaaatcaaagatgcattttaagagcagtacaacacacacacacatatatatatatagatggttgtaataattacttaaccagatatcaatttattaactaaaagagcaccatcttataaatacagagtgagggtgcatgggggaagagcaaacagggtaaatatgtgctaagtactaactacaatacagagtgagggtgcatgggggaagagcaaacagggtaaatatgtgctaagtactaactacaatacagagtgagggtgcatgggggaagagcaaacagggtaaatatgtgctaagtactaactactaatagggagtcagggatgtaggggaggggcaggcaataaaacagagcagtagagggaggagtatagtatatgagatgtagaggagagggaggaaaaccacaacatagcagcaaatgaggaagcagagtagataggatgtagaagaggggggaggaaacaccaaaacaagcagcagaggaaggataagaacagggtagaggaaggagcaaagcaggatcacgtagagcagagaaagaaacagaggaaagtagagggtggaggaaagaggagaaagaagagcgtgcctgcttagtttttgtgtcaatggtgaggaccaggatcatcgcgcaggtgcagaggaccaggatgatggtgcagccacaggatagccgcaggcaacaactgggatcgccgccagggatggagatgtcgcgagggatggatcaccacagcctcagactccagcgaccctctttctgttgttttctccttgatttggtgggatatggcgcgtggggaccttttcaccccaataattggcgcttctgttagttctgtttcgcgcccagggcccatggcgccaatttttttgggcccttcaaccatgccctcaacttcctgtggcgtcgcctttagccattgtagcgcctaaggatgcaatatcgacaccgtagcgacaccttgggcataaagcggacgccataagcaatatggtaaggcgggccagacgccctgactcctggcagcgccttaccgctatagcgacgctatggcgacgccttgacaaccatgattgacaatactgacaattgctactttgttagttgttatgattttataaactgcagttatctgcctgaggtgtgcaatagcgcacttgctagttgtttattgtcactgttgttgttactgcttttattgctactgctgctgcaaaaattgggttaggtcttttaactcatttccaccattttacaactttgtgcagcgagaataccccccatgcgtttcacccacaagcctgcactggattacagtgccgctgccacgcctactctgcaggtcttcttcgtcaaggttgcagtggcaaagggggccttacagtggccacttgatgtgtttggtattgttgccatgcgcgatgttcttgaccgtaatcgcaacattgtcttccaccgcacaagggacaactgccagaccctcactgaagaggtatgtgtccttttctttatgaaacattcagtggcttgcttgtctcctgctgtgctgccatatgctcttcctaattttcataaccgtgcaggcatgagtactgttaattaccatgtagtctttacacccgtagtttagtttctccacaaccattgaattgtgtaacaactttatggaaaagagctcgtcaggcttggtgatcagatatcattgcttcctgaaaattactatggttcacatgcttttagatttacatgccttttgcatgcagtggaaatgtggaatcatgtacatagacagctcaacatatgtgtaaacaagcaatgagaaggcatatgataatgtctgtgtttcatcagagaaatagccatttcctagtacaacacaagtcaggctaaaaaaactaataattaattcaaactctcacacttgtgtttgagtcaactattactgaatcagtacattgaatgaagtttcttaaattaactgttaccttcataatatcatttggataaaatatctagtattaagtgatcctagggaagatggctggttctcttttcaactgtctcacactgtccctacaaattctgggtactttatcatgtacttaccacaatgcattgatatacctctttagtccacaatgcatatattctgaactgttgttctataatgactgtttgatagtttttggtgctttattgttctgaattcagccctaagaatgtttcagcttcgattgcaaggtgttgttctgagtaaagccactttattgactctcgaatattgattgtttgcacataacaaacatcttgttcgttttgccactagtacattgtgctaatatgtttctctcagattttgtgttatgcatgccacatttatgctatgtggtttttgttcgttatactgtgttgtatggattatgctcctcatatatacctcttctttcactccagttttctgattgttcatttgtggttttgcgttaatgcaggaccggaatttggtactggtaggccctacccgtgctgttgcgctgtggatgccggaacctgtgatcatcgatgtggaactaaaagtgaagggcactactgaatctgaggataaaggcttgagcaatctagctgtgccgctcttatgcgatgatacgagttattcgtacactagcaagctaagcacactggagtttagacttggctatattacgtcctctgttgaggccacaatattcatacgagtcattcaggggtcatggcctgatggtttgagtgctcaatttgctgcctttaccactggtttctatggcaagggtatggcctgtcgagacagcaatatgagtattgatgatgagagaattgtcctgcttgattctagaggtgagaaagtagttgttactagtgatggcaatatcaagctttcacggcgtgttgtttctgttgagagtaacacagagctgaaagtttctgtcaaggcatggaaagctgacaacaatgtcgtcgaaaatgagaatgttttcacagcattagaagctggtgtaagctatgctacacttgacattgccttttgtaagctggaaatcagtgttgcctggtcactcatttcgcagtatcctgtttctgccaactcggtactgtagccactggttccgaaaggttcattatagatattagtaatatacccgtgctaacgctatgataatatttagtaatacaacatatcttttaccaatcaaatattaaataagatatatttatgatttaaaaggtagagaggtctccaccaacgtcgcaccaagctgacacgcacaaagctaacaagattacacccaaacggcacaacgtcacaggttggattcaattcaaccaaacatacctatgaaattggacttggatttctaccatgttcgccggctgcctatgccacctgcgtggttcggatgagagagcggatggataggcagatagcgcgggctggaccgtcgattggacaccttcggtcatcgatctgtacagaaaactaattactacatctgttccaaaatataagcatttttagctacaaatctgaacaactatgtatccagatttatagctaaaagttgttatattttgggacggatgtagtatatgaaaatgagatagactcaattttttgacaagtgcatattttatacatatgaaaaaagcatttcgttaatacggatggagtcatccatatatacagagaactaactatatcttgtttcaaccaagtagaagctttttttttaacaaggatgtactactttttaataatagaaatgctatctaacaggatcccatcccaaccgtgatggatgggatagggcagcaaccaaccaatccatcgattctatctccttctaccgtatccattctaccacatctctctcaaagcatgcttactgctgcatgagctccggcgcggcatggggtgtagatggcggaggacgcggtcactagcgacaagctctggcgtggccgccggcgtcgagctcccggcgtggcatggctgtggatggaggacgcagcccctccggcgacgagctccggcgtggtgcggcgcgtggacagcggaggacatggccgccggcgacgagcctggtgaggggcgtggcggcagaggacgcgaccgccagcaacaagcctggtgtggggcgtggcagcaaaggacaaggccatcggcaacaagctccgacgtggggcgtggacgacggaggatgcagccgtcggcgacgacctccgacatgaggcgtggacaacgaaggacgcggctgccggcgatgacccccgacatagggcgtggagggtggggccactggcaatgacgcatcggtgctcagctcctgatacctagtaggaatcacctgatatctggtaggtatcatctgatacctcatgagtatcacctaatacgtggtaggaatcgtatgatacttgataggtatcatttgataccggttaggtttcaggacatgatacctcagagaggtatcaaaacatgatacctaatcggtattatcacgttcgaaaacaagattccgttgtatagcagccctcttaaataatccattgaaatgctaagtacttcatccgtcccataatataatagcctagtaacctcatgtactaggttgtatattatggacggagggtgcagtaaagataaagaaattgcactttggtccatatttctttacccttctttcaatttggactagggtaaagcaatcttttcattttggaccacctaaatttacatgttgtttcacctcccaagttgttgggaggtcaagctcaagcttgagttggagtatgacaaaaatggaactcgatgtaggctgagcatggctcaaagctgaagattgtgcctgcgggaagttgatcaggctgaacgcgacatcgaggctaacagcaatgtagtgtggcaccaacagagcttgaggttgaaacgacaaaggttaaggtcaagcgtgggcactggctaggctcgaggtcgaggttctgtgcggtgcctgtgcctgcgaggtccgaggttagacattacttggctttggtgatattgagaagggatggggtggagagaagagagagggagctagaggtggaagaagagacccaaaaggaaaaaacgtataatttatgtagtacaaagcgagaaaaggttgttctaactcctgcccctagtttaagttgaaactatggtaaaaaagatggaccaatatgcaatattttttcttaaaaaacaaaattcttgtagtgctagtgtactacccaacagccacgtaggcactaaatgacacgaaggccaagcaaaaaaagtcatataggagaggtactttgcacagatttgatagttgtggagaggtactcaatttgcattgattttgatagttgcagagaggtattcaatttgcactgatttactcggtttgtggttgggggacacgaataaaacttgacccatagttgagggacgctaatgaactttactaaaggtaaggtccaatttctgttttgcgcttcgcacggtggatgggcctattttatttgggctgattttagtttagagaatttttacccaaaccagtcgccacgttttcctccaccaccgccaccgcccgcatctgcagcctagccgccgccacccgcgtctgccgccgccgtcgctgcatctgcctccaccgctgccgtcgcccacgtctgtagccgagccgtcgctgccgcccgcgtctgctcccttcctctgccttcctttgtctgtgtcaagaggacggagaagatacttatgtagatgacatgtggggttcactcgcaaggggagaagctttttcaaaagccacttgagtgtaaccaaacaagcttttggcttcttcacagctacttttccaaagctacttttaaaaaagtcacagcccacagctggttttttaaaagccatagcccaaccaaacacaccctaagttcacttggtggcactcaaaagtgattgaaatctaatccgtgaccctaaactataaaaccggaaatattgaacccccaactcttaaaaccggtacaatttgactctctcagcggttttggatggcggtcttgctgatgtggtgtctacatggcatcccagtcataaaaaagttaaaaaaataaagtgggcccacctatcatcttcctctctctactaacctatctcacttctcatccggtcatgacgagcagcgccgggatgatgatgatgggcggtgatggggctctcctcacaccccggctctttccaccccgtcgctggtggcggagtggtcggatatgcggcttcctcgccggaagtcgttgatgggccgcggcagcaaaagggggttgaggcgggtggatagcttgccaaggtcgcccatggtgctggcgtcgagggcgtcgctggccaagaccaagtcggtagtcgacacgcaggagctcggtgctatggacaggatgtcggctactcatcgccgctgcaaggacgtcaggatgagggggcggcgcaggcggcgtgccccgcgcgcggaggcggtcctcgaggggcctcgagcacggcgcagaggcgagcggccacggccgaggcgacggtccatgtggtgggcccgtggcatggccgcctcgcgcatcctgatccggggtggcggtggtgctcggcaatggcccagccatctgctgccgcacctgcgtcgcctaggagcacgtttgcacccagccatctaggctcctgtcctcccgactgccaccgccactgccgccgctccggctcttgcgcacccgtcgccgctgccgttccatcgcccatcctctcccgcgcgaacaactcctccgccttggtcctcgtgatggagttgagtatccgcaacaccatggcgtcgtcgtcgctaccctcctcgtcggcgctgaacggcgcgagtggacggaacgacagccggaggtggcctcgaccccgctggtgcagttgaaggagatgtggtccagcgactcgcgagtcgtcggagaccacgcaggtaactgcgagggcgaggatgacgagcagcaacgcgggccgccgccgccgttcccctcatcctcccactaccgccagcctccatggccgagctgccgaccgccgccccctattccgctgtgccttgatgccaccagctgccgccgctgccaacaaagagagagaatataggagggtgtcaatgataagcgggccccactttattattttaatttatttgacgactgggatactacgtaagcatcacgtatccggttttgtgatttagcgttacggattagatttcgatttcgattacttttaaagatcacgaagtgcacttattcctaccactttttaataatacacatggtttttctgctaggatccatgtcgccgagttttttccagtccgatctggtagttttacacatagtttatctgttttattttaataatacacatggtttttctgctacgatccaggtcaccgagttttttccggtccgatctggtagtttttgtccgggtcactagtgaacggtttttttttcgatgtgggcttttggttgtgctgccagttggttgttttttctggtccaaattggttttatacgtgtctaacacagatggcagatgaaaattaaggtttaatttttataatagataaagatgaatattaggtaactctatttgggattcaatcctttcgtgtgcaccaagaaaaaaataatcggaaacagcgatggaaaaaacgggcccacaaaaaaccgcaacacataaaatcgtgacccacccagaaaaaaatcggacaaagaaaaccgggcccaaataaaaactggagaaaaaaccaagacggaaaaccggaaaaaaaaccgcattgcggaagtaaaaaacgacggacaaaaaatttttacggaatccttacatattttttaattaggtatagatatatatatatacaccatgttcagtactagtactctttttttaagaacttgtttaatactccgtattgtaagacttttatctcagtactccctccgtctctaaatatttgacgccgttgactttttagcacatgtttaaccattcgtcttattaaaaacttttgtgaaatatgtaaaactatatgtatacataaaaatatatttaacaataaatcaaatgataggaaaagaattaatgattacttaaattttttaaataagatgaacggctaaacatatttaaaaaaatcaacggcctcagtcagacaaagagggagcatatgggaatggagggggtactgtgagatagtaaccagccaaaaagttagtattccatgtgttactttttggctggtgtatagtgctgcaaaaggtactaaacctgaaattacaaacattaaatttatcacgatgcaagtatgcaatctggcaggttcttctactctcgatagaaacagatatgctctaactttgtgcagtctatagttgtaccactgacacgtgggtctcaatttggtatggtctatatgtcagtggcacaaactgcacaaagtcagtgactctcatcccctttggatcttcatattgctcgcacttcggggttacatcacgtccttgtcactgtccctgttatctacatatttcatctgtcctattttaagtgcaactgcaagttttcacgatattctgttttatttgaaatttctttgtggttagtatttttattgttattagatgataaaatatgaatagtactttaggcgtgacttatactttttaattattttataatattttaaataaggcgaacggtcaaacattagacatagaaactcacgactacacttaaaatgagacggagagattatatagtctcgaagagggggaatcagtgtcatgagcttgacttgggcctggcgaagggcagcccgacccgagagatggggagagagggccgtcggctcattactttttattaattatttttgtctgactaagatgttgatcccattgagatttttttaataaaaaactcttctagtgccatccaagcgccacgtagccattaaatgggatgaaaaccaagttaacatataatgtaggatgctttgtacctaatcctatcttactataaacttatcctcgactaacttcttaagcttaacatgcaaagatgcc

SEQ ID NO: 28894 - DNA, 6826 bp, Oryza sativa
ataggccgaattcgagctcggtacccctctataactgcacttgtattcaactgtggttttgttgtttagcaataagatcttatgcgtgacatgtgcgaaaatttctttatagtaattttttctcttcatgcacaaatctcaaggcaatccgatggctacaaatctaaaagtttcgaggacaaaaacttgtgaaagttttctagcaattccgttttgacaattttatgaaacctcaacattttggtaattttaattatgaaaattaaatactattttttaaaaaaatataaactacctccattttttaatatttgatgttattgactttttaagaaaggtttgataattcatcttattcaattctttttataaatataacattttacgataaattaagtcccaataaaataaatgataattacataattttttttgaataaaacgaatgattaaacgtatatagaaaagtttatggtgtcatacattagaaaacgaagggagtatataataacttcgagcaagcactgcacgtgacaaaaacaataaacaaaccctaaaaaaatactgtagtactacttagttaatatgccggcggtgaaagttagggtgtgtttagtttacgccaaaactagaagtttggttgaaattaaaacgatgtgatggaaaagttggaagtttatgtgtgtagaaaaattttgatatgatggaaaagttggaagtttgaagaaaaagtttggaactaacaaggccttagttgagagaactactccgattgtaatatgatgatatggatgcatcattgaaacattgatgttgatgaaaattactggtaatgtttggcaaccgtcaatgagatgaaacgacagactttcgtggagctgaaaaattcgatgaggtgatctgagtgaatgtctggcaacgcgttccccgggtcaatggcctcttccctccctcagatgcctattttttcttgtctctgttcaatattctgctcatgctagtgagagaaagataaagagattatactagtaataatacagagagagacattgactcgtagcagactcatgccctcactatcctttgtttgcacctctgaatctgaatgtttttctgttccatgatttttgcaccatcttcaagtattagtagtacttattttcgtatgtttgcaattgcatgtgccgttcttcgtagactgggccgaaatttgttttacttgtaatgccaagttaattaaccctcctcgtggaacaattcctacttgatatattaaaacagctcagtcataagcaaggacattaccattgaccacagaaaatcttccctcagaaacattttaatcccatgagtaccttgttatctgaagttaggagacgacttagcttctctcaacatttttaattagcagagttcatctgttcctccgagattcttgccatggcacatctattgtaattgaaggacaaaccatttcaaggtaggaatttactgctcaaaacaaaatccaaggtatggaattcgaacaggaccatgcagagtgctgaacattttaattgccttgttatctgaagttagcagacgacttatctgaacatttttaattagcagagttcatctgtccctccgacattcctgccattgcacctgctgtaataacttcaggagaagccatttcaaggtacaatttattgctcagaaaaaaattcagagcaaggaatttgagtaggcccttgtttaggcctggtttagttcctaactttttctttaaactttcaatttttttatcacatcaaaactttcctacacacgtaaacttccaattttttttaaaactttcaattttgacgtggaactaaacacagccttagttcccaactttttcttcaaacttctaactttttcatcacatcgaaactttcctacacacgtaaactttcaatttttttctttaaactttgaattttagtcaaacttctaattttaacatgaaactaaacacaccctaggagtcctaaaacttgtgagctatcacgagcagactccatttctacattccatttgaggagaagccatatcaatgtctgtctcactacattccagtagagaaggcagccaaagcagccacgcccgtgtttaaaactgatgaagatgaatatagatgaatattaaattgacttacgtaaaaaaaactattagcacattattaattaagttgtaattcttacaaatttaacaaacgaatatatttgatattttaaagtaacttttatatataaagttttcacacgaaacacactgtttagtaatttaaaaaacatgctaacagaaaaatcgagataaaatatgtatctcaacgagaaaagagctgagggcctgaggcatcttcttggctccgggaagaagaacacggctcgtgactcgtgattgaccggatcagtgtcaccatgcttgtcgctagcaaccttagcatagagacgatcagtgatgatatatgtatgcgaaaatgcaaagacaaaagagagaaaaagaatagtccctatcacattggatgtttggatactaattataaatattaaacatagactattaataaaaccatccataatcttaaactaattcgcgagacgaatctattgagcctaattaatacatgattagcctatgtgatgctacagtaaacattctctaattatgaattaattaggcttaaaaaatttgtctcgtaaattagctttcatttatgtaattagttttgtaagtagtctatatttaatactctaaattagtatctaaatataggaactaaagttaattgccctcgatccaaacaccacctgagcagcagctgacaagagctcgctcgaaatgtatgcgaaattgtccctgtcgatccgacgtgcctcgcaagctctgccattgacttctccagcgctcttgtagcacaccaccactgtaccctgccccttcttctgcagcgttttgttccatcttgattattggattctactgccaggccctacatatttcctccttagaatcttttaagatttttaagatttttcttctttgtagaaaattccagtgtttgattggttggtccacggttgataagctctataataatgatgaagtaaccaaaacaaaattggtagtaaaaatatgtattcttatattatcattagcggtttaaaactcaatgaaaaacaaactaagacaaacaaaaacctaaattttaaaataagttattaaatataaatgttagctacggttgataagcaacaagctgatagggagagtgatgttcctcggagctcagtggtgttcacctggttagattatctaatcctaacttgatttataccatgttagttggtagtcagtcaacaattagattatgtattgaacttatggtaaattttgttctggttcgaacttatgggttttctttctttcatcctacgaaactctgtaccttactactccgtgaatattttagcagtagccgtgaatgttcttaccattataattaaatatattattattgtaattagtacgtgacatttaatttaagaggtggttaattaatggataatgagcttgatggatgtccaaagattagtaaagcacactagcactctgcttaaccatttcaaccaatatccactaaaagtgacagtactttgcctaaggcactaacttaaaatatttgagaatattttacttttaattgagatatcctttttaagtcaacagagtcaactgccttgaaaaagtcattagtaaaaggcaaaagcgcgtgtccaagtcaatccatacatatccatcatctttaattttgtgcttagtgttagaccatagttttaggccatcgttatagctcatatcaaccctacctaggtagctagtaatccattctcccattaattaatttctatgtgcaaaatttatacccagaagtagttattgttcctagagtttactaaagataatgacctcattcatctaatgatgattataaaccttattaccaatgaaaaaaataataatttgtaagtaaatcatatatgcttgtgtccttaacaatccaaaattctgaaaatcaattgtaagaaataaagtttgatgaaaaaataaaattaactttaaaatacagttttaaaatgtaaattttgatgatggtttataagttgtagccttataggacgaatgatgggagtataaatcatcaggacaatcaaccatagcatccaactaactaaaacaacgggaggttctactactaaactagccactaataatgcaatcatgacaaaccagcaaaggaataaacttattactaccagattcatcaaaccaaaccttggacgagtttaccttcatcccatgataagcggtaaccatgagatttgttgtggtttcaaaactaaaaaattaccacacgtaatatataactgtaataaccacacaataatcacacggtttcgcaaatgagtaagtagtcccttcatctcagtatataaataatttgaattagatgagatatatcctagtattataaatggacaaagttagtactataatttatcacatacaactaaagtcatttatattttggcacgaagagtacctgtattagggttttttcgggaagcttaaaattctgagaagttagctagtgagaaagaagctgaaaaactcagcttatgacttctagtttatttttcagattctacagttatatattctcatcctctaaataaaaagactataggagcttccgtcaagtagcgagcttccgtcaagtagcgattaaacaggccctatgaagattagcgagggaaggagtgtggtgggccccaccaagcaggagaggggggtgtggggcccaccatgcagggccactcactccaccaccacaataagagaagacgaattgacaattccaccgccgcccgcactttgctttgcttccggtctccggtctcctcctccaaactccggtcggtctccggcgcggcgcagccgagcccccaccatacgacgcggggaggcagacgacggggcgccgctgctgctgcccggggagccaccgccggtcgccgccgcagcagcagcagcagcgtgttcagaggagaagggggcagcaggtaccttggggctctgccgcatgccgctgtgggggacaggctcgtccgcggcgtccgcggcggcggagggcagcgcggccggaggggatggggcggcccgctcgtcgtccggcggcgccgcggtgatccggtcgatgctccccacccgccgccgcctccgcctcgacccgccatccaagctcttcttcccttgtacgttcttcttcttcttcttcttgctctggtttcatggcggttgctctgtccaaggatttggttagtttcaatcctttgttacagttttggttggattaattggagagtctcctttgctgcgcgactgcaattgtgttcttgatttgcttggctcggacttagtcagaggcgctgtgtctttgtttctcttcgcatactgatttgtggttaagaatagtctctgctttgtggcgacataaaattctcacttgttcttctgtttccgctaagaaaattggcttcttgtttttttttctctttcaaaaacctgcgaaactcgaaaaaaaattgaaacgaattgcctatgattagtatgttgctcgtaaacggaatagattgaatcagcacggttgatggatacagactctttgcttgtgtctgattttgccggaattgatactgattgctacagatgagcctgggaagcaagtccggagtgctgtcaagatcaagaacatcagcaagtctcatgtagcatttaaggtaaattaacacaactcctctctgatggcttcttcatcaaactagatgctataccagtggttttgcaaatgatagtagttaccagtaactcagtaagtagtagcctagcagtccagctgctgttatttttaaaggtgcagctcagattaatgatgaaatcaatactctcaacaactcatatttgaaggtgagctatattttaggatttaatcaatactctcaacaactcatattgaaggtgagctatattttaggatcatctgttaatttaaagatgctcatatttttaacagatggctatgtattgatctccaccataaaaatctattggttcagtccccacttacacagtagctactaataaatcactaatttgatgcattccttttgttctagttccaaacaacagcaccgaagagttgcttcatgaggcctccaggtggtatacttgctccaggagagagcatcatagctacaggtaatgcagagtggacgttcacctttgatgtgcattcctgttttttttttccttcgccttcctcactccttgcttatgtaatggtagtgttcaagtttgtggagcatcctgagaataatgagaagccattagatcagaagtgcaaggttaagttcaagattgtcagtctgaaggtcaaaggacctatggagtatgtcccagaactggtatgttttcttttaatctttagcttgttcaaaagttttaattttgatgcttaatgcgttctcagttttgaaagacaaggacttatagaattacatcccacaccctcactagtaattcattcatattacctgaagttttagtgaccttgatattaatatcaattttttttcacctgtaacacaaaataatacagttcgtttgttatgaacctccacatattttgtccattttagcagtgcatggtctaaagtgttacccttatgttacagtttga

SEQ ID NO: 28895 - DNA, 3538 bp, Oryza sativa
acgttcttcttcttcttcttcttgctctggtttcatggcggttgctctgtccaaggatttggttagtttcaatcctttgttacagtttgggtggattaattggagagtctcctttgctgcgcgactgcaattgtgttcttgatttgcttggctcggacttagtcagaggcgctgtgtctttgtttctcttcgcatactgatttgtggttaagaatagtctctgctttgtggcgacataaaattctcacttgttcttctgtttccgctaagaaaattggcttcttgtttttttttctctttcaaaaacctgcgaaactcgaaaaaaaattgaaacgaattgcctatgattagtatgttgctcgtaaacggaatagattgaatcagcacggttgatggatacagactctttgcttgtgtctgattttgccggaattgatactgattgctacagatgagcctgggaagcaagtccggagtgctgtcaagatcaagaacatcagcaagtctcatgtagcatttaaggtaaattaacacaactcctctctgatggcttcttcatcaaactagatgctataccagtggttttgcaaatgatagtagttaccagtaactcagtaagtagtagcctagcagtccagctgctgttaattttaaaggtgcagctcagattaatgatgaaatcaatactctcaacaactcatattgaaggtgagctatattttaggatttaatcaatactctcaacaactcatattgaaggtgagctatattttaggatcatctgttaatttaaagatgctcatatttttaacagatggctatgtattgatctccaccataaaaatctattggttcagtccccacttacacagtagctactaataaatcactaatttgatgcattccttttgttctagttccaaacaacagcaccgaagagttgcttcatgaggcctccaggtggtatacttgctccaggagagagcatcatagctacaggtaatgcagagtggacgttcacctttgatgtgcattcctgttttttttttccttcgccttcctcactccttgcttatgtaatggtagtgttcaagtttgtggagcatcctgagaataatgagaagccattagatcagaagtgcaaggttaagttcaagattgtcagtctgaaggtcaaaggacctatggagtatgtcccagaactggtatgttttcttttaatctttagcttgttcaaaagttttaattttgatgcttaatgcgttctcagttttgaaagacaaggacttatagaattacatcccacaccctcactagtaattcattcatattacctgaagttttagtgaccttgatattaatatcaattttttttcacctgtaacacaaaataatacagttcgtttgttatgaacctccacatattttgtccattttagcagtgcatggtctaaagtgttacccttatgttacagtttgatgagcagaaaaaccaggtagcagttgagcaaattctgcgtgttgtattcttggacgctgagcgtcaaaccccagtaagtttcagcaattgcttttactcttaatgcaacacagttgtgaataatagaaagtttaccacaaatttgcactttctgcagcaaatggacaagctcaagcgccagcttgctgaagcagaggcagcacttgaagcacgcaagaaacctccagaggacaccggcccccgcattgttggtgaaggccttgtaattgatgaatgggtaagatcagggcacagaattcttaatgacagttgtctggtcttttactattgtgttagtggctgtctcatgtgaccatataacatttccttatttccccttatttcagaaggagcgaagagagagataccttgctcgtcagcagattgaaggggttgattcagcgtagacacggcaccatgaactgtaaaccattggttgcttgaacatatcgttttatcgtcgccacacatccttctgtccatggttttttcagtttttacaaaggttctgcttggaacaagagtgaggctttgtgtaattaggatttgagcttcatgctgcacttcattcctgggtctacatgtagatagccagtcactgcttgataataatattttctatgctagatcatgtacttggggttgtggacttagacgtgtggatgcgatacatttcttaggtgatgttcccatcaatattgaatgtaatgttgtctgaacgtgctcttcaaagtgataaaatgaaagctctcctatcatgttactctatttcttagatctacatgcttctgttgcacatattgtagctaagtttccttctaaataatatattaactagccagcctagtgccaattatccagggaatcatctatgaaaagttattcaagggtagtaccatcttggaatttattttttgtaatattgtgtgtgagttatgtactgacaggtcttttgaggagatgaaacattctgggctcagcatctggttctcatgttcttttgttcttttatttgcctgtgtgacctgtactgatataattgttcttgttcctttgttcatatgatctgtactaataaaactgttgagctggaagaattaggtacaaatacacctatacctaaccaactaaaccattaggggaataataatggaatatagttaatagtttagtcctttggggtttggacaacctgttgctttctttgaattcatacttgatgatttgttaagaatttatttccatttcatagccagatagatgcaatcagacatgcttgacttttaaagctgaaaaggtgcaacttgcagcttcttatcttctatttaggattctttcattgtcattgagacaaagatgtattctctagaatatatattttttatgtaatgtcacccggtcaccccttccttttcttcttctcactttttctttctttctttatttcttcttttttttttcgtgaagagtggtaatcctttggcctaactcaaaaactaaatatttggccctagtagatgcaggtgatgattctatttggattgctcaatgtattattttacattatggaatgtctgaaaattcagctagaggtcgtatacctttctattcttttggtcgagttgctttcagattggattattacctcatgaaaaataagcagcacgaattaacaatgtagcagatggacattatcagcattgttttttttttctttaacatgggatgtgaattgtaagtaaagtgtatcctccctgattttcttcaacatgttgcaccaaactatataaggcctgcatcttcttccctaactttggatgcatctcttgaatttgccataaaaactgtacctcttgcccttagtttgagggaactgtctgccccactattggttctttatgtctcagcatgcccagaaacccatcaataaggtaatgaatagtgagaacgacctaaacggttgcacctaaattagcattttccaggaaaatgttttgaactcagagattgttcatgtta

SEQ ID NO: 28896 - DNA, 5021 bp, Oryza sativa
accccctaaattagcattttccaggaagatgttttgaactcagagattgttcatgttaaattcaagaactatgaactgcaaagacaaactattggtctacatcttaattaggcaacaatttttccaactaaccatacataacaggggtacagaccacaagcacatgctactgaaacatgttcaatcatagaactacagttctccaaaaacagaatgagcatcaactacagccagcataactgtttggcatgttgccacttaatgatgaatattggcagttcatataccatcatttcaacataaaccaaacgagacatttcagataatccactgggctgctgccatggaaagataacagaactcatttaaacaagatttgacagtaacaaaaagaggtcaggtccaaagtggttttcttttgcttatcttttaaggtaaagaaactactaaagaatctgcaggtttgctcatgccgcaaaagtacaacactcttcaaaagaaaggtacaaagggaatttttcctccgtggtgcactatgtaagaaaaaaaaaagggtaacttttattctttcctaaccaaaaagaatatatatttgcagaaacaaactcgagtgggaggcaggcactactgatgcacttagcttctgatgaatatgtcacaacaaaatattttccttcttgactatatgcaacttgagtccctaccgaagataaagcgacggctccagtcagagatcaccagtgccctcgtgcgccagcttatttgtttactgaattcagagaaaaaagagcattagacaccagcatagatgaaccaaaatgggggcacaggagtgatagcaacataacctttgtcactctgaaatggaagagaacacttacgttgcgtagacagaataccagagccactgtgtgctgtggccaatggagatccaatcaccagggagctgtgcagcagtctgctcacctcctagtggggcaaattggcctaaatgcctgtacctggatgaatcagcaaagctatcgtatcagatgcctgtgaaaaggaacttctagaattatgcagacatggacagattaacgcggagcgcaatctactgctacatacttctgtctttgggtttgggaagcttactgttcaatgacacttttagttgggtaattataacaggcattgtgtttcattcaactggtttctggataatgtcaaatggtaatacttctagcagcataataagcagagaataggaacctgaaagggcggaaacgatggcgtccttctccccttatacggatggggccttcagggttttcttcagcatccttcatcttattgaagcacctagccaaatattgtccctgctgtgaagcaacctgacaaaaaaaacagactagttaacacttggcagtgatgcacttccatgaattttcgctttgaaactgtcaaaccagtgaaaattccaaggaggaatagaaagcgacctgagcagttgcaggcagatttttgacttgcgaatcaacaagagaaagagctttcttaaattcttcaatgttcagttctacagattccttttcagcatcacctttggcagtccttactaaatcagcgattccattcatttgcctgctcttcagatagagctctacctggggatatctcacgtagatatcatccaagacatcttggatttctttcactgtcaaggttccagagttatctttatctgctactctgaatatttccgagatatcatcctgcattacagatcaagaatataaagccatatatattgacataacagaaacaaaatcttttacattcatcgacttatagcttgtattgcaggaacaaaggatagttgaaacaccccctcactcaaaggtaatttgtcaatgcaggtatactgcttccattatatgctagtacaagtcaaatgagctaccatttccactaccacttaataaaatccaggagcattccaagttagcaaagatagatgacaggagtctcaaggaagctaaaaaacaatgtcaagtatgcaagaagatgaacagaaaagaagtcttatcttcatagaagaacgtacacaaagatcaagtcccattacttaccattactctccgctggtttatcgtagcacaatctcctacagcataaacaccatcacattcacggacccttagccattcatcagtggctagtacacgccgtttgccctgcaaatgtagacggagaattagatggataactcagctagctacaaagagtcgagctgagtttcttgctaggtacctgcccaatttgtttcatgaactctgaaatgaagggccgggtaccaataccagtggaccaaacagccattccataaggaaccgcgatatctccagtggctggattttgcatggtaattgcatccttagcaaccttcacaactttgtatccagttttcacatcaatgccatcccttccaaacttatcctcagcaaattcagtaatcctcttgtcaaacctataggaagcacatgtaatcaaagttaaatttacaagggagggtaagcttgcgttgccgcatccttccatcatagctaatcatggtaatgagaaaaaggtgaatcactagtcataacttcatatgaatcaaatgcaacagaaatccagtatggccttacatagtcagtatgtgatctgcagcttcaatcagtgatatcttgacaaggtgctgaatagaaggatacagcttggatagatcttcggtaacaaaatcgtgcaactctgcggcaaattccacgcctgtaggtccaccacctacaacaacaaagtgaaggttcttcttcctctcttcttcatccaggtaaggaagacttgctctctcgaagcagtccatcacattccttcggatcttttgggcatcctctacttcctgtgattcagtaatgacagtatgaacatagaatgtatgattatagcacagaaacaatgaaaatgtagtatatgaattttttattttaaaaaataatataaacttttccgtttgaaaataagtgcaaattgtgtatattacacaatggagcacttatatgagtcatattctatgtcagatatccgtacaccaataccgggtagtgatgaatttcatagtacaagtaagtcatttcatttcatagtgcaagcttaccttcaaaaagaagcaattctcctcaacacctggagtgttaaatgtattagacctagctccaactgctatcacaagatagtcgtagtcaaccaagaattcgccatttccatcaagatttgtccctatattggaccggcaatggatcttcttgtttgatgaatcaatcttaaagcattctgcttcccagaatttgatatctccacctttctgcaagggaattccagaaaacaatgttaatgcattttgctcagaattaaccatctagttgagcttccctacgaaatcaaaacttagtgcatgtaagaaacttaagctagttttttagaggtcaagaaattcattaaaccattgaaaaacagaccagtctgtttctcagtgtattaacaggttgttaaaaatgggaataaacaagtattatattgctttgatacgcaaagccatcaactctacattaagcccaaataacaaataagttgtccaaattgctctgataaagacaaggcggtgacagaagtataaatatagaaaaaaacagagcaatctgtggaaatttctgagaatcatcataccttctccaaaatcctacgaatcggctcaacaacgctccttggctcaactgtcccacaagtgacacttgggagcaggggcgtgaatgcgaaataattccgaggtgaaatgacctgaacatcatacagtctgctgtcaagattcctcaggaacgtggtgccaccccaaccggtgccaagaacaacgattttcttctttggaggtccctggggcttcccaacaacatcatctgaattggaatccgcatatgctactagtcctccactactgcaaatttgataagcaacagatgagcaacatgcttagaaacatatgacaatgcaaaaatatttaagagttcacataattcttcattgtaaactagtctgaatgcatcatatggacgcatagatcagctcaagaacccaatcatccaacagtgacgtttccaaacattcacacgtctccttctacaaatagcttggaatgtccctatttacaaaccccgttaacatcagtaggcataattactgcgatggactagtcggatcaggagttgaatttcttcttgctctcgcatcttctcaaatagataggcatattgcctaacaaaatatataaagttattcaagaatttgatgagaaaatgcagtaaccaaatgttactgtcaaaacagttaggcaagaaaggtctagttgtgatttgtgaaagaaacggaacttcgcaagttcagaaatgaatggcaattatgcacatggcaccgacttctcacctacctttgtactaaccatcatgtgttgtgttcacgttcttgttagtagtagtattaaattaaacttttgaatatcataagtacaagagatctcaaagcacagctggactttttttttaaaaaaaaagatgagaagaaaaatgcttatagaatggagagatggatggaggaggagaatttttcttgttgatctcatggaccacgaatatatggtggaatattcatgtgtggacacgtcggcgccaacgatgtggccatgtggcgaaggaggagcaaatctctcggggggttctttttttccccttcccttttccttttctgttctcttgtgacatccggaattaatttcacaatacaagaaaactaatcttttttaaataaataaataaaatgctaaatatatacggagtggaatggaaaaaaaatggtgaggtaaaaaagaaatccttgctctagatatgaagagttaaaatcagagttgatgtcgagcagataaattggtaagctgagaggagaaacgatgcgat

SEQ ID NO: 28897 - DNA, 1370 bp, Oryza sativa
cagcagctgacgggatcagctaggcccgggtggccgattgtaaagttgttggcccgggtggccgtttgaaaagctgttggccgggtgccaatcttgtttcaattctaaagactgatacattgcacatactccgaccggacgagacgcactgtctcatccgtgtcgtttgagaagcactcacttagttgtttttagaaaagagttcaaataaaatcaattacgaaaacaacagcctttccttgaagcctacattaaacacttatttccctggcttgctgagtactcccgtactcacccttgctctatataaatatcccccccccccagttgctgaagaagatgaagcggatcctgctgatgaggagttcttccaggagcaagccggctatgatgagttttagggtttcggcctagttcccaagtcgcgcctgtgttgtttggtccaagtcctggcttccgtttcccttctgtaatgcagttgtgagctcgggatctgtccgcagcccaacatgactgtacctctactctataataaagagacctctgttgctgtgatattctgtctccctgtcataccagcactatttcctgggactggtatcgattaacaggttaaattggagcgtcacgggctagttccggtcgggactagttcggggcgtgacaagagatggtatcagagcacaggcttggccctagggcgaaacccgacgtttaggacgaccctaaggatactaagttcaaaactgcttgcgaaaagctaaggcttcttttggtttccttattttcaatagtttgtttctaaaatggttactgatccttctccctctttcaaaattgtagatggcagtgaactccagcttcagttcccacggttttggtgagggtcaccacgtcgctcagcttcgtgacctcgcccgtttcctcggtttctcgtgtcccgagtacacggggtactccgtggaccgtgttccccctcactgtgagctctctgtgtacctttacccccgtggaggtatacacggagccggccttcgcccacaccacttcaccgtggccaggcccactctccagatcgcgtaccaggacctctcctggactgcgcttcgtcgcctggcccacgactacagccaccgtctcggaggctccgccttccggcagcttccacgccttccttctggccactcagacgccaggtacccttgtccgtacagcgagtctcagccagtgctgactcgcatggttgagctttcggaggctcaggccactcagcacgacctactccttgaggcttaccgctcccttgcccgccgctacgccgctttggaggcccgtctggccgaggagggtgtcacctcagttgacactat

SEQ ID NO: 28898 - DNA, 4999 bp, Oryza sativa
agtgtgtgctatctgagttgctatttactttgctacttgccctcctaagggcttatctaactcttaccccgccctcttctgggagtttagatggctagccgcccccgccgtgcagctcgtgcaccagcccgctttggttttgaagatggtagagccgagccagaagcaaatcatgagtcagctaatgagcagtctcaccacagcaaccgttcacaccgtactgtttcccgcaacgcagaagttgagcaaccccgccacagcaaccgctcgcatcgtacagcttcccgtgatacgaagatggaatagtctcaccgctctcaccacactgccagtcacaattctggagaagaacgcctcccttccccacctcatgtggaaaacaacatgcaacacttaatggcagttcagacacaaatcttgcaaggattagccgcagccatagccggttttcagcataatacgcatggaaatggccaccctcacatgagcaacaatagatccaagctgacagactttctgaggtctcgtccgccagagttctctcagaccgtcgagcccgtcgaggctgacgattggctgaaagatgtggatagaaaactcaacttagtgcagtgtactcctgttgagaagacgctctacgcctctcaccagctaagaggacccgctgcagattggtgggagaattactgcaatgcacaccctgaacccactaacattgcttgggatgagtttgctacggctttccgtgcagctcatatgcctgaaagcactattgacatgaagaaagaagaattcaacagacttaagcaaggcaacagcagtgtcaatgagtacctaagtatgttcaacaagttggctcggtacgcccctgaggaagtggacacagacaagaagaagatcaggaaatttttgaaggggatcgcagttggaatgagactccagttgcttgctcatgactttcccacctttcaacatatgatcaacaaggcacttttacttgaggatgccagaaaagaggctatcgaagaatacaagaaacgcaagtctaaccatcagggaaattcttcccgaggcgcacctcgccctcgctacggtcagcccatgcaatatcaccagtcggtaactcaggctaaccgccagccaggctacgcccctcgtcctcagatgaaccatccggcacctcagccacagcagcgtgcccctagtggcaatactgcgccaaacagtgttacctcttttaagtcaccacagggaccgtcagcagttcagtgcttccggtgcaaccagatgggtcactatgccagacagtgtcctcagaatcctaccaacaccaactcagtacatgctaatggcagcactgccagaactcctactccagcgacagctcagtctcgtcccagctctcaggcaagtggacaaggttcacgtgcttccaaccactttggtcgaggacgtgtgaaccatattcaagctgaaaccgctcaggatgctccagacgttgtgatgggtatgttctctgtcaactccgtacccgcaatagttctgtttgattcaggagcttcccattctttcatatcacaagcttttgtgaaaagaaatggttggaaaacccaaaatttacgtgtaccaatgatagtacattcccctggaaggaatataagggcaactcaaatatgcccggaagttaaccttaaaattgaggaagttgacttcctagccaaaccgatagtcctagactcgcaaagcttggacatcatcctaggtatggattggttggctaagcacaaaggacagatagattgtgccgaaaagtccatcaccttgcaaggacctggaggaaagcaagtccgctttacccctaacacccctaccgcaagtcggtctatcctaacctgtttacaagtcacctccttggagtcggtgcccatagtctgtgaatatcccgacgtattcccagaagaattaacgagtatgccaccagaccgagagattgagttcgctatagaactggcaccaggcacggctccaattgcaaaaaggccctaccgaatggcagctaatgagttagcagaagttaaaagacaaatcgaagagttggagagtaaaggttatgtgcgacctagctcatccccttggggagccccagtgcttctggttaagaaaaaggatggctctgagagaatggtaattgactatagagccctgaatgaagtaactataaagaacaagtacccgttgccacggattgacgatttattcgatcaacttaaaggagcaagagttttctcaaaaattgacttgaggtcaggttaccaccaactgaaaatcagatctgaagatatcccgaagaccgctttctcaacgcgttatggtctatatgagttcacagtaatgtccttcggactcaccaatgctccagcattcttcatgaacttaatgaacaaaatctttatggaatacctggaccagtttgtcgtggtgttcatcgatgacatcctgatatactccaagaatgaggaagaacacgctgaacacctaaggctgataatggaaaagctcagagatcatcaactattcgctaaattctcgaaatgcaaattctggttagatcgagtagcatttcttggacacgtgatctcctcccacggtgtcgaagtagatcccagcaaggttgaagctgtacttgcttggaacccgcccaagaatgtgtcagagattcgcagcttcctaggcttagctggatattatcgaagattcattgaagtattctctaagctagccagacctatgaccgagctgttaaagaaggaaaataaatttcactggtctgcatcctgtgaagacagctttcaagaaatgaagaaaaggttgaccactgccccagttctcaccttgccagatatccgaaaagatttcgagatcttctgtgatgcatcaagacaaggcttaggatgtgtcctaatgcaagaacgaaaggttgtggcctatgcatccaggcagctcaggcctcatgaagtcaattatcccacccatgatctcgagttggcagccgtggtgcatgcccttaagatctggaggcactatttaatcgggaacagatgtgaagtatacaccgatcacaaaagtcttaagtatatcttcacacagaccgagttaaacatgagacagagaagatggttggaactaatcaaggattacgatcttggaatccattatcatcctggtaaagccaacgtggtcgctgatgcgctaagtcgcaaggcctattgcaatgtagctcaaatacggcctgaccatgatcacctgtgcagagaattggagaagttaaggctgaccgtggtacagtcaggtgtccctgccagcttgacagtacagcctaccctagagtcgcaaatccgggaggctcagaaagacaacgaagggataaaagaattaataaaaaggaatacaggagaagaaagacaccaatttctccatagacgatcaaggcacagtttggtgcggtccacgcatctgtgtaccggccaagaaggagttaagagatctcatcctaaaggaagctcatgagtccgcctactccattcatccaggaagtacgaagatgtaccaagatatcaaggcatacttctggtgggctggaatgaagcgagatgtcgcagaatacgtagccttgtgtgacatttgccaaagagtcaaggcagagcatcagaggccagctggtctgctgcaacccctaccgattcccgagtggaaatgggaagagatcggaatggatttcatcaccggtttgccaagaacccctaacgggtacgactccatctgggtaatcgtggatcgactcacgaaatcagctcatttcgtgccagtgaaaaccacctttgatggaaagaaactagcagaactctacatgacccatgtcgtgtgtagatttggctgtcccaagaaaattgtgtcggaccgaggcactcagttcacctcaaggttctggaagcagttgcatgaagccctcggaactgatctaaaatttagtacagcctaccatccgcagaccgatggtcagaccgaaagggtaaaccaaatcctagaagacatgctacgagcgtgtgccttggatttcgaaggcacttgggatcgttgtttgccgtacgcggagttctcatacaacaacagttaccaggctagtattcagatgtcgccgaatgaggcaatgttcggaagaaagtgccgcactcccttgtgctggaatgaggtgggcgaagcactggtattcggtcctgacatactcaagtcagcagaagaataagttaagctaatccgaaaacgtttaaagacagcgcagaaccgtcagaaaagttacgctgaaaatcgaaggcgtgaccttgagttcgaaaaaggagatcatgtgtacctgcgagtatcacccctccgtggtgtgagaaggtttgggatgtccggctagttagcaccccgctacatcggcccctacctcataaccgccagacgtggcgaagtggcttatcagcttgagttacctgaaggtctcgcagatgtgcataacgtgttccacgtatcccagctaaagaaatgtcttcgagttccagaagagcaagtccccctgggtaatatcgaactggaaaagaatctgacctacaaggaaagaccgatcaaggttcttgaagaggcagaacgtcagactcgaaggaagaccatcaagttctacaaagtccaatggagcaatcattttgaagacgaggcaacctgggagcgagaagatcttctccgcgccgagttcccggagctgctcccttaggtgctgaatctcagggtcgagattcttgttaggggggttggtctgtagtgcccattccgtcgtggcgcctagcgggaaaattatctcttaaaaaccctaattacgaaatttgcttctttgcttattgtctagtgtccgtgccatctcaagatctcaatccccgatctatcgtcgagttcaattccgaat

SEQ ID NO: 28899 - DNA, 620 bp, Oryza sativa
tttctccccctccttttccccttttcctcctcgccggcgtcatcctccctgtcgccgctttggccgcgaccgccgagcgccagctcgcgaccttgaccgcgcaagtcggttcccaaaccgacattgccgcccatttaaaccccagcctcccctttcccttcctctcccattcgtctccgcgccattgccgccgcccccgtgctcagtctcgcctccgccgtccttcgccgagcgccgggagagccggtgcgttcgaggacgcggaaggggacttcggccgcgccctcttcttcctcttccccggcccgaggccggagagattactcccgcgccgtcggcctcttgtcacaacgcccctcctcatcacggtagtgcctccctccgttcttcctcctcgcttcatcttccccccttagatttcggtagtagctcgagtagcctccccgtagttagccggcgccgccccgaccgtgccgtcgctcgctgtgtgctcgctgccgtcgccgctcgagctccgtagcacccgcacgttgccagcctcgctcggcgtagctccgtccaatccgacgctagcgtcgagttcccgaagccgcgtagatgctcttaccgcgggaatcgac

SEQ ID NO: 28900 - DNA, 4330 bp, Oryza sativa
atgcttgcagtcctttctccaattaattatgccttcgtcatcatgttcgaggaactgagcaaccacggcatgtgctcggctccaatgccgccattgccgcggccggctgctgcatgctcccggatcgatgccgatggcgtcttggtgcagctcgtcggagttcatcggctggaagataagaaaggaggaatgaagacggagagggaggagggccggcgagctcgcccactccgcccgacgctgtgtgggtgtggcgaggagaaagcaggagatcaggaaggagaaaggtggaaggagaggaggatgacatgtaggctccacatggggccatcaattttttttgtattttttttatcaattttagtgtgacgagataaattgaaagtataggtttcccaaatacaatttgcttttttatccatgcctagcaaagttttaatttggatgcaaactattgacattgtttttaatattgcatgatgtgcaacaacatagagaattaaatttgaaaatatactattcatcaattttttttcttaagaatagtcgggatgcaaaactttttacaaaaatataaactgttgcgtgaaaataatgtgtgcgtaacgttgcgggcggtgtcgcaccagggaagcggtctcgcggagcgagaccgaacggtctcgcaaaatcaaatagcgagactgtctaacagctcaatttaattagtgattaattacttaattaacaattaactaataataatttagtattaataataatttagtaattaattattatgattactgattaattaatcactaatcatgataattaatcgctaattaaattggcattgaatggctcatgcatgagcgagagcgctatccgcgagaccgcgcggtctcacgctgctgccgagcaagaccgtgcggtctcgcgctttttccgcgtgataccgtccgtgacgtcattctcatatcactttcacgtaacggttgtgcgagaccgacgatatatttctgtaaaaaattttgcatcccgaatatttctgagaaaaaattgaatgaatagtatattttcaaatttaattcacaacatagatacatgtaagcattattgaggcatctcccatattcaaacatgtcctaccttttgttttcttaggcctctcctaattaataggagattcattttcattaaagagtgagatacatagccggtacttaaacttgcagagtaatattatttaggtccgtgaacttgaaaattacacatttagatccgtgaacttggtttaatgtaccactcccggtctaatcgttatttgaccacgtttgacccccaacatagcatgccacgtaggcaacacttttgtactcagccccctccaaatatacattcgcacataaattgccttgaccagtgcatttcaacctaaatcccccaaaatattcctaaatcggctaaggttttgacggtgaggttagtgaaaggaagccgagaggtagcggctgtggtggccttggcggtgagattagcagcaagaggcagcgcagtgcagcaaggttagtggtggcacagtgcggccggattagcggtgggaggtagcgcaatgcagtttgcacgataggcattcccatggattctccaagctcgtcctcgtcttgaaatcgccggaagaaggtgttgttgattgcccgttgtgcaaggataaggtcattttggagcatagagcaaatgacaattgctaatcgggaccacattttctatacatgcaaggagaagaatgaaagggaagaacgatttgagaaatttttttaggattctgatgtcactatatagctaaaaggagatatatgcgacgtgttgtgatgtggagggggctaagagcaaaagtgttgactacgtgacatgccatgttagcggtcaaccataggtaaatgacgtttggactgggggtgatacattaaaccaggttcacggatctaaacgtgcaattttcaagttcacggacctaagtgataccaccatacaaatttagggactgaccatatatttcactcttcattaaatatggtgttatgtcaacatttttatgatgtggtaaggaattaatggagatagaaatgaaatgagtttcatctagattaaaccatatatacattatttccaatatgactcgtctatgcatgtgttgcctatgaaatagcaaaaatgaaacaatacattgtgtgagttattttaaccatcaattaaatttcttaaatatcttgtttatatgtcacttgaaaacatactaatgaagcctccagtctgcaaggaatggccttactgatatataggtacatgtaaatctcgaggagctattgaagggtgtcatctaccatagagatgggctggtagtcaaatggtgacatcttcttgagttattgcttatgtcctggaagcatttaatttattttgttttttagccaaataataagtgcagcgagaattagtgaaatggaaaacagttgtatcaggtctgccctttgttcttcttatatatagggggagagaagtaccagggaaccacattccctttctcaaagatggaagcaacatctctagatcttcgcttcatcttggttcttgttctacttctgaatccaacatttgcaggtgcaagggtggatccacacagagctcaagtggtgcacaccacacagggtaagttctgaaaaattcattagcatttgatcatgttatcacataaataaagtagcatatgtgtgattaagaggtacttgtgtatgatacctggtaatttggattctacatttgcccctagacaggtgagttctttctcgactattttttgacgttattggtataccttttcttgtcatgtagcctctatctaaaaaaaaaagacttgatttctggctaagcatagaggcaagtaaatagccagaagtcaaatcttttttagagagagggagtatgttgtgtcttgcaatgtttgttgtgatttactctgtttataactagtgctttgtgcatattcaacagtgaaattatagatcagattccttctccatgcaagttctgaatggtgatagtctgattgatgataagcattataacaagtggtagttaatctcttttttttcacagaggattgtattattgacattggctgggtagtgttctgcaccaaaaggttctgcaaatttagttgctggggtgaaggtcttataaagaaggggaaagtccgagactattggtgcagtgattttcacggctgcaactgcttgatttgccgtggcatctaaaaaagcaggggctgttttgttaaccgtatatagtactaaaaggtgtatcatcatgcttaattatgcatgggaatagtcaataataagtcagttgcttcatgttctactgctatatgatttgatttcaggtctggctccgtgtgttatcccctcctggctgggctgccctctctccccctcgtggcagctggctccaggattggtggtcattctccagggtatgtttacctgagcaccttcgcagcggcttcgactccttggtattcctagtctcctggcagctgtagaaggaacgaaacttcagggttttcgactctgcgctcgcttcggtcgcagtggttctagagtccttccgctcggagggccagctgtggtctttagctagtgttacttgttttggggatttcttgggagtgtagcgtggctctgcccccctcccgctgtttggagttgcgtttttaaccgtcgtagtagttcctagcttcaagtcccccctttaggcataagccagtctagctgattactttgtgtaacaaaaactcttttcctgctaatatattgacgtgcaattcttttacgtgttcacaagaatatatgatttgattcgtcatgtggatgtgttgttctgaaatgatattcatgtggatgcagagtgtttgaaaaaacagaaaacgagaaaatcgaggagatacgtaaaacgagacaagctattaacgtgcgattaattgagtattaactattttaaacttgaaaaatggatgatatgatttttaaacaacttttctatagaatttttttaaaaaaggcattaccatttaatagtttgaaaaacacacgaaaaataaaaataagagactttttccctctgtctagaacgtatatataattcggctcggaattttaggaagaagcaatcactatcactcgaaccaaatcctaataatttcatttcagaatagaattctattgatcgaaacaaccccatgagactttgatttggctggagaaattcctgcgtctgtcactgtattact

SEQ ID NO: 28901 - DNA, 4120 bp, Oryza sativa
tgtgtacaaagtttaaaattccacaacttgatcttgctgaattacctgtattgatccatctgtagctatgttgcgagctatatacgacaccacaagaacttcttaacactcttaggcgttgtttagttcgcgaaaagaaaatctttagggtgtcacatcggccgtttgaccgaatggtggaagggattttcgaacacgaatgaaaaaattaatttcataactcgcctggaaaccacgagacgaatttattaagcctaattaatccgtcattagcaaatatttaccgcagcaccacatgatcaaatcatgacgcaattagactcaaaagatcgtctcgcaatttacatgcaaattatacaattagttttttttcgtccatatttaatgtttcatatatatatctaaacatttgatgtgtctaaacatttaatgtaacagaatttttagaagtttgaagagaactgaacacagcctaaataaagccttattttgcaacagatgtgcgtccgtctagttactcgtctactacttttgtttgtttttctttcctgaccagctgagctcagcaccccgtaatactgtagaatactgtagtattgtagcgttatcatgggccggccattttgggcctagatgggcctgttgtgatacgtgggctgctctttatatctacgtttaaccttttgttattttgatgagaaatttgcatatatgccatccatagaaattggctttgctagaataccatcacttaaattggatttgatcaaatgccactctcaactagggtgtattcgctggaatgccatcttaagaccattttgtccttaggcttcttcttcctcccatcaatgtaggaaaaactcgcccatggccatcgcaagctatggccgctaacagctgttcgcgtgcccccgttgtcttcttgctcgtggcagtgttgacacaaaatttgtcgtacacacgaaggcctcaatgattttcttagctctggtgcagatcctatcaatccggtttagggcgtgacaattaatttgattctacaactaacaagaaaaaaaataaaaaggttagatcatgggggccaatcggccaaagggtcgatataataccatgtgccaactgaatcctgaataaacttgccaaccgaatcatctataattacgacgttaattcattatttgactcggtcttgactaaaggtaattgcctaattttttgattgggctcttaatccagtggcacggtgattgggcccaattacaggtattttgttgggtttatgggtccaatattccataggcttggttatgaatataatttttcctcccctttatgtttatttcttctcaactttggtagttttgtcatatacatccaaatatacatcaacactcataaaaattattagaaataaaccctaccactattctggatgttttatactttcatatttatgcaggtatttgatagtgtaaaattggtatttaacaaccgtcaacaaccgcctcgccggacgccggccgctcggccggttgccggcttggcggcttgccgctgccgcaggcccacagcggcgcaacgctgccgcccgccttctcctgtctgcccatctccgttcccatccggactccttctcagctgctccatgcctccaccgatccggcgctccacccttcagcccaggtaacgaagagtgaacagatcaacagaatagtttcctagtgcctaaatcgatttgtgattagagattagtgaatctgtaaataacttaatatgcaatttataaattattactgataagtgaatgtggaccgttgtttttaggattggtaaaacatgaagaggagcggagatattgcgtcgctatttcggaaccatgaagcaaagcaaagaagattgcggtggtgtttgaatctcataaagatgaagatgaaaaataaagattaagtgtttcacacaaagcgaggtggtaataacatgtgattaattgagttttaattgttacaaagttgaaaaatagattaatctgatattttagaacaactttcatatagaaagtttttacacgaaacgaaccgtttagcaatttgaaaaacgtgccacttttatcaaaattgattttcaaaatgctcaaaatccgtcaactttataaattttgagggttcaagtcaagtccctctttccctaataaaaagtccattttacttcctaactattgtaccaacctctgtagaagaaacgaacaggaccgcatgttgcttatcttcggatgaggtcattggtaatgaagctcctgaacctggagaaccaccaccacaagttcctacagttgatgatgaagttcctataccaagaaaaaatttgtggctacgccactgccgagtacgatacttcctaattgcaacaaaaaaatttctggctacgccgctgccgagcacgacacttcctaattgcaacaaaaacgtgaaaaacacatcaaagtctaggtacacatcaagtatgaccgaccggccgaccggattttctcgtcaatgaattcttgtagcgcccgttccgtggtggcgcctagcgggaaaattatctcttaaaaaccctaattgcgaaatttgcttctttgcttattgtctagtgtctgtgccatctcaagatctcaatccccgatctatcgtcgagttcaattccgaatccaaatccttcccatcaaattcctccgcaaaagtctattttgcctcccccgaggtcgatgggccgaaacccgctcggcccatctctcccccggccccctctctcccgggcgccctcgctctctctctctctctctctctcgccctctcccctccccggcgcgctccgcttctccccccactcagctccgctccgcctcgcccgcgcgccgctcgcgcgagcgcgtgagccgcgccgcccgcaccgagccaagccctcctttccgctccctcgctgccgctccccgcgcgttgatcgcgcgcgcgtccgcgtggtcctcgcccgcgtcgcgtctgcgccgcccggccccgctgccctgccgcgcctgcagccgctcggccccgcagccagcgcgcgtgccgagccgcgccgctccatccgccacgcctcccgttgcaagccgcacgcgcgtgccgtggtggccgaccgcctggtcgccgccgtcgtcagcgtctgcgcgtctgtcgcccgtgtcgtcgcgccgctccaaaccgcccgccgtcatcgccgtcgtcaccgcccggcccccgccactccgcgcgcaagccgccaagggacggaggcagcgcccctcctctctctgccgggtagcccccgctcccctcctcctttatcccgaatcggcaaaggggcaagcccccctttctccccctccttttccccttttcctcctcgccggcgttatcctccctgtcgccgctttggccgcgaccgccgagcgccagctcgcgaccttgaccgcgcaagtcgggtcccaaaccgacattgccgcccatttaaaccccagcctcccctttcccttcctctcccattcgtctccgcgccattgccgccgcccccgtgctcagtctcgcctccgccgtccttcgccgagcgccgggagagccggtgcgttcgaggacgcggaaggggacttcggccgcgccctcttcttcctcttccccggcccgaggccggagagattactcccgcgccgtcgacctcttgtcacaacgcccctcctcatcacggtagtgcctccctccgttcttcctcctcgctccatcttccccccttagatttcggtagtagctcgagtagcctccccgtagttagccggcgctgccccgaccgttgccgtcgctcgctgtgtgctcgctgccgtcgccgctcgagctccgtagcacccgcacgtcaccagcctcgctcggcgtagctccgtccaatccgacgctagcgtcgagttcccgaagccgcgtagatgctctcaccgccgggaatcgacccctcgtggcctcgtcgccgtttccttcttccctccccgccggttgtcgccaccgcaattcgccgccgtcaagctccctccggcgaatccgagccgttggctcgtctcccctcatcagggtaccgagct

SEQ ID NO: 28902 - DNA, 8998 bp, Oryza sativa
tcttccctccccgccggttgtcgccgccgcgattcgccgccgtcaagctccctccggcgaatccgagccgttggctcgtctcccctcatcacgaacaaccgcccggtgtgctcgcttttgcccgtatcgccgtggttcgctccgccgctcgccgccgccgcccgccatccattcgcggccgggtcgtcgtctaactcccgccagcccacgtggccgccacgtaggcgccacgtcggcgccagctcagcctagaccagggtcgagccgaccccggtcagtccctccccgtgcgcgcgttccaccgcgagccgtgaggctgcgcgtgggcccgccgcatccgcgtccaccgcgagccgcgcgcgtgcaccgcgtccctcccccgcccgcgcgcataagccgcgtactccctccgcacggtgagccgagccgctgataagcgggtcccacccgggaccgcgcgtggtgagcccggtccaccggactctctctcctccctccgcgcgcacgcgcgtcttgggccttcttgggccggccggcccgttaagctcggccgagccaccccatttcccttgggccgcgccttagccgcccgaggaaaagtctataatccctccctcttttcttttcaattcttttcttttccaaaaggatttaattaaatccttttcctttagaccaaaaatccaataatcttagaaattcaatatcttcccaaccgtaaatccgtttgactccgttcaacttccaaaattcctcaaatctcgagatctatctaatggcatgcttagaggtcattaatagggctttattttttcgccgtttgttgagttgtcccatttcgcgtgtagtttcggagcccgaagacccgcagcgcgaggatttcgaggatcaagctccagatctcgagcaaggcaagccacctttgaacatcttgagcctatatttgaaatttaattaagttgcttgaaaaatattatgcattgataggatcgcacttaatctgtttgtcccgtctgcaaggcagattggcggacctacctagtttgttgcatatgatccttcctttgttaattgttataccatgttcccttgtaaccacccagttgcgcctcgggaatcgtgcactctgtgcgagtaccgacggtcgccttcaaacttaaaatctgagtaacaacttgggtaaaacttgggttttacaaaagacttggaaaacccgacacctgggtcggtgcttgcgaactaaatgaatttccaaaaccgcggaccggggaacgtaccgggtgtacggttttcccgctctcgcacttaaggaccgtttccttggaatttcatccgaacataagacaagtacgaccacatgggtggaatgggacacccctggctgagtaactagcttatcaggggagccttgatgccgagagacatgtggattcgccggggtggtgtcggggaggacccctgggcttcctggcacagtatggtctgggacctaacctgttgttggtctgggacccctctcgtcggcatatggtaaacctgtgttggctttggaaatgccttgtcatgaaagcttggaggtctcccgacgtggctgatccccacgggctgggtgatccgggttagtaatgttgtgtgggtaaagtgtaccccctctgcagaggttaacaaactgttcgagcagccgtgcccacggtcatgggcggatgtgaggtgattcctagcgtagttttgtttgactactgcttgtgaaattgctgttgtgaaaaggggttcgatgtttgaaaaatcagcagctgacgggatcagctaggcccgggtggccgattgtaaagttgttggcccgggtggccgtttgaaaagctgttggccgggtgccaatcttgtttcaattctaaagactgatacattgcacatactccgaccggacgagacgcactgtctcatccgtgtcgtttgagaagcactcacttagttgtttttagaaaagagttcaaataaaatcaattacgaaaacaacagcctttccttgaagcctacattaaacacttatttccctggcttgctgagtactcccgtactcacccttgctctatataaatatcccccccccccagttgctgaagaagatgaagcggatcctgctgatgaggagttcttccaggagcaagccggctatgatgagttttagggtttcggcctagttcccaagtcgcgcctgtgttgtttggtccaagtcctggcttccgtttcccttctgtaatgcagttgtgagctcgggatctgtccgcagcccaacatgactgtacctctactctataataaagagacctctgttgctgtgatattctgtctccctgtcataccagcactatttcctgggactggtatcgattaacaggttaaattggagcgtcacgggctagttccggtcgggactagttcggggcgtgacaattctactattatcaagaggtagctagccatggcatgaatgatatgtatccatggcaatgtggatgaggtcctgtttagttttcacgcaaaaacttttcatcatgtcacatcgaatatttggacacatgtatttagtattaaatataaataaaaaaactaattacacagattgcgtgtaaattgtaagacgaatcttttaagcctaattgcgccatgatttgataaaagtattaattaggcttaataaattcgtctcgcaatttacagacggaatatgtaatttattttgttattagactatatttaatatttaaatgtgtgtccgtatatccgatgtgacacgccaaaacttttcaccgtaaaactaaacagggcctgaccacaaaatgccttttagcctagttcaccagaatgcagcaacatcagcacagctgcaagttgcaagagaaaagccacacagcttgtttggctattaatggagaggcagattgagacgtgtgcgtgccaagttgaagactggatcccccgttcgaatcttctaaacatgaagattaagggattaagggggtggttaggtatagggatgtaaagttttagcgtgtcacgtcggtatctaattacataatccctcaataaacagtgagatgaatttattaagcctaattaatccgtcattagcaaatatttaccgtagcactatattgtcaaattatctcataaattagtcgcaatttgtgcaattaattattttttaagcttatattcaatacttcatacaggtattcaaacgttcaatgtaatatggtgtaaaatttttgtgtgggaactaaacgatgatggaaaatgaggggtgggagggagaaagaagaaggtcagaggtaaattggtcgaggataacattctagcgtagattgagtaatggcattttagcgaatccatggtagatatgtaattttgtacgaatatgtggcacgcttctctagccgaacggagctttatttgtggtgccacgtcggtttataagattcctatctctatatatagcagccaagtaagttagggaaagaccaagttagtttgtagctcagcaacaactcatcctagagcttgcagagcaagagggagttgaagtatggcaacctctgttccgagtgtactactactacctgtgcctacctgcaccgatatgctagtctcaccagtagaaggaggagatctgctgcactgtaaaccccactttgatcaccatcctaatgtctggggcgattactttcttaccttctcaccctgcactccatcaatggtaaaacagcacaattaaatcagtaaattatatataatttactactacccatatgcaattttcctatctatctattattcttcatttagagatatatagtacgtatagtacatataaatatgcctaacaaataattaattacttcgtagcataatcgtcctcgcatgtatatgtatatgtagcttctgaatatgaagagaaaagctcatgtttccgaggaacaagtgagaaggatgatacttgagtgttcttctggccccaatttgcacgtaaaacttgagctcgtcgacaccttagaacgtctttgcattgactaccactacgagaaggagattgaaaatgtgttgcgccgggttcatgaggaagaagacgataccgacaatcactatgacctccacactacagctctccggttctatctgctcaggaagcatggatactatgcctctccaggtgggtgtgtgtgtgtaattgacgatgatataccatatttttagcatgaactaatactctcccttagttaactaagattataagtcgttttgagtttggtcaaacttaaattgctctttatttgaccaagtttgtagtcaaatatagtaatatctatttataataccaaattagtttcattagatctaaaattgaatacattttcatattatatctgtcttgggttaaaaatgttactactttttcctacaaactcaattacatttggaacagtttgattttgaccaaagtacacaataacttataatttgaaacggaggtaattgaatatatgcaatgaaatatgttcgttgtagatgtgttccagaggttcagggacgaggaaggaaatttcacacgcgatgataacaataacggcacaagaagcatgctgagcttgtacaatgctgcccatctcaggattcatggggaggagatactcgacgatgctatcgtcttcactaggaactatttgcagtctgtggtaaaacatctgcagtcgccaatggcggacgaggtgtgcagtgcacttaggacccctcttttcaggaggccaagaagagttgaagcaaggcactacatctcagtttacgacaagttgcccacacgaaatgagaccattttggagttcgccaagctcgactttgggattttgcaatctctgtattgcgaggagctcaatatcctcaccatgtatgttctaaaaatcactagattaggtccaattatcgtttctgctataggaattggatgaaaattatcatcttggtgacatgcttttcaaactactaaacaatatgtttcgtgcgaaaactttctatatggaagttgttctaaaatatcagataaatctatttttaaaatttataataattaaaactcaattaattatacattaataccatcttattttacgtaaaacacttaatcttcatcttcatctacaccacaagagaataccttattatcttttcgtgctagctataatacctgaaccaaccctaaaattcaaaacatgcataggctcaattttactgtccttgccaaggtattgggagttaccaaaattcacctatatatctatatagatgtccaatttaatgcatgtacatacaagaactggacctagaatgtgaatttttatttattatttcggtgtggtgaaggtggtggaaagagctccaactccaggatcatctaagctttgcgcgagataggatggtggagatgcacttttggatgcttggagttctcttcgagcctcagtactcatatgggagaaccatgctcactaaattgttcatctttgtctcgattttcgatgacatctacgacaactacagcaccttggaagaaagcaagctgttcacagaagcaattgaaaggtcaattgattaagtttcttcttttaataatgaaattcattccgaacttaatttgtttcaaagaagctgcatggagccaaaattcttgtctttaacttgaatttaatttttatcaatgattgaaccataaaaatataatagatgggatgaggaagccgctgaagaacttccaggctacatgaagttcttctacaagaaagtactgaccaccatgaaatccatagaaactgatcttaaactccaagggaacaagcatgtcgactatgtcaaaaacctagtaagtagctagtctcatcaactacctgcaggcaggcaggcagctgatctcattgatcacaactttaactgcttggttaatcttgcagttaatcgacgctacgagatgcttttacaacgaggtgaaatggcgctctgaaggtgcagatcaggtagctgctacggtggaggagcacctcaagatttcagtgccaagcagctgctgcatgcacgtccctgtctacgccttcgtcgccatgggaaacgatgtcacaaccgatgatgctatcaactggggcatggcctaccccaagatcatcacatcttcctgcatcgttggccgattactcaatgacatagcttcacatgaggtatgtttgagtgttttttttgggtaattttaccatcttaccaggaggtatcatattttttatgtattggtacctctagatacttactccctccgttccaaaatataagcatttttagagttagacacggttattaagaaagcaagtagaagtgaatggtggagggttgtaattgattaaatagtgaaagtaggtgggaaaagtgaatggtggagagttgtgattggttgggaagagaatgttgatggagaagttgttatattttgggacaaatcttgagagctaaaagttgttttattttaagaccaaaggagtaatatttaaggtttctgaaattttgatgtaaatttaggtacctcgaggtactttcttaaagatcgtaaatttctcttttttgaaacttttttacatcttataagccgaagagacatgattgaatcaataaaaaaaaacaagctctatatagtatctgctaattaattacttattttgtccccaaaatataagaacttatgttcggatgtgacattttctagtaatatgaatctgaaaaatagaaaatgtcacatccgattctaagttgttatattttaggacgaatggagtagttaactagttgctaaatatttctcttaattaatctgttcgctaacttggatcggccaattaatttccttattattgaagagagagcaagggtcttcgtcgtcgtcgtcgtcgacggtggaagcctgcatgagggagcacggcggcatcacgaaggaggaagcctacgcgaagctgagggagctcgtggaggagtcatggatggacatcgccggggagtgtctccggccggcggcggctcaaccgccgccgctgctggaggccgtcgtcaacgccacacgcgtgctggatttcgtctacaaggacgaccaagatgcatacactcatccaagttcgctcaaggatacaatacactccatctacatcctctctgtttaattagttttcttctaatgaagcgtgactgtatttcaattattaggtcttctatatatgtatatgttgaactttgggaatatttttgccttgtaaaatatgttttttttccattgaaatatgaatacagtggtattacttttgtgttacttccagttccgtttggacttatttggttttgtaggagaacttctatatataaatttttttcatgaaaaatcaacaccgtttaatggtttcgacaatcgtgctcatgggcaacgatggacaaacccaaccgagaatctacattttatttttcggggaaaaaggaatatgttactcctcacaaacaagacgtgagatgaaccgagaatctacactgatcacagcaatctagacgtacttactacttagcttacatgttggttgaaattaacgaatgtcaaatcttcaaatatgagctcatgtatattactacctccattccaaaataagttcatctttcacccatcccacacatactgatacaaaacctaaaagattaaaatatctctactttatcaaatccccatgtaattatttcttactttatctacttccaatacaattattctctactttcacaaactacaatacaaaggttactttaaaaatgattttttttgagccaaaaatgaacttattattatggtcctatggagcagaggtagtatatgtagtgtaggatactgctggctagtactgatctttgatggttttgaagtgttctctttgcaaaaaacagtcaaacagatcttgttgtgcccctctgaagtctgaaccccaccaaactcctgtttcagttcactccattctacccttgctctccgtcctgctgcagatatcttcagagtttcacatcccactctgaattatattgttcagcatatatacattgagagagagagatcaaacataatagtagaacggtagcactgatattggcttctgaaaggaatatatgccccagccaaacatcgattgagaagcttgtcaagaatggcctgcagcgggttcttcggtttcaggtgaatatgttgaatatggaaagcctagattatatatcacaaccttcacatgcatggctgatgaactctccacccttgcttacctgcttaatgtggaaaccaggtccgcagtgaaatgccatgtagcaaagcatctccatccaaacattcatgatgatatcccatcgatcatttgcttctttcatcttaagcagctccttggcaagttggccactttggattaacacaggctcaactgccgtcagtattcttgggtgctcgaaatcctcagttagattatctatctttgcagctacacttctgacaacagcatcttgatctagagcttcctggcggtcttccagacattcaacgatgaattcctgagcatttctaagccgcatgtgcccatcattgccagataggatgccatgctttgcagaaaggtacatgacatatttagatagttctctgcttggacctctggatggagagctgcagcctagctcatcttcatggaagaaggatatgtccgtcgcaatatgccaagcaaggacagcagacatgaaaccggcacgctgaatgctatcgctgatcagcacctgcagccgagctcttgatgaactttcaatgtgcagtttgctcctcatgagctccaactttgcccattggccggtgaatttgctgatgtccccacacatcatctgaatgcaatctgctaccaacctg

SEQ ID NO: 28903 - DNA, 878 bp, Oryza sativa
agagcgagggcgcccgggagagagggggccgggggagagatgggccgagcgggtttcggcccatcgacctcgggggaggcaaaatagacttttgcggaggaatttgattggaaggatttggattcggaattgaactcgacgatagatcggggattgagatcttgagatggcacggacactagacaataagcaaagaagcaaatttcgtaattagggtttttaagagataattttcccgctaggcgccacgacggaatgggcactacagaccaacccccctaacaagaatctcgaccctgagattcagcacctaagggagcagctccgggaactcggcgcggagaagatcttctcgctcccaggttgcctcgtcttcaaaatgattgctccattggactttgtagaacttgatggtcttccttcgagtctgacgttctgcctcttcaagaaccttgatcggtctttccttgtaggtcagattcttttccagttcgatattacccagggggacttgctcttctggaactcgaagacatttctttagctgggatacgtggaacacgttatgcacatctgcgagaccttcaggtaactcaagctgataagccacttcgccacgtctggcggttatgaggtaggggccgatgtagcggggtgctaactagccggacatcccaaaccttctcacaccacggaggggtgatactcgcaggtacacatgatctcctttttcgaactcaaggtcacgccttcgattttcagcgtaacttttctgacggttctgcgctgtctttaaacgttttcggattagcttaacttattcttctgctgacttgagtatgtcaggaccgaataccagtgcttcgcccacctcattc

SEQ ID NO: 28904 - DNA, 590 bp, Oryza sativa
tttccttgggttgtcgtgtccccagtacacggggcactccttggaccgtgttagccctcactgcgagctctcatgagccctttgcccccgtggaggtatacacggagccggccttgttccacaccactttaccgggggcaggcccactcttcaaatagcgtaccaggacctctcctggactgctcttcgtcacctggaccaccactacagtcaccttctcggaggctgcgtcttacggcagattccacgcctttcttctggtcacttatacgccagtttcccttgggcgtacagcgagtctcagccagtgcagactcgcatggttgtgcttcctgaggcttagggcacatcaacacgacctacttcttgaggcttaccgctcccttgcccgccgatactccgctctggaggcccgtcttgccgatgagggtgtcacctcagttgacactatctactgtgacttaggtcggctctgatacaccagtcaactgtgcttccacagctatccgtgggtgtgcacgcactcccaatggttcgtgcctcccccaacttttgtgcgccgtactcaacagtgtacttcccctacccac

SEQ ID NO: 28905 - DNA, 854 bp, Oryza sativa
tatagggcgaattcgagctcggtaccccttttccttttctgttctcttgtgacatccggaattaatttcacaatacaagaaaactaatcttttttaaataaataaataaaatgctaaatatatacggagtggaatggaaaaaaaatggtgaggtaaaaaagaaatccttgctctagatatgaagagttaaaatcagagttgatgtcgagcagataaattggtaagctgagaggagaaacgatgcgatcgtgttctagttagggaatgagagaagtgacgcccccaatcgagatccatagatcggtgaagacgaggaatggaaaattcatttttaaaaaaaaatataaaaaaactaaaattaaacgaaaatggatgatttaggaaaggaactcgtcgatctccgtagaaactacgaaaatccatctgaatacacgcgagaggcgaaggttcaggttgatggaggaggaggcagcggaggtggaggcaacggagagagcggccggcgaactcgttggtcggaatggggggaagtacgtacctggcggcgccgaggacgaggacgaggttggtgaaggtggggcggtggttgaacgccctcgacgcgccctcccacatgaacgccgtccacctcatcgccggcgcggcgccctgctgctgctgcctcttctccggtgatctcggaggatatgctcctccgctctaggctctagctagctacgctacggcgagaaggtaggaggagtagagagaaggtggtggaggaggaggagacggaattggtgtgcttttcgtctggtcgccgtagacccaggaagaagaaggcctatataaaagcttgagtattctatagtgtc

SEQ ID NO: 28906 - DNA, 1389 bp, Oryza sativa
caatggtcagcctcgacgggctggacggtctgagagaactctggcggacgagacctcagaaagtctgtcagctgggatctattgttgctcatgtgagggtggccatttccatgcgtattatgctgaaaaccggctatggctgcggctaatccttgcaagatttgtgtctgaactgccattaagtgttgcatgttgttttccacatgaggtggggaagggaggcgttcttctccagaattgtgactggcagtgtggtgagagcggtgagactattccatcttcgtatcacgggaagctgtacgatgcgagcggttgctgtggcggggttgctcaacttctgcgttgcgggaaacagtacggtgtgaacggttgctgtggtgagactgctcattagctgactcatgatttgcttctggctcggctctaccatcttcaaaaccaaagcgggctggtgcacgagctgcacggcgggggcggctagccatctaaactcccagaagagggcggggtaagagttagataagcacttaggagggcaagtagcaaagtaaatagcaactcagatagcacacactaggcataaactggatttttcaaatcataaaaacacctgatacaacgggtgtggacaagtcacagagctacgccgagcttgactgtgcgcacaccacctaggagaaccagactaccaaacaacacccacaacaaacacacgcacgcactacctcgccacgactccaaaagagttggcggcggaacaaaagggcctgacacccggacggctgctgaagactgcctcctctactcctcgtcggcctggctgcctcctgtagtcggctcctcagtcgaagaaacgtcgatcggctggcgcgaagggaccggcggaacctgtcgagggccggcagcagcacgggccgctggcggtgggggagctgggtagtggaaacggaacacggtggaagaaccaacaacacgcttccgcgcggtgcggataaagcgtgggccacggcgggaggaagcaactggggtgtgtccgggggtgtaggaagggctaactgggtgtgggtagggggagtacactggtgagtacggcgcacgcgagctgggggagcgcggaccactgggagtgcgggcagagccacgggagctgtgggaggacaggtggctggcgtgacagaggcggcctgagtcccaggagatagtgtcaactgaggtgacaccctcctcggccagacgggccttcaaagcggcgtagcggcgggcaagggagcggtaagcctcaaggagtaggtcgtgctgagtggcctgagcctccgaaagctcaaccatgcgagtcagcactggctgagactcgctgtacggacaagggtacctggcgtctgagtggcc

SEQ ID NO: 28907 - DNA, 525 bp, Oryza sativa
agacaccatcaccatcagaaaaaagttctgcgccgccgccacagaacggacactcaagcagaaaagcccaatgaggtagcttgagatcgaatatcattggtttcatgctgcctcccgctgtttcagtgctttgagcttgtcgcggtactcatcccggatccggatgaagtcttcacggcggtagttggtcatttcgtggggaccattgagccagttgacgtatccctgaccgtaacgagcgaccaacccagcttcgtattgctgcgccacggtcgcctctttggcggtgtacttgccagctccggcattacaggatttgcactgcttatgggcgttgcgttcttcaaagcgcagttcagggtaagcacctactgtcttgaaatggccgcaatcccactggccaccatgcagatcaggcggattggtctcgccgcagctgatgcatggcaaatcggcgtcgcgcgcacggataaaggcgttgaaagctttctgagcctgagccttgtagtatccgtctggcctgag

SEQ ID NO: 28908 - DNA, 3121 bp, Oryza sativa
ttttatttatcaaaatcacaagtattaaagttctgtccagattatttcaaaatcaatttttcatatttgtaatgacccccataatgacaaggaagaccattctaagcatggctaagcattatagtaacctagtgactccaaaattcatatataaagtggtatagtcatattgttcctaaggttaggaatgagggatatggatatatgtggggtcaaggtgaatgcaaacaataggagtttgtctaacaagtttaacaaaattttaatttattagtgtacaatcgacatgcaagatttgcaaacattttcaataacctccaaaacataggttcaaagtgatcaaagagatggaggtgggacttgccttgaatcaggaaaatgtcagcacctaaatcacttcttcaccgtttaagcaatcatctatacaaagtacacgttatgcaattaaacaccgaaatatgcgaaaaatccaaaatgctctaaaatggatgatttgtgcacagtgaataggtactggtctaaaattaatttaggtgaaagaatttctattttatctcattttatttgggagttatgaattttagaagtttcgtcggtatagtgtaggatttacttagttactgttgtgaaatgctattgtaaggtaattcttattaagtttatgtttgctggggtgaagatatgtgttttctaacactaacacatttggtttcataatttttagagttaatatgaattctttatgtattttacaagttttaacgtgtcatggctttagaggtttagctctagaacttgcctcatctagctagtgatgtataaaatgagtattttagttaactaatctaaccttagttcataggcttatggtctttattatcatggttcatattttataaactaagggagctctagtccatgttagcaatttattatatcaacctagaaattattatatgagctaagtgccttaagttttggtggatgggaatggaactatgcattcactggtctaacaagttttatttgagtttcattatagctagagtgtatttctatatacatttatatatatacatattgctcaatcgatactatgtgattagcacctatcctataaatttaaagtttagagctataacctgtacagaaggttccatattttattttactatgttgaagcccactgtttgctggttctatagatatttggttcacttcatttagactaaagatgaattttctacaaattttacaatttaaggttgctctatgatggttattacttacataagtatttagaggcttttatcatacagtaagtatataattttattttataatttggaagtatatgttttggtgattctacagaacttgggtttactaaaaaagatctaagatgaattttatatgaacttctaaaattcagcttatctaaaactagtcatttaaaggtaatagttttagaggcatttgatgtatagtatgtatactatttcattttgctttataggagaacataagttggtggatctgtagaaactgagtttgctccaaaatgagttgaaatgaattttgtatgcattttataaattttgtgcgtgctttctgtgtgatttaacttggataaattttagaggctaaatttgtactgtgagtgcaagtttttattccataacatcaaagttcccaatttggtgagttcacagaaatttgaatcatcttaaaatgagctatatttaattttatatggatttttacaagttttagttactgttcttttataatttcagattttgtttccaaggggtgcactgtcagtctcaggccaatatgcaaaaaggctcctatagtttcaggaaatcaacccgcagtcctatgactgttctgtgtgtcttgagcttttgcataaagagccctatattaacctaaattcttgtgacgaggtccctggttcgagctgaagcagatcaagccatggctgagctcgatctcaagcttgccagcggcaaacggtggctcgtttgagggtgcgaccaaaagacaaaatgaagatcatgctattgcgattccattcctcttcttttcttggtcagtggacatcggagtaacgccggcggcgagtccgagcggcggctgtgcttaggctgctactgcatgttgagttggtgctcaattctaagtgaatgaaatgcatgaatgcaatcctatgggctcaagggtgctcaccgaaccttgaacgaggcgccggaaagtctggacagcggcagcggagaagaagatggtccggcgacggtgtagagctccgggaagacggcaacggctcgatccactcatcgaattgacatgcatgtgttttcatggggttagtgaggtcccagggatggtgtatacgcgaagaatcggacaatggctcaccggaggaggcggaatcgacaatggcgacggcgaccggaggtggagaagacggtggacgatctccacactcgtagcaccattcttgaagattcttgaggggaaatggagaggaggttgaggtgaagctggtggcgtggtggctcgctccggcttgatctagattgatggcaacggcgacgatgttgctgcggcggtgcgcagagcgcgctccagagctccggtgtgcatggcagcgttcccgccgattggctgcaccagagaggatgaaatcaaaaggagaaatattcggcatggtgaggagagtatggaacgcaagagaagaggaaacgaccgcggctcatcaacgattgcggccatcgtcttcttcgcagccggtgatggagaaccagtggagaagagcagcgaggatgctctccctcgtatggatcggcactggaatggtgggtgaagagtggcgacgcgtctgggagaggcagaaatggagctcggcgtttttagggcgtcgacacgtcgtggccacgcgtcgtgcggcgtccagagccggtcggcgctcgatctctccctctcagtgtttctcggtcggctagggaagttgcacagagaaagggcaagccggagggactgacaaggggggcccaggtcgaagtaaactaggtggaagaagatgtgtaggcagaaacatgggtgagcttggtttttg

SEQ ID NO: 28909 - DNA, 5390 bp, Oryza sativa
agagaagataaattctgaaaaaattatttttattaatgataaatgacctagtatttgaataaattattttacttatacacttctatgcagttaaatgcacttttagataaagtatggttttagccgattaagaactacagttaatctagtttttattagtttgactgatttatttgaggtgcaaatttagttattaaatcataccaaaattacagtgagttgtatgtgttgagtagagcctacatgaattttcccatgattttatcttgcacgaattattttagataattctcaagatttatgtcttatatgtgtttccctttcctaaatgcatgtaaatgtttataaaagttatatttggactctcattaacctgaggtgataatgatatgttagaatttcagtttaccttacacaggtcataagctccttacctattatgcacaagtttactttagtattaaattaagagaatgcttatagagatgattaagatagaatatatcctatatgatataatttatttggtcacttccatgttcatgactagtcttcagatggatgaccaaaatagttttgtggggcttggcattggccttgttgatatattttaaggtgtatggttcctattttaacttcctctagctagcactaggccctaatggttcagttgtttatctagatcttagttaatattcatgagacctattatgatatgcaaatcgaaaatccgaatgcaatccaaatccaaatgcatatgaaggactcaagtcaaacatgtctatgagagtatgcatgcttacacataaatttatatttttgtcctaggttagagatgcaaaggtttttaatttgttctaaaattttatcatgcaagagttagatcaacttcacctaggtttaaaatggaaatttttggtttacaaaatagaagaacttccctttcaactagttttgatggaaattccttaatcctagaattcaggtatgttacagtattccgggaatcatcaaattcctatccatccggaggaccaaagtaagactacgttcacaagtccgtacggtacctatgcttattgtaggatgtccttcggactatgcaacactcttgcatcttttcaaaggtgtatgatgtctattttctcggacatgatcgaggacattatggaggtcttcatggatgacttctctgtctatggaaagaccttcggtcattgtctgcagaatttagacaaagtcttacaacgatgccaagagaaggacctggtactcaattgggaaaagtaacatttcatggttctgtgaagggattgttcttggtcatcgagtgtcccaatgaggaatcgaagttgatcatgctaaaattaacttaatagttcagcttcctcctcctgtgaacatcaaggggatccgcagtttcttgggacatgccggcttttatagaaagttagtggaaatggaaggttcgggttgtgtctcgattgttgaaggtttctctatcttggacacggatgcctctggatagggctaatcagattgtgtcatgaaggaagtattttctagaatgcgatctagaattacttttccttccgacggtgttttgtgcatgaatgatcctccgacggttatgtccagatagaatgccgattccttatccagactcgtatgaaaatgttgcaaaagcacatactcaggaaaggaaaaggttggtccggactgcactaaatcagtgaatatggaccaggctgcaccgatcgattcgtttttgatctgctggaaactgaggatctctactcgaagggcaatgatacgagtaactgggaagaaggcaaggcagaatcggtcacgcaaatatacaccaacacttgtggattatgtgagattaaacacctattactatgttcgatgttttattatctagactttatgcagatgttggcgatatagaatcagcatttaataaccgccaacatggacgtccaggattgctccataatgacagttggagggcgtttaggacatttcccatacaataaccgtcatctgaagcctataaatagagctcctctccctcattccaacacacaccaagatgtagagctgaattacaagaggctctaagtatactttagcttctttatatgttctatagtatacttagaatagggagagagtaaagtaaaagaagtcggaggactcccggagttgtcggtaatccactccttattcttgtacttttttaattactttggttcaatagaaatatcattctgagtaattaagattttcttagtgagaattattctttgttagttcctaataagcatatgtgatcattgttcactatagtccattaattatatatttattgctttagtgtttagctagcacaagagtagttattaattgcgtagacgtgttgtctgggcaattgatttccagtggttgctgcgtatcccacggtacgttagaggttggtgtagaggtggtgacagcgcataagagcacttaagtcctccctgtccaggtacgtagtcgagcgacatctgggaatagcgggttgctagtgcctgaagtatcgtgttaggattaaaattaagctttacttagacactgtttctcactaggaaatcttctctacctttatccatatttatcttgtgtcattgatgaaccggaggaagagataatcacacatgtttccttggattcgatacccttgaaatactccataggggaagtgctacatcggtatatccgtgcgcttgcggattctatctgtgatcgtaagaaacaccaacaagcatttctggcgcctgtccatatttttctattcttctacgttcaccctgctctatccgaagaagtttcctggaatacacttcttcctcttctatggagcaacctatctttgaattatctgctcatagggatgaattttatgagtgtcacgaccggaattaacccaacgggcgttccttacgtgtgtgtattattccttgtgctaggaggcaaggtacaccaaaagttgatacatttcagagtttatccagcggaagcataaatagttaatttattacatgggcggcgaaggcccagcacacacaaagacaaacgggaaacagcggaagactagggcgacgaccacaggcgcttgacggcaggcacgagctagacaccaaagccttcatcttccaggggctcctcttctgggtttgggaaaaattgagcaagactgagtacaaccaccgtactcaacaagacacacctacaagtgcaggttaaatgcaagggagtacaagggggttataatataaagggttagggtttgcagtaaacagcattaaaagacacttagttgctcaaagctattttgtaaacacgattccagagctatacaatattattaaccaaggccgtgaacccacacgaacctgccttaacccaaggcctacaatgattcagaccgaactggcaacccgaccctgggtcccagcttgtcccaagccaacccaggacaaccattccacattttagttgttaagcaggttttaagaattaaaacactaacttcggtacattgctcggcttgcccataaccgagggcgcggctattcgaatagattatactctaatcagaggtgtacatctttacccacaagacacatcttcctcacgtgtaaccacgtgccacataccaccacggtatacggacggaagacgtgacatagtttccaacccatcctagccatagacaagagtaccgacccaaccccacctacggccggaacccacgggacaggtaggcaggactgagcccctagcagcaggacaccggccctgtgccatgacatctcgactaccgggccgcagctcgtgtagccttcatttgtcctagagatgtccatcgacccccgacttcgtccatctcaatccgtgtactattgtttataaccagactgagccacaaactaagccttacccactagacatgtggaagtacggtagtgctttgcaacagaggcccgaagaccggtccttatatggccgaggtgctactatcaaaaccatgcaccccgagcccaggctaaaaccattttgaggattttgaatagagggggaggtgtgaatccaattccacaataatccaaccattccatagtgtccaggtgatatgaatatcctaaagtctagagttgtaaaaccacctaatgttgcctaattaaccagcgaagcatctacctaaaatcatactagtggtaccatgagtagagtgtgcactagttggggttttgtttattctagggtgaacaaggaaataataacaataacaataataagatcataacaaaggtaaataggcatggctatataaaacagtgataacgcgggaatttaaataaagcgataatgcaataatttaaatcaacataattttataaactgggtgtcacgtcccaaaacgactctaaaatacatcctctaaattatgcctagaatcattaaaatccgtgggaaagcctccaacaaataaaaggtgcaaagttaaaagtcaaataaggcttggaggatttttgtatatttcctaaaagcgtaaaatgcgtaaataaattttggtggaattttcagagcacaaataataattattaagaaataaacaaagttaaaatggttttataaaaagaaaagctctaaaaagtccttttttccctcctctaccccttgggccggctcggcccatctccttccccctccctctcctctcctcgcggcccattcggcctcctctccttgctgacgggtagggcccacccgtcatccccttcctcccgccgctcccgccgccccgcccacgccctagcgccgccgccgccgcgaatcccgccgcccccgtgtcacgcccagaaatttagcccaaatttccagactattttgtgtattaaatccctgtccaggaccagccagggtacacaaaacgacaagtaataaacagttccaaacgtaaataaacggaaaatacttacagaagaggcacttagtcctcacaccgaaacaaaagcagcagcagcggaaaaaggcgaacctagcggggcttcagctccactccacaggcaaaactcaactggggtctgagccttggtcctctaactccatcttcagctcagaagcactacacttctgaaaaagggggaataatagcaaggctgagtacaaccaccgtactcagcaagccacaccaacgatgcagacgtgcaaggggatacaaggaggggtttgaggctatttgcataaaggcagttgtaaaacattttattgagcaaaacagtaaaactgttgagtaattaaagtaataatgaatctccactgatcaacgctacaccacgttg

SEQ ID NO: 28910 - DNA, 2432 bp, Oryza sativa
ccgttgcccacgctggcttgtggtaagtacgataagttcttccagggcatcccgcgaaccggtcgttaattgccatgggtgcgactagcaaaaccatgcacccacagcccaccattcagttgcattttagttggataattacgaccatgaagcatggccagatgtctcgagcacgcagctcactctgatactaaaaaggtctaataaagtaattatcccatcaactgagctagtggtaattaagcatggctaagcatatagttctagctaagtcacataagtaacacgagctagtcgatttattacccaatgttgacaaaggatagatatcaagtaaacatggcacaagcgagcagataggtaaaccctgatcccgtgtaattagcaaaatatgcatatttatttgtaaacagtaaaacatttgtaaattaggatcaaaatgctcaaggggaatgtgtgacttgccttgcttcttcactttgatcttccgaactcttttccttgcgaccgcggacttccgaaacgacggaaactacacgctggcacgcaaaacgaggaaaatctctaataaaaaccaaggaaacagtacataaaaactaaacaaacatgtagagctcaattttagatgaattttgcaagttgaatggctcaatttggagttcgaatgaattagatatgaattttagaagttttgagccatttaaatgaatttctagaattattaacgaattatgacgcaattattatttatttttccaaaggaaaagagggttgctgacgtcatcaaaggggaggggcggcgccggcaagcgggccccaccggtcagcgggacaagggcgccggtccaccgtggaccgggaccaccaaggcggtccaccgccggtccacgggaaccgatggcccggatcggcccaaaccgatcgagcggccaggggcggcgcggctggggcacagcacggcacaaagccagctggccaaacgacggcgcgcggcggcgcggccacccgcggcgacggccggcgacagcgcggggaggagaggagggatgctcaccaagggcggcgacggcgagactacaacgaggaagccggcggcgggctcctcggggaggcaacggtggtccggtggcgtaccacgggcgcgaggcggcggacggtgaccgggacgaccggggcgcggagagggcgatttcagtggttcccggaggcgaggaagcggtggccggggtgcggctcggagttgccgatccgagggaggaaacggcgcagtccggcgtcgaccggggaggcgaggcgacacagatggagatgacaaacacggcggcgatctcgggttggtggtgaagttggtgctcgggcggcgagaggcgacaaccgagcggcggccgagcttgactttgaggcggcgaaggtactggcagtggtggcgcattggggcgacggctagggcggcggtggtgcacggctagaggcggtgaaaggggcggcggcctcgggtgtgcggtgggagtggtgctcgagcggtggagagggggaaataagaggcggccggacttccccttgcggtggcgaagctggcggtggcggcggctcggcgcagcgacggctgtggcggcgggaaacggcgaccggagttcgccggagtgtggcagcgcgtgggtgcggcgtggggagagcgagggagagtatgccgggctcgggaaaaatggggaaacggacgaggggagcacggggatgctttttatgggctcgggaaggcgggatcgaggccggacgtggcggaatcggccggcgaagtggggcgccgatgtggggtggtggaggggttaaccggcgccgattttcgcggggagagtgggggaaatggtggaggacgtggagaggatcgttcccacgtcgttggatgcgagcttcggtgcggaagggcgccggattttgcggcgatgtggacggcaatggcggttggggtcggccggcgagaggtagaagaaggagctgacgggtggggtccacgggtcccacctgtcggggagagagggagggagggaccggctgggaaggtaaagcagacttgagggagagagagacccgagcgggccgagggagaaggccagcccgagagggagagaaaagggcgcgcgggccgagggagggaaggaatacttgggccgaaaatggcccaaagagaggaagggggattttaattgttttctttttattttaattgatgcaatgatctttgtgctattaaaactatttctcgagctccgaaaattcacggaaaattccggagagtacattagggcacaaagaatattacaaaatattcccggccaatgatttttaaaggaaatttttaattccctcaataattcacttgattgagttgatttaactttaatttaatttctagaaaatgtattattaattga

SEQ ID NO: 28911 - DNA, 3197 bp, Oryza sativa
  unsure (1)..(3197): unsure at all n locations
ggcccacctgtcgggcccgtctccctcctcccgccgatctcgcgctcgcgccgccgcgccgaaaccatttttttgcccacgtncccgccttccccgggccacgtcgaccacgcccgcgcgtgcgccgcgtctccagcgcccactcccctctatctcccactcgcgcccgcgcccgagatggccgggattcgaaaatcgaatcccgcctctctctcttccccattcccccacgtcggccggcgatttccgcctctcccggccacgtccggttctctcttcccctttttaagcaccgccgtcgccccctctcactttttccccatttcgccgcactctctcgagcctcccatcgcccccgcgtcgtgcaacctccgcagccgccattttccgcttctccggccgccgctagccgccgttagggtcgccgccaggccgcgccgtcaccgccgtcggattcgcgtggccgagatccaccccgtccacctctcctccgtcaaggttcgtcgccggagccctcatcccctcgcgcacgggtgagcaccacctctaccgctgccttcggccatggtttccggtcgccgtggttcatctccctctctctaatccctctctcctccttccttagggcaccccgaagctcgtccgctcgccgacgtcgtcctcccgtggcttgccgtcgccgttcgccatcgtcttcctccgcgccggccaccctcggtgaggcacccctcccttcttttccccttcctctcctcttagtgtcgcgcgccgtcgccttcgactgccgccgccgcctcccgtgctgccggtcgccgccgtcgttggccgcatgccgtcgccgctagacctagccggccggtcggttttgatgccgagccgagccggcggccgcctttatcgccgcccgttccctccccttcctagccgccgttagcgcagccgcctccgcatcgcctttgcgccgtcgccttcgccgccggttgtcgtcgccggcaacgcgttcgcgcgcgcgccgtcgccgtcgccgcggtcggtcggccggccgtgagccaagccgagccggtgccgctgccccttctctcccgcgccgctgaccagtgggtcccgcgtgtcggcgcccttcctccctctcccgagtcgctgaccggtgggccccgcatgtcggcgccgcgcccccgtgctgacgtcagtcctggttaatattgcgcaataaattatttaaggatttttgttatagtaataaacacagtgaatcttctaaaattcataactaattcatccgagctccgtttaatcccattcaagtctcagtaaatcaagaaaaatgtgtagaatccattaaaaatggttttgttccctgtttcagtagtcttatagcctgtttgcaatgtttgccttgtatgtcgctagattccggctcttccgacgctccggtgtacttcgagatagtcgccgaggtccctccagcagcagagcaaggcaagtcatgcttgtcacttgatcatattgatcctatattgcaaatgtcctaatgttttctttcaaatatcgcatttgttttgcaatattactatgggatggttacctattgttacagccatgctaatttgataccatgctcctttgttagcttgggttataacatgattagagttaggactagggtttgcttagccatgcttagttcaactagcacacaatggggagatctcatttaaaacctagactataggtttatatgataatgttggactagtgacaccgcttgggtgttggttaattaaaatgaatcacatggtgggctgtgggtgcatggttttgctggtcgcacccatggcagttaaggaccggtttgcgggatgccctggaagaacttatcgtacttaccacaagccagcgtgggcaacggctgggcttgtagtgtagctttcctctagccgacgcatccaggcaagggtgggcgtgatggagtttggatgggccctgcgacggcctatgcggcttccggattcacctaggcacgagaggggactgcccgctgccttgcgaggagtgggggtgaaacctgaggtgtggtgtgcttggttagagggggttatgcgaatggtcctgtcacggcctctttccgggatgtcgtggtggcatgtcggcgcacggaaacgtgtcgtggggctgtgtcttgtgggtacatttgtacacctctgatcagagtaaaactattcgaatagccgtgcccgcggttatgggcagtcaaccagattcaccgtaattagtctcaccctagtgtaatcttttgaatttggatagtttaggtggatggttgggcctgtcgcaacgtggtgtagcgttggacagtggatgattaatactgcttaattattacaactgttttcgcattcaattcctgtttataaatgccagtatttatgcaaatgaacctgcttagctatcccttgtggaatccctgcatcatacccccgttccggtatgacttgctgagtacagtgggtagtactcagccttgctctattttccccaatcccagagctcgagtatgtgtccgatggcgggttctccgaggagtaggctttgtccgtgccgtcgaggatgcctgtggagtggtgttcccgctgcagttcgagtcaaggattagctccagttatcttttgttttccgctgcatttttgtaagacttttatgatgtttgtaagacgtggatctgaatgtcaacattgttgtttgtgtaccccggctggtcctggacggggattttaatgcacattctgcttggaattctattcgggaatttctgggcgtgacaagttggtatcagagccgaccttgaccgtaggacaagccaaatggaaaaacctaagagccctctgaatccttttcattgcatatgttctttgcaattggattttattccgggaaaattgggatctgtttttgtggttcaagggaaaaaatcttggtcgctcgttaagtgagttttttcaaaacgggtcagtctagggttttagtaaaactattgggatttattcgtcagtcagttggggtttgatgggtgaaatgcattaggtcctagctcaggaacatgggttgcaaggtatttatgctttatttggtattattagtatatatctaatttctcattattttatcgttatgtgggtctgtcttgtttattcgctctc

SEQ ID NO: 28912 - DNA, 5639 bp, Oryza sativa
tggcgagaacgacaccacctttggtcacatgtgtgctgtgatgaggggattggacaggatgcactcggacctgcacaaggcgaccaaggccttgaacgatgggaagctcatgaggatcgttgctctgaaggacgagatagcgcgcctgaagaaggagaacgctcagctaaagggtcttccagcgccaggaggagtccggatccgcactacgccccgcaagactacgacggcacccgtgcgcatccagcttgcgcccaggaacccacctccagcagcaactcccgcagcacctccagttccgcccgcagttcctgcagctccagctccagctcccgagtccgctctctccttcgctccagcatcagccgccagaggtccagccagtggcaccggaggttggttgtctgctactcccagtggcagcggcgagacgtatctgccaggctccaggagtcgctcagagggacttggtgacgagcaggaggacgccttcgactccaccgaccgcaggagccgttccgagcattaggctcgtttttcccattagtttatcgactgtctagcttctgcttgttagttggtgtgtttaggttgcttgtttggggtcagtcgacggtcgatatcatgtgcctatgatatggctgtcttaataaggatttttgcttgctctttaagtgttttaattcagatcagaacaattgcagttttaattcctttgtaataaagcttagtttctgagcatctgtttttcttctttcccccccgtctgcttttccctccagatggtctacaccaggactggtagccgcgcaacaggcgagggcagcaacggcgaagaacgcgctaatggtgtgcaccccagcagtgattccggcaatggtccgccaccacttcctgagaatccgacgctagcccaagttatggcacatcagactcagatgatggcagccatgatgcagcagatgcagcagcagcaccagcagatgcaccagaggatgatgcagcacgccgaacagcagcaccagcagtttggtccccctccccctcagtccaagttgcctgagttcctacgtgtcaggccacccaccttctccagcaccaccaaccctatggaggcaaatgactggctccatgcgatagagaagaagctgaacctcctgcagtgcaatgatcaggagaaggtcgctttcgccacacaccagcttcagggtcctgcgtcagcctggtgggacaatcacatggccacccgcccaccgggtactgaagtcacttgggtagagttctgccgtagcttcaggaaggcacaggtgccagatggggtcatggcacaaaagaagagggaatttcgtgcactccatcagggcaacaggactgtgacagagtacctccacgagttcaatcgcctcgcgcgatatgcaacagagaatgtccgcaccgacgccgagaagcaggaaaagttcatggcgggtttggatgatgagctgaccaaccaactgatatccggggactacgctgactttgagtggctggttgacaaggcaatccgccaggaggatcaacgcaacaagatggacaggaagaggaaggccgctcagttcagggcacctcagggaagtcaccagaggccgcgcttcactcccggacagcagggtggacctaccaccatgatcgtccgtcagcaccgcccgttcaactccagcaacttccaccagggctctagtggcagtcagaaccaccatggaggtcagcccaaccgcggtgcagctccacgcccacccatggcaccggcacagtcaggcccgcccgcgcaagccaagaaggagacgggagcaaaaccagggtcctgcttcaactgtggtgagcttggccacttcgctgacaaatgcccgaagcccaggcgtgccgggccaaggtttatccaggctcgtgtcaaccacgcgtctgcagaggaggcacaaacagcaccggaggtcgtactaggtacgttccctgttaactcaatccctgcaacagtactttttgattctggtgcaacgcattctttcatttcaaagaaatttgtggggatgtatgggttaaggaaagaagagcttagcacaccaatgagggttcataccccggggaatagttcaacctcagtcagttttagcccttcagtgctaatagaaattcaaagattaccatttctagccaacctcattcttcttgaatccaaatacctagatgtcattcttgggatggattggctgactaagttcaagggagtcatcgattgtgcgaatcgcacagtcaccttgaccaacgagaagggagaaacggtagtgtacaaatcactagccccgccaaagcaaggggtctccttgaaccagatcgagatggaagtcccagtggtcaccgaggagaagaatttgaagaaattggaagacatacccatagtctccgagtatccagaagtgttccctgaagacctcactaccataccacccaagagggagattgaattccggattgacttggcaccgggaaccgctcccatttacaagagaccgtacagaatggcggccaacgaattagccgaggtcaagaagcaggttgatgagcagctgcagaaagggtacatccgaccaagtacttcaccttggggtgctccggtcatttttgtggagaaaaaggataagacgaagagaatgtgcgttgattatcgcgcactcaacgaggtcaccatcaagaacaaataccctttgccgcgaatcgatgatttgtttgatcaactgaaaggagctaaagtgttttctaagatagacctgtgatcaggctaccaccagttgagaatccgggaagaggatattccgaagacggccttcaccactcggtacgggctatatgagtgcacggttatgtctttcggacttaccaacgcacccgcattcttcatgaatctgatgaacaaagtgttcatggaatttctggacaagtttgttgtggtgttcatcgacgacattcttatctattcaaagtccgaggaggaacatgaacaacatctccgtctagtactcgagaagttgaaggagcaccagctatacgccaagttcaacaagtgtgacttctggttgacggaagtaaaatttctgggtcatgtcattacagctcagggtgtggcagtcgacccatcgaacgtggagtcagttaccaaatggaccccacctaagaccgtgtcgcagattcggagttttcttggacttgcgggttattaccgccgattcatcgaaaatttctccagaatcgcccgacccatgactcagttgcttaagaaagatgagaagtttaaatggacagctgagtgcgataagagtttcgaggagctcaagaagaaattagtatccgcaccagttttgattctgcccgacccgacgaaagacttccaagtctattgtgatgcatcccgtcacggacttggatgtgtcctaatgcaagagggcagagtggttgcgtatgcctcgcggcagttgcgtccacacgaaggaaattatccaacgcatgacttggaattggcagcagtggttcatgctttgaagatctggaggcactatctgattggcaaccgctgcgaaatatatacggaccataagagtctgaaatacatcttcacccaaccggacctaaatctccggcaacgaagatggttggaactaatcaaagactatgacatgagtattcactaccacccgggtaaagccaatgtggtggcagacgctttaagccggaaaagttactgcactgccctatgcatcgagggcatgtgtgaggaattgcggcaggagtttgggcatctcaacgtgggaattgttgaacacaggttcgtagccgctctggaggcacggcctacgctcgtggatcaagttagagccgctcaagtaaatgatccggaaatagcagagctgaaaaagaacatgagagtcggaaaggctcgggatttccttgaggatgagcatggcacgatctggatggtagaaagattgtgtgtacctgacgacaaggaattgaaggatctgatactcaccgaggctcatcagacccagtactccattcacccaggcagcactaaaatgtatcaagacctcaaagaaaagttttggtgggtcagcatgaggagagaaatagctgaattcgtcgcactctgcgatgtttgccaacgagtgaaggcagagcaccaaagaccagcaggtttactccaacctcttcaaatcccggaatggaaatgagaggagattggaatggactttataacaggactgccccggacatcatcgggtcatgattcaatctgggtagtcgtggatcgactcaccaaggtggctcactttataccagtgcataccacctatacggaaagagattggcagaattgtacctcgcaaggatcatgtgtttgcatggggtacccaagaagatagtatccgaccgaggtagtcagttcacctcaaaattttggcagaagctacaggaagaattggggacccgtttaaatttcagcacggcctatcacccgcaaactgatggtcagaccgagcgagtcaatttaatcttggaagatatgttgagagcttgcgctcttgattttggtggagcttgggacaaaagcttgccatatgcggaattctcgtacaacaacagctaccaggccagtctacagatggcaccgtttgaagctttatacggtcggaagctttatacagccatatgcgctttattctgggatcagacaggcgaacgtcaactgttcggaacagaggtattagcggaagtagaagagaaagtcagaatcatcagggaaaggttgagaattgctcagtctcgacagaagagctacgcggataaccgtcgaagggagctcacttttgaggaaggagattacgtgtatcttcgtgtcactccgctccggggagtacaccatttccagacaaaaggcaagttggcaccacgcttcgtgggaccatacaaaattttggaacgaaggggagaagttgcttatcagctagaacttccatcaaacatgatcggcatccatgacgtgttccatgtgtcccaattaaagaagtgcttaagggtacctgaagaacaggttgattcggagcacattgatatccaagaggacctaacctatgtggagaagccggttcgtatacttgataccagcgaaagaagaaccagaaataaggtcaccaggttttgccgagttcagtggaatcatcattcagaagaggaagcaacctgggaaagggaagatgagttgaaagccgcccatccgcacctcttcaccagctcctccgaatctcggggccgagattccgtttaaggggggtaggtttgtcacaccccgaagtttccctcccaagccaaaattgtaatttataaatgaccctaagaaaataccggtgcaaatcaggagaaaaccctaagaaagtaatgcaaataataatcggatttgacatgtgggactttttcttgagttctacaggtcgaaattcattaacaggatttttagtggaattttcagagctctagaaataattttaaccaattaaaattgagcaagcaatattttaattccagggaaaatcctttttcctttttctttt

SEQ ID NO: 28913 - DNA, 5419 bp, Oryza sativa
aaaagaagaaagattttttcctgggatttaaaattgcactttggtgatttttaattggttaaaattatttccaaggctctgaaaattccactaaaaatcttgttaatgcattggagcatggggaactcaagaaaaattccaccacgctatttccgattattaattgcatttattaactggggattcagctctaggttaattaagataatttcttcaggcaatttatttaaccaattttttttaaagcaagaaaatggggggaaacttcagggtgtgacaaacctacccccttaaacggaatctcgaccccgagattcggaagagctggcgaagaggtgcgggtgggtggccttcaactcatcttctctttcccaagtggcctcttcttctgagtgatgactccactgaaccttgcagaatctgattactttgtttctggtccttctctcactggttttgaggatacgagtcggcttctccacatacgtcagatcttcctgaatttcgatgtgatccgtacttgcctgttcctcaggaactctcaaacatttcttcaactgagagacgtggaacacgttgtcgatgccaagcatgttggagggaagctcaagctggtaagcaacttcacctctacgttccaagatcctgtatggtcccacagagcgtggtgccaactttcctttggtttggaagcgatgtaatcccctgagcggagtgacacggagatacacataatcccctgtttcgaaagcgagctcccttcggcggttgtctgcatagcttttctgccgagattgcgcgattctcaatctttccctgacagctctgactttctcttctgcctcatttaaaacttctgtaccaaacaactggcgttcccctgtctgatcccagaagagcggagtacgacaccttcgtccatacagtgcttcaaacggtgccatctgcagactagcttggtaactgttgttgtacgagaactcagcatacggcaagcttttgtcccatgctccaccaaagtcaagcgcacaggctctcaacatatcctctagtatttgattgactcgctcggtctggccatctgtttgtggatggtaagcagtgctgaaattcaaccgggttcccaattcttcttgtaatttctgccagaactttgaagtgaattggcttccttgatcagacacgatcttcttaggtacaccatgtaaacacataattcttgccagatagagttctgctaatttcttccctgagtaggtagtgtgcaccggaatgaagtgagccactttggtgagtcggtcaacgactacccaaatagaatcatgccccgatgacgtcctgggcaaaccggtgatgaaatccattccgatttcttcccacttccattctggaatctgaagtagctgtagcaaacctgctggcctttggtgttctgcctttactcgttgacagacgtcacagagtgctacgaattcagctatttcccttctcatcctgacccaccagaacttctctttgaggtcttggtacatcttagtactaccgggatgaatggaatactgagtttgatgagcctcggttagtatcaggtcttttaattccttgttttcgggtacacacaatctttctcccatccagattgttccttgttcatcctcaacaaaacctcgggcttttccaactctcatgttctttttgagctctgctatttcaggatcacttgcttgagctatgcgaacctgctccaccagtgtgggttgtgcctctagggcaaccacgaatccgtgctcaactataccaaggttcagatgttccaaatcgcgttgaacctcacaacatagttgctctacccatgcaacattgcagtagctcttcctgctcaaggcatctgcaaccacattagccttgccgggatgataatgtattcccatatcataatccttgatcagctccaaccatcttcgctgtctgagattcaaatcaggttgagtgaagatgtactttagacttttgtgatctgtatatacctcacaacggttaccgatgagatagtgccgccaaatctttaaagcatgaacaactgcggccaattccagatcatgcgtcgggtagttgccttcatgaggacgcaactgccatgaagcataagaaaccactttgccatcctgcatcaacacacatcctagcccctggtgagatgcatcacaatagacctggaaatcttttgtctgatcaggcaggattaagactggtgcagacaccaactgtcgtttgagttcttcaaaactcctattgcattcagcagaccagataaacttttcttccttcttcaatagctgtgtcattggcttagcaattttagagaagttctcaacgaaccggcggtaatagcccgcaagtcctaagaaactccgaacctgagtgactgtccttggtggggtccatttggtaactgactccacatttgctggatccacagctactccttgagcattcacgatgtggccgagaaactgaacttccttaagccagaagtcgcacttgctgaacttggcatatagttggtgcgcttttaacttttcaagtaccagccggagatgctgctcatgttcttcctcggacttggagtagataagtatgtcatcgatgaaaaccacgacaaacttgtctagaaattccataaacaccttgttcatcaaattcatgaagaaggcaggtgcattagtgagtccgaaagacataactgtgcattcgaacaacccgtaccgagtgatgaatgctgtctttggaatatcctcttcgcggatcctcaactagtgatagcctgatcgcaggtctatcttagagaacacagtagctcctttcaactgatcaaacagatcatcaatccttggcaaaggatacttgttcttgatggtgacctcattgagtgcgcggtagtcaacacacatcctcttagttttgtctttcttctccacaaagataaccggagcaccccaaggcgacgtgctcgggtggatgtatcccttctgtaactgttcatcgacttgcttcttgacttccgccaactcgttggctcccattctgtaaggcctcttgtggatcggtgcagttccaggtaccaagtcaatccggaactcgatatccctttttggtggcattgttgtcagatcgtccagaaaaacctctggatactctctgactatgggaatatcctccagcttcttagtggttttctccactgctacctcttgttcttcaccaacagcctggtttaaactgatccctggcttctgcggcactggagactggaaggttaccacctctccttttgcattggtcaactcgatggtgcggctggcgcaatcaatcactcctctgtgccttgtcaaccaatccattccaagtatgacatctaggtccttggattcgagaagaatgaggttggctggaaaaatcaacccttgaatttcaactgtcacagatgggcagtagtgagttgtggtcatgccacctccaggagtatgaactcgcattggtatcttaagcttcactaaagataacccatgtgcaccagcaaaacgcttggaaatgaaggaatgggttgcaccagaatcaaacaatattactgccggtgtcgagttgacggggaatgtgcccaatataacctctggtgctgactgcgcctcctttgcagatgcatgattgacacgggcctgaacgaacttgggtccagcacgtcttggcttctggcactttccaaccgtgtgtccgggtttgttacaattgaagcagagttcgggtttttctcccaacctcttgggctgttctggcagagctagctgaactgattgggctggaatctttagtgaactcggagtagggttgaggctgtgctgctcactgttgttgtgactgccactatggtggttcttgttgaagctacccgggtggtaggggcggtgtcccatcgtgaaacgaggcttctgacttttcccctggggagtcctgaactgagctgccttcctcttacggtttattttgttactgtgctcctcctgacggatagccttatccaccagcttctcaaagtcctcataatctctagagatcaactggttagtcaattcatcatcaagaccagacagaaacttctcctgcctcccgtcatcggtacgcacgtcctcaggggcgtagcgcgcgaggtggttgaactcatgcaaatactctataactgttctggttccttgttgcagggaacggaactctctcttcttttgtgccacaattccctcgggaacctgtgctttattgaaactatgacaaaactctgtccaagtaacttctgccccagctggacgggtcaccatgtagttgtcccactaaacagaagcgggaccttgcagctggtgtgtagcaaaagcaaccttctcttgctcgttgcattgcaaaagattcagcttcttctcaatggcatgaagccagtcgtgggcctcgattgggttggtggtgcttgagaaagtgggcggcttgacctgaagaaattctaacagtttggactgaggaggtggaggaccaaactgcaggttctgctgctgctgctgtgcttgctgctgcacctgctgcaacacctgatggtactgttgctgcatctgttgcatcatcattgtcatcatctgagtctgattgtccaacacctgagcaattgttgggttcttgggcagtggggacggactgttgtcagatgcactgttggcacgtgctccattgaccggctcttcgctgccactaacgttgttggagtcgcgtgaaccattccttgtctccatctgaaggggataggtagaaatatgagaaaaggaagaaaaacagggggctcagaaactaatcttgcttatgaatttaagtgcaattatcttaatcttgattaaaacactgaaaaagaggcacgcaactcctaattgaggcagtcataccactgacacatgatatcgaccgccgactaacccacaagcaacaaacctaaacacgaaaactagcaagcaaacagactaagaaggcgataaagctaagggcagcgactctgaagctcggggcggcgcttgcaaacgagggataggactgacatctaaagtagacaagggataggaaccaattcatgctcaaatccaaattaagcaaagcaaaagaagactcaaataaataaccgagcatgatgatttttatgcatagaacaacatttttcacgaaccgagacaaaagacactaatgcaactgactaaacaataacttaatgcacgaaatagatgcatagtcatactgatacgcataaacttaccctaccgaacatagacacgacctaatgcatatcacccgacaattcccgaccgactgccgactaaattctgaataaactttt

SEQ ID NO: 28914 - DNA, 13099 bp, Oryza sativa
tcatcttcatccggatccaatacaatagttgatcccatcggtgtagaaattgacttgcaatccgccatcttgaagcgccttaaaagatccttggtgtacttcatttgatgcacaaacgtaccttgctttatttgcttgatttgaagtcccaaaaagtaagtcaactctcccatcatactcatttaaaattccctgcgcatagtctcagcaaactccacaaccaaagggtgagatgaacaaccaaagatgatatcatccacataaatctgaacaaaaagttgatcatcaccatgcttaagaacaaagagagttttatctacttttcccattgtaaaacctttatcaagcaaaaaatttttcaatctatcataccatgcccttggagcttgtttcaaaccatacaaagcttttgacaaacgaaaaacattgttgggaaaatcagaattttcaaaaccgggtgattgttttacataaacttcctcctgcatataaccattaagaaaatcacttttcacatccatttgaaacaatttaaaaccttttggagcagaaaaagccaacaaaagtctaattgcttcaattctagaaacatgagcaaaggtttcatcataatccaacccctccatttgagtaaaaccctgagcaacaagcctagccttatttctcacaatcaaaccatcctcattttgtttgtttttgaaaacccatttagttccaatgatattatgaccaataggaggttcaactaaagaccaaactttgtttctttcaaaattctctagttcttcatgcatggcatttgtcacgcccataaattctcgaaccaaaatttctaagctgaatgtgcattaaatccctgtccaggaccagccagggtacataaacgacaattgttgacatacagacccacgtcttacaaaaatataaaagattacaaatgcagcgggaaagataaaagcgagctaaaccgagaagcttgacttcaacagtgggcgactccactccacaggcaatccttgacggcagcgacaaaaccaacctctctgagacggctccaactgagaagaacttcaactctggtgtgggggaaaagagagcaagactgagtactgcccactgtactcagcaagtcataccgaaagaggaggtatgatgcaggatataaccaaagaaagctaggggtttttttgcataaagcaggcatttcaaagcagtagttgaaagcagtaaaacagctgtagtaattaatcaatattaaccaatcactgtccaacgctacaccacgttgcaacaggcccaaccaaccacctgaactacaccagttcattaagctaaactaggggtgagactaatcacggtgaatctggttgatcgcccataaccgcgggcacggctattcgaatagttttactctggccagaggtgtacaactgtacccacaagacacgattccacacatgtcgccatgccccgaagtatcaccatgatactgcaaagggggaaatcgtgacaagaccctccacataaccctcccctaaccatccacaccacgctaaggtttcacccccacccctcaaaaggcagtgggcggtcccctcttgcgccgcggtgaatccggcagctggacaaccggacaccccggccgacccaactccatcacgcccaccctcgccaccggtgcctaggaaagggtcgagctatacttcagaccaagcagttacccactcccgcttgtggtaagcacggtaagtctcccagggtttctcgtgaaccggtccttaactgctatgggtgcgatcagcaaaaccatgcacccacagcccaccattcagtgtattttaattaactaacaccattgcggtggcaccaatctaaagctatgccaatagacaaagtctatgtaataatgtgatccccatttgtgtactagttgaactaagcatggctaagcatttcctaagccaacatctagtcattttgatacccaagttatcaatggcataaggtaaccaatatgtggctgaggaataggacccatcccacattacattgtaaaagaatgcaacatttaatagaaatgcgggatattggtaaattgggtacaatatgatcaaacgtattgcatgacttgccttgctctcgaactgatgagacctcagcaacgtcttcgagaaaccgcggatcgacgaaacggccgaaacctacgcgacaaacaaagcacacaagcaaaacatgctataagactactgaaacaggaaacaaaaccatttttaatggattctttgcatttttcttgatttactgagacttgaatggacttaaacggagctcggatgaattacttatgtattttagaagataaactgtgtttttactaataaagaaaaagtccttaattaattattgcgtgataatacccagggctgacgtcatctaaggggggcggcgccgacaggcggggcccacgggtcagcagctcaaggtggccggtctaccgtggaccgggaccacgcgggtggtccaccgccggtccacgggaccgacggtccggatcggccgggaggccgatcggacggcacggcggcggctaggcacggctcgactcggcttcaaaaccggccggtcggccatggcaactggcggcgacgcgcacggtcaccggcgacggcaatcggcggcgcgggaagcgatggcggacggggtaaaggacggcggcgtcgaccgaaggcgacggcgagcgcgtggagagaggcggcgcaaacgagagagaggggaagagggaggagggggggatcctcaccggcgagtatggcggccggagcggaggatgaaggtggcggcgacgacctggcgatgaggaggggcggacgggcggcggcagcacctacggagggagttgagaaggattaggagtagagggagtgaccacggcggccaccattgttggccggagacgaagtagaatggatagctcaccggtgtgtgaggagaaccgggctccggtggggtttagcggaaaccgagcggcggccgaggtggctcacgcggcggcaatgctattggcggcggcggcttggcgcggcggcggctctagcggctgcggcgcgcgaccggaggtggcggcaagcggcggcgctagtggcgagcggcgcgcgacccgtaggaggcacgggagagcgcggcgaaaaggggaaaagggagacggagatgcggggaagctttatagcggctcgagaggggcggacatggccgggaaaccccccgatttggccagcgacatggggggagagagagagagatagtgggggggggattcaaatcgaatcccgcccatttgcgggcgcgcttgcgggcgggaatggcggggagggcggcgacgtggggacgcggagtgggggcgcggcgtggagcggagaagacggcggcgcggacggtttcggcggcggttgccatcgtggggcgggtggctggaggaaggggacgacctgacaggtgggccccacctgtcagcgtcccggagagaggggaaaggggaacgggccggcccaaaggaaggaggccgagcgcgggagggagtgggccgacggcccaatagagaaaaaagaaggaaaagaaaaagaaaaagaagaaaggatttttcctgggatttaaaattgcactttggtgatttttaattggttaaaattatttccaaggctttgaaaattccactaaaaatcttgttaatgcattggagcatggggaactcaagaaaaattccaccacgctatttccgattattaattgcatttattaactggggattcagctctaggttaattaagataatttcttcgggcaatttatttaaccaattttttttaaagcaagaaaagggggggggaaacttcagggtgtgacagcattgatccacgattcatttgctaaggcatcagtaacatctttgggttcaaaagtagcaacaaatgcagaatttacatgagtatcacgagttgttaccttagaccttgtggtacattctccaatattacctattatctgttctggaggatgtcgtcgttgaatatgaagtggagcaataacatctgatgaaatttcgtgttctgcatcatgatttgacgaactagaaacttctggaggtcctctattatcagcacccaacgaactcggagatgagcgccctggccggtctgaccgctcctctgcctgcggtctgaccggcggtgggtcgacggtctgaccggccatggccccggtctgaccggtcgtcggttcatcgtcttcctcgtcgtcactttcctctacgaaaatatcctccccctgaacctgtgataatgtacctgaaatttcgggtctagctccaggactagcctcatccaaagtgactttgcaagtctcaacaattttgttagtgtctaaaacaagtacacggtaacctcgagaatgtgcagagtaaccaagcataagcccatcggtggaatggggctcaaattgtccaaattttctgatttaacacaaagcacttgcccccaaaaatacgcacatgtgaaatcttaagtgtatgaccaaagcgaagctcataaaaagttttttcaagttttgatgtcaagaaaacacgattggaaatataacaagcagtgttaacagcttcagcctaaaatctcctaggagtatgatactcatcaagcatagtcctagccatttcaaccaaagaacgattctttctttcaacaacaccattttattgaggaacacatggagacgaaaattgatgttcaagtcctttttctttgcaaaaactctcaaaagaagcatttttgaactcaccaccattatcactttaaatagttcttaaagatccagaaaattcaagagccaaatgaagatacaaacttttaaagtgttcaaaaacctcatccttagtagccataaagtaaacccaagaatatcgagagaaatcgtcaacaataaccaacacataccactttcctccaacagattgcactctagctggaccaacagtgtccatatgtaatagctgtctcggtgcatccgtcatcacagaaataataggagtatgtgaagaagcaaccatcttagcatgacgacatggcgaacaaaccaaatcaagatctttcttaagtttaggcaaaccatgaacaagatcagaaccactaagtctagtgagatgatcaaaacctacatgtccaagtctacaatgccaaaacatcacatctttagaaaattttgcaacaagacatgcaatctctgaagaaacacttctttcaaaatcagccttaaaaactgtaccatatcgagaaactgttgatgcgaaaagcacacaccgacctggaagatctgcttaactcctgtgcaggtccaaaatcttgcttttaggttcgtgagcgtgctagttgatttgatcctgcaatcaacaagaaagaaagacaagaaaaccgcgtttaaatccataaacgatagccgatcggctagttgccaatgacatatcatttatcttcgagccgatgtcatattgggatcgattggcagtcatgaatcaataagataagctaaatctactcgatcagctgtagatattaacgacatataatccttccttcgacgtatatttaaactaagtgattaggatagatcggtcgtcatgccgagatagtataaatcacttcagtcgaaagatacactaaagcaatgattatatagacatttatagcatagccgatcagataggtctagcatgtatcggctaatactccgataccactttatactaagatattaaaacaagcaaaatatattaaacaagaagcctgatataccttaatgcgataagatcttaatataaagggcagatctagcatatcaatcaagcatataagacataaagtagctaaatcaggtaagatcggctgaaactccgatactatctctctcaacaatcataaaacaagctagatattataattatggatattactcaatagatcgaacccaaccgatgcagcattaaacataaagataagtataagatctagacaagatgatgaaaatctctaagagatggtagacacacgatataatctagattaataatgaaacataactctatcgactactttctaatagtaagaaccagccgatgacaagttatatagcgcaactaacagagattacaaagcgtatgtgataactcgacgaattacataaacaagattagagtattataaagatggaagcactaatcccaagaacgcaagccgtcatgacaagtttacctctagttgaatatcggaatcgatgcagctcaacccgaaagcaagaactcgtcgaaatagaacgaaagtgaaaagggtggcgatacgccgaaagtgttattgaactgttgttgtaaattacatgggttcgggtgatatttatatgcgagatacatgatatgtccttgccggacacgactcttatctctaacaaactctaagatacacataagtctttgctgcagactcttgcccaaacatatctccaaggaaactattcaaaatatcctaattaatcgatacaattgcctatatgagagcttatctccatcatggcaatccttgtgtagcacgtcgaagcagtttcataactgaccccggcaaaatcgtccttatcgggtgtatcggccatatcgactatcctctatccgatcgatctcagccgatgaaatacccagccgatgccttcgcagccgatgcacactctgttctttgaatctaactctttgccaaatccactatgattccaatgccgaacctggttcatatcttaccaaatttggtcgtcaacacatgccccccaagtccactatattggtaatgttgcggattttctcaatcacctgctctgactataactagggtttcccactccgattctgttttggccgttaccgcgctttcttttaaatagtaaccaccggcgtcagcttccgttttaaccgccctagcaaaaaaactttccccaatctcttcctcgagctcttcagcgacctaaaggcgattccctgcagcgccccctccgttgccaacaatgtcgagctccgccgatccctcgagcgcgccaaccgctgagtatgttgaggtaagtaccatcggctatatcccccttttttccgtactgaatcggttcttccttcgctcaatcttcgattttcctcttctatagcatctctctcatcaagttgcagttcccaacataaccgatgagcattagtttttccttggcccaatcggcaatctagaccccactgagttcataaatggtgaaaccaatcggacaccctttagatttgccaaccccgacttaaccctttggaagaacacctttaaatcttggccatcagctgaaaaaagttgggcagcctggtatataagagtatcggctagcaagctaacccacggggacaaaatcagcatatcccaagctttggccttgactatggcagatatggctaaggatgaacttatgataacagccacaacctacttctggtcttctactatgaacaccttccttttctcccaaggaccaatgacccccactctcttagatgttacaatgataaccagtttggatattacctcatcggctaacccaattagtttgaacacaacatacactaatgagttcaaaatccggagcataggtggttggtcaggttttttcgccaaaaacatgggcactggatcagtaggtccaagggaacatgcaaccctcctcatgatgtggcttgagaaattcttattctgcggctcaagttgtggtcctactgctaactgacaacacatagctgagaatttggtggagaaaaagcaattccctcttggaaaatacctcctgggctatttatatcagactctgaacactgcaataactaaaatagcctcaggacttccaatcggcacaggaggtccctggtggctcctttagatttggctcaacttacataccatgaaggttgctaattggctgcctttacaagatgctaaattcccaaggttcgagccaactattgatgatgatggagaagagatcaccacacgccggtgtatgtcctttagagaagcaacatatatcagcaccgcatccaagctgtcggctgaacctttcagagaatggttccataacttctatgatagatttccaaggaatgccagaatctggtttgcatatgaaggatttggcacctttgaatggccaaatgattttcgctttgatgagatcaactctgaagaatatgagaaatctagagaggtattctcaacagccatcagcacttgcataattcctgtcagcattcatcgaggcaaaaatatccagatatcatatgaattctaccatccgacaagtgccgcaaggcaactaggcatgggccaactgcagattagtttgttctttgccgataagatctagagtaggggagaaataacatcggcactcatgacggatcggctgctgaacattccatgaccacctttaggcaggatgttgaccgatggtggatagagtggaagaaatatttattacatcaatcaccttcaatgtacctgacagatctgtttcctgaagctgtccctcaagtaagaatttttcccctttgtcaattctgtcaattaagccaatgcatcaatcttaacttttaaatctctttctttacagacaacagaatcttctccccccatcgcagtgaaagtggcatagatatccaatatgctccaggactccttcctaataggggtggtctaactcctccagtcatcagctatcatgccccaagacctcaacgttgctacacggtctgccttgtgtgccgatagcccctattgctggcaagaagaaaaggacaaaatcggctgcaagaaagaaacctaataaacaaaaagttgctgcggatgaccagcggcccatagatccagatgtagaggaattcctggaagatgaagtagcagaagtcgtggactatgctgccgacatcgttagcgaaataagggaacaaacacctccaaccgatcctccagctcctcaaagaacaccatcacctccagtacgccctacttacaaaccaagggtatgcatttgttgtcacgcccgaaaattcacttgtatttccgaacttatttgtgcataaaattctcgtccaggaatcagccgaggtacacaaactgacaatttaatatacaaatccatcgtaataataacgttacatacttacaatagaaaagaaaaacagcagcggaattaacggtctagcgatggcttcagctccactcccaaaggcagctcaactagggtataagccaaacgtcttctccttctggatcctttttcttcaactgaggttgattgattattgcaagaatgagcatatgaaatactcaagccacacagcaaatatgcaagtgcacaaggataccaaaggatggcataatataggctcatttgcaaaatcagcatttagcaaatatttaagaatagtaaaacaatagagtaatcatcaattttaatcaacactgaactgcacacccatgctgctcaggcccaaccatcctgaacaaccatccccggctgtacagatctaactccaaaccaggagctaagcaaattattgtgagaggtatgagactaatcacgaaaagcattgctcaactcgcccatgaccgcgggcacggctatttgaatagttttactctggctagaggtataccactatacccacaagacacagcctcaacatcatgtctaccatgcgttgcgatactagaaagtacccgaatagaggctgtgacaataccctctgcacaacacgactcaccacagtgcaccgttcttagatcataatcaccccctcaataaccagaggcatggactccccagcgactcccacggacttctcgccgcttctcagtctgtcaccccgtaatgaaccatgctatacaaaaggtatagccgttgcccacgctggcttgtggttggtacggttaatgtctcacaacagtagctcgcgaaccggtccttaattgtcatgagcacgacctttaaaaccatgtgctcacaacccaccattgtcaagttttagttatcaattaattatcataacacgattaaccatcgtgagctaccattaaatataaccataagtaataatgtagtatgattcatcccattaatgagctaatgtctctaagcatggctaaggaattatatatatatatctatatagcttttagctgaaccaaaccaatatataaggttcaagctaatcaatttattacctaaggtatcaaggaatagggtattcaatgcaaattggccataacaaaggaataggttcacaccacccaatgacatttgaaaataaatgcacagttgaaataaatagagaatttaaacataggatcaacatgctcaaaggaattgtgtttgggatctgtgtgacttgccttgcaataatcggtcttcaattagtcttctgaatctcttccgacgcactcacgagccttcgcatcgacggaaacgacaagctaacacgcaaaacggagaaaaaaaactaataaaaaccaaataaacagtatatataatcatgattttagatgaatttagcaacttgaacggcctcattctgacttcatataaattagttatgaattttacaagattaaactgattttaagatttatttttagaagggaaaagggctttatgacatcatcgatgacgtcatcacctgtgagaggctcgggacatcacggtcaccggcgatctaggtcacggcggtgagaatggagggcaccaacgcgacgagcatgacgcggggaactcactgaggggcggcacgacgacgaacaacgacaggagacggccgacaacgagattgaagcggcgacgggctcggcttgacggcgtcggtggcgcttcggcgacgagcggcaacaacggaggggtggacgggcttctcctcggtgctgcgatgccgagggaggtggcggcacaggtcggggacgaccgaggcgacggcacggcgcggatggaaactcggcggcgacgacgacgctagggtggaggcggctagggcgctacgggcgacggcgagctcaggcgagggtggcaaacgaaagaggagagggaggggactctatttatagccacgggagagagagatcgggcttggaacgcaagtaatcacgccgggaaaacctagggtttagtttggagggataaacacgaatcgagctcgattccgcgttgatttcttcgggataaagtctgattcttgggggaaaggatacgggaggataagaggaatatttcccctcaactaattttgcaaacggatcacgggatgcgaaggattcaacggaggaagcggcagcacagagcacggcacgggcggctggagcttgaagaagaacagtagcacgggggacgcaaactagacttttctgtgtggtttcctttactaggcccaattgaaggagggacaacaaatggacttcggaagagggataaggccagccgaaaggaagggagaatgggccgaggactgaagctgaacttttcctatttcggcccgaaaaggaaagggggattttaattacttttccaattaaattaatcacggaaatgatttttgaattgttaaaaatacttccaatgctcaaataatttcaaggaaaatcctgaaactgattggacactcaaagtacttaaaaagattataatcagaccatttaatgactaatttaatatgggaataattactgaaatgttctttgtattattaaaattaggaattgagctccgaaaaatccgagaaaattttagagagtataattaactacggagaatttaataaaaattaaatccagccatgctttatatttaggaaattttatttcccacatttaacttcacttgtaaattaatgaacatttaatataaattctaataataatttattaaataatttataaatcctaaaatgaagttggcttctaaaaaaccacaagtgacgactccaccagttaaatctctaagtcccatcaaactttcttttcaacttttcaataaccgatgctaacttaaacttgtctcttttcaggctcgtcattctccaactcctatttccgaagcaagtgagcacacccaattggccgcaggaagtcatcacatggaggaagaagaagaagtaatggcaccagctcctgctatccccgtgagtttatgttctcaacttttaaatcatatcggctgccatgtgattctaactaatcaaatatacccgtactctctttcaggtcttagccgatatgttttcctttgacatccggcaattcatggacaaagaagaagcaaccacgagcacagccttggtacctctagctgacgatgtgaaagcaaccctgctagacatttcaaaacgactagaaggctctttggaaactctggtaaccagctgtgggtctattagagatagattccacgaattccatgataaaatcccagacaagttagacgatgccattaccccagcgacataccttgagcaacatcggcttaaactcgaaaaagccaaatagaggattgctgatcgtcatgagagaagggaccttgaagcaaccatccaagttagcagggcttctatgtcacgtccggaatttctatccaaaattccaaacgcttacatgtatgtgaaccctcgtccaggaatcagccgaggcacacaataacaaattgataatagagtacagttattactctaattaataagcgaataaaatatcattacagaggtagatagttcctctcaatcaataaagatctaagcagcggaacataaaataaacggcgcagacggctccactccacaggcagcttgaccaaggctacacctaatccttcacaccatcagcatcactgtagaactcttcctctgatgaatgattgcaaggtgagtatataacatactcagcaagccacgcagcaaatatgcaagtgcacaagataacaaaggatggcaaaataggggtccattttgcaaaagcag

SEQ ID NO: 28915 - DNA, 10300 bp, Oryza sativa
tgtaccccaaaacacaaccccacatcatgtcaccatgtgcctcaataccaccacggtacctcggaaaggagttgtgacaataccccttgcataacacaatccaccgcagcgcaccttcctggatcataatcacccccttataaaaaaggcatggactccccagcgacccccgtgggcttatctccgccacttctcagtctggtgccccgcaatgaaccatgctatacaaaagataaagccgttgcccacgctggcttgtggttggcacggttaatgcttcacaaccgaaactcgtgaaccggtccttaattgtcatgagcacgaccatcaaaaccatgtgctcacaacccaccattatcaggttttagttggcacattaattaattaaccaatcacgattgaccatcgtgaactatcattaagccatcattaagtaatagtgagtcataagttatcccaatagtgagctaatgtttctaagcagggctaagcaattatatctaatatctagttgaaccaatataaataaagctcaactagtcaaattataataacccaaggtatcaaggaataaggtaatcaagaacaaaagggctataacaagcaattggttaattccacccaatgacattcgaaaataaatgcaatatttgaatagaaacaatagctttaaataggatcaacatgctcaaagggttgtttgggatctgtgtgacttgctttgctggccttggaactcttcaaactattctccggtgaaaacggactctccggaaacgacggaatctaagcagaaaagagcaaaatcaccaaaacagcacataaacaagcatgaacagtacatgtggatatttttaacatgtagatctcaattttagaaaaatttagagacttgaaccaactaaatcggagctaagatgaattagttatgaatttttgaagattaaattggattaaaacacttaaattgattttaattgaattatgacgcaataatgaattatttttgaaaaggaaaagaggatttattgtgtcagcgggctagggtttcggtggaccgggcgcacggtggcggttcacgcgaacggacggccgagatcgacttgatccaaaacggacggccgagatcgatcggtccacgaccggctcacggcggacggtcccgatgacgtcagcggtgacgtcatcaccggcggcggcggctcggcggctcggacgcgcatgctcgccagcgaacggcggcgcttcggcacgaacggagggcaccaagacatagagcacgacgcggcgaactcaccgacgaccaaagcgacggcggaagaccaacggacggcaccggcggtgaggaagaagcggcggcgctcttcgggtcgacggcggcgagggtgttccgacggtcttcggcggcggcgaaggagcggacgaggacggcgacgacttggcgatcacgacggtgaccttcccgagcgacgacgacgaccgagacggcggcggagcacggctggagcgacggcggcgacggcggcgctaggttgcacggcgctagggcgctacgggcgacgagaggcgaaggcgagggtggcggcgggtagaggagacaccggggagccttttaaaggggctaggaggcggcggcgaaggcccacggcggcggcaacggcgaaggaaacttcggagttcggaggaaagagaccgatccgattcgacctcgaatccacgaacttccaaagcgattcaaccgatgattccaaaagagaaaaggtagaggagatcgagaagatcatttcccctctatcaattcggccggaaacagaaaggaacggccggatttggaaaggaacggcggcggcgcggcgctagggtttcgggcggcggcggcgtctcggggaagacgaacctgacaggtgggacccacctgtcagcgacagcgagggcgcgcgcggctgcggcggactgggccggactgggccgaggagagagagaagggttttgggccgactttcggcccaaagccaaaagagactttttaaaacctttttcaatttaaattatttcttaaatgcaattccatttattaaaaatacttccttagctcaaataaatcccagaaaaatctaggaattatagaattaagcaaagcatttaataaaattttatctggccccattttatattggaatttattaattaaaattagatcttctcttctaggattttaaaataaattctgaaaattccatttaaacaacaatttatatattttgaattttcagggtgtgacattctatcaatgaagagaaggctaaacttgatgaattagaagctagcccaagttcaactcaagctagcattaatcggctgaacgcccggaggatagcaattttggctgaggtggaacaatgcagtgcacagatcgcccttgaggaacaaaagcttgctgacttgccaaaagccattgaggatcaaaagtcaaaattgaaggcatccgtcaagcatctaaccgatctgaccaaatctttgaagatgatcccaagaactgatgcagccgatgcccaaataatagatgaagtagatcagattaggcaaagggcaatatcggccatcccaaaatatgtgtctagatgagctaaattttgtaacttcaactttaaatttgcaaacttttgggctgtaatgaactccaagttaaacttttgcctttaaatcttgttttttgaaatccatgtttcatatatatttgcccccctaattttgcaatgttgaagacattgataaaattataactgagcctaaaggcgatataatccatatcagccattatacatcggcaaaccataactaattatgataataaaaaaccactaagggcgatataatccatattgtccatcatacatcggcaaaccataaccaattatgagaagaaaaaaaccactaagggcgatataatctatatcggccgtctgaaggcgatgtcaccacatcggctagcatgtatcggcaaacatcagccgatcatgaattaatccatacacttgggtagtatttcttcaagtacttgccattaagcgctcgtccataaacttcaccatcaagtccttgcaacttataagctcctttggatacaactttataaatctgaaacggtccttcccaattcggtgaccacttgccgaatttattgtcacgagttcctatcggcaagatcaatttccaaatcaactccccttctgaaaaggacttagacaccacttttttgttataatggcgagtaattcgttacctttgcaagggctctcaatctagactgaactagatcttctatttcatctgccataagattataatactcataggctgtcaactcatcctacaaatctatcctttttgagccgattgtagattcccatggcataactgcttcatgtccataaacaagcttataagtagaaacttgaatcgatccataatgcctcagctaatcttgtatgccactgccaaagaaaatctgaaatctttctcttaatcagggggatcaaacttttattagatgcctcggcttgcccattagcttgtgcataatacggcgaaaaattcaacaacttaatgcccatgatattggcaaactaaacaaagtcgtcagatacaaagatcgatccttgatcggttgttatggtttgagggataccaaatcggtagatgatatgttccttgacaaaccgtatagcatcccctgaatcaaccttcttcaaaggaatcccttctacccacttggtgaaataatcggttgccaccaatatgaacttatgtcccttgcttaaaggtggattgatttgaccgatcatatccataccccatcctctaaatgaccatggcttgatgatatgattcatagctgatgctggcgctctctgaattgctccaaacttctgacaatcttgacaccctttgtaatatcggaagcaatcttctaacattgtcggccaaaaataccctgcgcgccgaagcaaccacttcatcttatgagccgattgatgagtaccacatataccttcatgtacttctcccatcacaactttagcttgatcagcacttaaacatttaagcaatatcccatcaatcgtccgacaatataactcatcatgcaacaaggtatactttaaagccttatagcgtaatttccgtgaagccgattgagatggattctgcaaatattgatacacatcatacctccaatcatcgactgcaattgtagcaacttccacctcaatccccttcgccatcggcttatatcctgatgccccctaagccaaatcattagcttcaacattatgctcccgagaaacatgcttcaaagttacctgccaaaaactatccattaattctcggcacttctcattgtagaccatcaacacatcgttcttgcattcatattctcctgccaattgactgaccaccaacaagaaatcccccatgatttcaatagcatcggcttctacttcccttagtaactacaaccccttgagaactgcctcaaactcagcttggttgttagttgcataaggtttgatggtataggcaaactcaaaacttgccccacgaggggaaattataaccaagctgatagcacagccatgagtgcaaaccgatccatcgaagaataaagtccaaggcacaatatcaacagagccgattgaatcatcacgatgctccacaacaaaatcggctatagcttgtcccttcaccgccttaggtgattcgtactgaagatcaaactccgtcaaagcatatatccactttccaattcttccttttaaaatcggagtcgataacatatatttgatcacatcggctttgcatattatagttcattcattggatagcaagtaatgccttaactgtgcaggagaaatataaacacaaacataacttctccaccagagaataccttgtctctgcatccaagagcctgcgacttaaatagaaaatagctctttccttgccttcgatctcctgaataaaaactgagccgattgacttctctctggctgataaatacaatctgaaaggtactcccttctgtggaggaactaaaactaggggggaactaagatactccttaatattatccaaagctttctattgctctgcccctaagtgaattcttgatcggctttcaatctcagcaaaggtgtaaaaagttccaatctccctgataaattagaaataaacctcctaacaaaattcaccttgtcgatcaacttctgtagctgcttcttgtcttctaggggtttaatcttctgaattgcattaacgctcctctgagttacttcaattcccctctcatgaacaagaaagcccaaaaactgcctagccgatacaccaaaagcacacttcgtgggattcttcttcacgccatattttcttgttatctcaaaaaccttcctcaaatcggctatgtggtcatctacctcttttgatttaacaagtatgtcatcaatgtaaacttcaaccaacaagccgatcagatcatggaatatataattcatggccctctgatacgtagctccagcacttttcaagccgaaagtcatcaccacccactcatataagccgattgcacaggacatctgaaagcagtcttgtgaatatcttcttctgccataaaaatctgattgtaacctgcgttgccatccataaaacttataatcttatgtcctgaggcagcatcaaccaattgatcagcaatcggcattgggtactcatccttaggggtagccttatttaaattccgaaaataaatgcacaccctaagcttgccgttttacttgatgaccgggactatgttggaaacccactcagcatatcggcacggcctaataaaaccagcataatataaatgagtaatttcagccttgatagcatcatacatatcggctttacatctccttgggggttgctgatatggtttgtatcctggtttaataggaagccaatgttcaacaatcgatcaggtgagtcctggcatctcataatactcccaagcaaagcaatctctatattctttcaaattctctatcaacttggttctgaattctgcagataaattcttaccgataaatgtcggccttggcctatcgcccctggacctatatcaacttcttccagattgtcagccaacatgaaaccctgtcctagcttgccatcgagatcatccaccgtgtccttggtgtagaaatttgaaccctccacgacgtcctcaaagtaataatttgggctctccatcttcaattggctgtatatcacaatcggacacttttagataatctccttcccaaacttttccagacaggcaatcaatcccatccatcgcccaaagagctaaattggcactagcaacattaactgacctgtcggctggcatgatctcaatcttgtcaccttgccattgaatcaagcactggtgcatggtcgaaggaatacaacaatttgcatgaatccaatcccttccaagcaacaggctataggaacccttcccatcgatgacaaaaatgttgtaggaacagttttgctgcctactgtcaactccacatttagaactcccttggtttccgaaggattgccaccaaaatctttgagaatcatgtttgtcttgatgagatcatttgtatttctacccagcttcctgaatgtagcatatggcatcaaatttatagccgctccaccatcaaccatcatcttggacatcggcttcccgttgacgaatctgttaacatacaacggcttgagatgccgattttctgtcccctctggcttctcacagattgcttgctctggtgacaaaatcaatctagtagaggtttcctccacatcaacatcggcttgtttagcctcatattccacaggcaacataaaaaccatattcaccgatgaagatgcaacagctttgcccttgagcaaccactctgctttgttggcttcaacctcatcggttgctataactttgctcttaatgcgccattcttgttttgtctttttcagccgatggttgatttcttgttgcacttcttgaaaacgctccatgttcctcatcctctggacacttctcttctgattcttagtaaaaataccagaagggcaccatgtgatttcccgtcttcatcctcatcttgaaaacgatcctggtgtactggacccaacctctgatgaacaggcactattttttgattcagccgatttcctctattgtaagatcggcttggacccctgcattgtcactgcacctggggcaatcttctatcgatggcagtctcatcccttcgttccagcaaaacctaaaaatctcacaatcccaatgtgggtcaaagccaccatcatcttgctcaaaatacctttcctgctacttatcatgccttctttaatatttattgataatcctagctgaatttagctgagaactccgatttttcccccatcgactactctcccagacatatgcatcatgttgacaggaaaaggatggccatctaccttcatcggcttctttgaatcatcgaatttaatctttcctccctcaatagccaactggatttgttgccggaaaactttgcaatcattggtagcatgagacccagaattatgccatttgcaatatttccttttccctagctcccctagctcctcagctaatggaattatataaccagcaggaagttgaatttgtttctcccgaagtagcaaatcaaaaatcttgtcagccttggtgatatcaaaatcatatttttcctcttttccaagactcttaacccactgacatgtcacaaccttttagctcctcgcccactcggctgctgctacctcagagtcatattcttcttcatattcatacatataaggataaaaatggttgacctttttaaagtttttcttagcctctgcaaacctttgctcatgtagggctaccttctgtgcaagatgagacaagctttcaaaatcttgagacgaaaacttctccttgatcggagttatcaaaccctggaatgcaagatcggccaactaggaatcggtcaaaaccaaactatagcatctattcctcatatctctgaacctctggatgtaatcttgcatagtttcatcatgcctctgtctaactgctgtcaaatcggaaagctcatctcatggttcccactgtagaagtaactatgaaactgtttctccaaattggcccagccatgaacagaattataaggcaacgaagaaaaccacgtgaatgtcgacccagacaaagacaaaggaaacaatatgaccctcaaagcatcaacagccgatgcctcaccacattgggccaagaatcggctgacatgctcataagttgacacattgtcttgccttgaaaatttcaaaaagtctgggaccttgtatcgtcttggcaatggaactctctcaaaccactcagggtaagggtgccgatataggtttccagtatcctttggcttaagcccgaactgttccttcatcacatctgcaatcatatcagcccaaggcttctgctgaggcactccttgcatctgctattggattcgatcaaattgattgaactgaggctgaagctgaggttgaggtgatcctcccagttgatactgaacttgaggtgaatgaggctgatattgaaaattcaaattaccaccaagatagttctgaggaggctgttgcacattatgtatctgctgtttaggaacaaactgagctccaacaggctgattttgctgaataataggtgttctctgtcctgccggtatttgtggaaccatctgctgcctaatcggctgaaccacttgctgcctaattggtgtcgattgaatcggctcgacaaccggttgagatggcccaaatatagctgcaatctgttcctgagtcagccgattgacgtttttcccagcatgccgaggttgttccctagtcagtacatgaggattgaccactggtctctacgtagaagatgatgctcctggtctcaaagctgaagctgacgccatcggctgccctggaggtacattggagacaggctgttgattacatgtcaccaagcttctatatgtatggaacccaccttctggcagaaagactggcccgttatcctaatgctcagcaattgtgatatcaaccacagtcttgatgatatttgtcaaagtattgaccagcacccgatagattaatcaaagcttgatgaacagcataatcaacttgatcctggaaattattgaacttcaaggcctcttgctcctcaatctcctcttcttcaatctcctcaatctcaccatccttaggctccccacttttgtcacctgaatcaactgtgctacctttagttcccttagctttaccatgcttagatgatgtcacatcctgattttcgtcttaggatttataaattatttaataaattattattagaatttatattaaatgttcattaatttacaagtgaagttaaatgtgagaaataaaatttcctaaatataaagcatggctggatttaagttttattaaattctccatggttaattatactctctgaaattttctcggatttttcggagctcaactcttaatttcaataatacaaagagcagttcagcaattatttaaatattaaattaatcattaaatgatctgattttaattttgttaaatacgttgagtgtccaagtattttcaggatttttcttgaaatcatttgagcattggaagtatttttaacaattcaaagatcatttcagtgattattttaattggaaaaagtttttaaatcctctctgtaacatcctgaaaattcaagacaatgaaaatcacgaaaatttcaaactttttaaaacttttgcatcatgctggttgttatgattgctattgcttgccaaaccgtaaatgatcaccaagaaagtaaagaaaagaactacatttaagcaataaatatgatttgcgggaacatatttaatcctacaaataattatgcacaagatattaaaatcaaataaaagaaaagttattattaacctattttatcaaatattaaaatatttgaataatgtaggtgggtgccataatatgtgtacacatgaaatgatgatcattcaaataaactgagctctctgtatatataatagaattacgggagtatttaattcgatatgtagatcgatattgcaccaagttcctaattgcatttagtagttgcaagatgtgaaacacgatcaaaatcagaacgagaaatcccactaagaagaatatttcgtgctttaca

SEQ ID NO: 28916 - DNA, 15147 bp, Oryza sativa
aaaatcaactccattgtaaatatgaggtttgcttgaaaacttttcagccatggcaacaaatctaaagaccagtaaagatcaaatagaagaacgtggctctgataccacttgtaagatcacacaagaccaaacaaacctaccagaggggaggtgaatggcagggaaaaccaaaaacccgaaaatctttgcgcaattaaagattaccctcgaacgaagacgatgatgaagtcctattgccgccgatcgaaccgccctcctgccgccggtcagaccgccaacgcctcgctggtcaaaccgcccggacacctgcggtcagaccgcagctatcccaccagtcagactgcgcgtacacctatggttagaccatcgggacccagaaacaccggtagatgacaaactcgaagatgtagattgaaactttttgactttattgcatcaactagtgtttacaaagtgcaccaacaacactcctcaccaaaatctcgaactaaactcaaaaccctaacttgctctcaattctagtctctctacaatcgataccgggaggcctcaccctccctctctatttatacatgaggtaggctgtgcaaagcccacgaatctaacataacttaggactcctaacccacgtaggaaaccttcttttgcaagtaaacaacttatctctttccttatctcaatcaaacttcccgaattcggactcccttccaaattcgactcctctttccatacgtacacaattcctcttgtataccatatggatttcttcatcaccacgtgcattgtcctctagcctttagtatccggcatgtttttttgatccctgaacatcaacttctcccaagtggacgacgatctatcaccggcaacactctcccaaggccttaagcaacacctgcacatgcaacaaccaagaaaccatattccgagcccaagttcgtcccaacttgactcacattagtataacaacagtatccatacgtatagaaactgtctagaagccaaatacccgaggaaatatccaaatccaacaaaacaacccgaaaccgaacatgattaggatcctgccggttagaccattgggccggccggtctgactgccagggtcaaccgaaactgcacacttcacaaaatcaaccatctcataaaatctccaaattaacattagcaaaccaccaatattttcatcacaaaatctaaatcaactccttgattctacatgcaagtttgttaggcaagatgtgatgtcttttatatattatctattttacatttcaggtcgagattcttaagctagtagcttctggtgatcatgcagctgctctcaaggtaacagccgctcatcaggggcctcctgctgccagtaacctggcttcactgtacctttgaaggaaactttggtaacactgattcaacccagtgaagatgtatgtactcttggaggcggtatcactgcctattcttgcaaattctcgccagctatgactaatgcttgtattttgttaggtaccaagtctaatttgtttgtttcatttattgttgatactgatggtattagactacaacttgcatattatttgtggaagtgcatgaaacaagcataatacattcccgtggatagtaaaggcaaagcagaggaaataacgcctgaatcatgtgatattttatctgtgctaatattagtgtaactttcttagttaggatttacctctcttacgttgttcctcccatccatatggaagtgttccatccattatctggattacttcacattctgttactctttattttgggcctggttactggcttagaacttctaggtcttttacttgttttaagtagttctatttcgtccatgtttttctaactaatcaaggttgttgatgtgaaatattacttggttactacatatgtgcttctgatagtatttggttcagtggctctctgggtgctgactaattcccccttttacgtcatgtaaaattgatgggttcatttccttgatagtgctgacccagttaccaaccattcattattcctttagttttcttaaagtaaaaggttccaaccttgtctatcatccagaactccagatgatcttttgattgcatatattatgctaatttgatactgtaggacaatgtttacgttgcaatttgcaatacaagtgccagttactgtgcacaaaatggatagccaattaggtaggaattcagccaccaactagtagggtgaaattgaatgatattgtagacttatgtatgttctcttttgcagattgcaggttagcaggaggcggtattgaagaaccccagtgaatgaagatagtaagaacatcacttcgtacacaaagtgaatagtttaggcttcagatagcggacgctacaacgttcatgggtattcagctgaatacccattttttttacaaagtagctataccccatatcatcaagtatatcctgcccaaatggttggtgggtcaacaggtgctaggttcgattcctagcttccttctcgttttttctcgattattcaatcctgtttttggatttttcttccataagctcacaatattttttaagcatacatcgattatatttcaaaatcatgttaacccaacaagataaatgttttcattcaatatttttctatagtttataacttttctaattaagaaatagtatttgcattgatgatattaaccatattttttaaaaaacaaattcgccatgtaaatttttgaatacccaccttcgaaatcctgcgtccgccactggatgtacaaggacctttttgaagaatgattctctaaaaaagattgatccatgcatctgtaggtagtcacaatatatccaaggttcttacaggtcaatgtgctaatggatcatctcaaatcacaacatagctttgcatttgatggcatttcagtacatttattttgtgatcgacggcacaagaagataacactcgcatacactttgcatgtgtattcgtgggaggtgtaatagcagtgataacagcaatatgatgtttgcagtgggatagaacatgtgtatacactccgatgttctgtttctctttgtacgtttagaattttcttccctcagtatttatgtcataactagctaaccctaccagataaaatgttaaatttcatatgaggctgtggaccttatcttgtgagaacctgagagatgataccgatcttaaatcaaatagttgaactgatgccaacatgtgtaattggttggttgctaccctgtcaacagttaacaatgtggaaaattgtaaatatgttaggtaaaagtgaaaacaaatagttcgaacataaggagagaatattttgatttgcttaacactgggcctaggctaatggcaaaatacattttagttttttcttagaaaaattaaagatatacttaagcgaggtgagatgagagggcgattaaataaaatgaaaagaaaaaaaaagaaaggaagtaagagcaagaaagcaaatgttgataataaagggcacagtaattcttattttccccatacctacacacagtaaggcaagtatcaacttgggaagaatgcatgatcagttgatcactgtaaaaaggaggccgttatcacacacaccagtgacaaacgtgtggtaaatgtaccgtaacagtaacctttttatcaccggacaccgggggcgggggaacaagtactgagcagagcagagtagagcataacacacatccatcttcttgacaacgaagaaagaaatcgaatattgtgacaggcagtaggaggccaggtggacgctccagattgtttctccaacgatcggaaggcccatcggggtttcgtcacggccacggcgataattcaaagtttaaactgcacaagaggttataaagtgcttttccttttggcaaggaaatgagaatcgaatcgtatggcaggcagtacgtggcaagagatggacgttctagatcgtctcctccagtgatcggaaggcccatggaggtttcgtcgcggtcacgtcgataagctgcagactgcacagctaaagtgcttttccagagtctgcattacagtaaatgagaaggagagggcgggagaaatatccagcttcccgccctcgacccagcctataaactggctactcatccctacctctcttcttgctccaattcgtaaaagccaccatagtgtagtgctcatcctccatccacccaagtccatcgttccgcccacagctccacaccatcaaccatggtccaaccccccgccgccgttgtccaagcccagccggtttcggaggtcgaggcgggagatcccgtcctggtccgggatttcttcaggcttctttctctggggtcggaggcatccgttccgcgagacggtgtcgtctgctgttacatggacgtatccgctctgttcctgtactacaggaacatgagcggcgttctggtgctggtgccgcatgtccgtccgatgtgcgacgccccgctgatggtgcagcagctccagaagatggagatgcggtcggattgggaaatcccaaatctggccgccctcaaggacgtcgcgaccgcctcagatgctcttgggcgcatgggcaagatgatgctgcaggcgcgccgcgtcctcaagactctgaagaattacccggatggcgaggagggattggagatactcttctacaacactcttctgggggaggcgctcaccagggcgcgcgaggccataccagccgtgataacctccgctgacctgctcgtgttcgacaacggggaggtgcggctgatggcgctctccctcgctcaccaagcgatgagcaccgtcgaggcttgcctcggtgctgtccacgagggaaagggcttgactgggcgtgagatgcaccgcctcgttaagaaggtccttcgcccgctgagctacctcaggaaggtgaaggtcatcgacctcccaaggttcaacccctttgacgtctgagttctgtcttggatttatctttatcctgcaatccagctagttttttttcttttgaggggaactaagaagtggaaacaagaaatgtttgagctagtatgtttgcctttcatgtctcgttctattttagttgtgatcctgagttattgttatcaagagtgcaagatcttctgatatttatcgacctatctcaatggaaactttattattatgtgcctgcattgtgatcctctttgttatactttgtttgaagtatgaatgctgaatgcattttaattatgccaatgtgctgaccctcttttctatgaaagagaaattgcatcaatgatcaatttatattagttccttgttaataactgttctgttatcccctattctaaaaaaaaaatcaactgttctgttatatcttgtggattggccaatgatgagatgttatttgcaagcactccgataatttgaagtgcaatagcgcaaaatgttgtgagtcctggaactagctattaatgctagtttcaaacttaaatgctacatttctctatgtttttcttggatagtgcaaagtttctggttacttatgattgttttctttggttcaaacagtgtaaaattccatcaatttcctaaaatttcgttcccttatatttgttttgatgtaagtgtaactggcacaccgacaaacaattgactaatgtgttgttctgttggtcacccaatttcatcaattctcttcactttacaaattttgagccattaacaagctaattatactagcagtaactattactgtttttattttgttcatatgtctatgttgtgagaaataccagtgtactaaaactagctactttatgttccctatcactataatcagaaaccacccacttttagagcctttttacttcatggggatgataaatattaagttctaattttatcatttcgacatactgaaatgcaaagatctgggcttattgaaatctgagctcttgccttttcatgaatttgatcatatattgttcaggaaaatgtctctggactaatggggatcacgaggtgactaggacagtatcaaagaagtctggggtctcataatttttatcaagttaaccatagcatttcagtttggggttcctccttttcttcagcataactgttatgtttgtgacttctccctgttgtttacacatgcttcttcttcaatttatcttcctagatgcagtggtatataataatattacttctccctgtttgcaactgtaatttcattggtgcatgaaaacttaatttaattttttttcctgagactttttatataccacagatttggagattaatgattgcactcttagatctgtttctatatagtggttaatagctaatttgggaaagatgacgtgccatttcgtgtgctcaattggttttgcactttaatttgtgcttcacaataaaattgttcaagttattctgaaattcaactttttttttcagtgtgaaatttacatgcttaatactattcgataccaaccagtgatcaactaaactccaccgatatagcataccatttttgtttcttgcatattttcctaagaataactttagacactcctttagataccaagtgatgtaaaaaggtttgaaactgaaccgtggatcatgcattcccatttgttacatttagtttcattttcagtgagccaatgatgatcctgaagtgttgctgctgttatatcccttaatatcatgcagatttgtactggcactttctgtttcatttcctttcatgtatttatagtattggagtacccatggaaagaaccatttttccagatggcaagtttggattcctcactgtacaggatgctaatcaatgcattatcaagaaaaatgacaagaaaacatgatactaagtttgcaaaagatttctcgatgttattcaaggcaaaaattttcctgtgcaggttatccttgtggagttctcatctgactcctgatttggtagctagaattttggtaatcgttctatgattttgatttacagtttctgaggaatttaaataaatttattaatgtgcttagtgatttgtgttgacgtcagcctattttctactgttctctgtgacaaaggatatgtcatgcaattttctttgtcaagattaccagggttctactttagcccacttcgttccatggctacggtactggcatcattttggaggcgacggtaactagggatgtaagtggacttgtccgtgaacccacttgttggcaaaatttctatgtaactcgcgggttacctattaatttgacctgtaaatgggtttatggatcgacccacttgcatatctagatgtagcaaaccggaccacaaaccgaaaacctatgaattatcatttatttgatctataagtgaactcgcaggtcggcccgcttgcatcctaacggtaactcgattttccgttctataatcgcctcaatcttctaaatgtcccaacattatgaatttggattttagagtatattgacttgcttctggtgtccaggatgacaacaaaatatgagtcaggatttgaaccaagcatgcatgtaaattcccctagtttccatggtgcttaaatatgccaaaattttcaaagttcaaggatttttcaacgctcacaggttctttgcaacagtacaagatctgaaacacaacctagtttgtgtttttttttatagatttagcttagaatggagccttgcaagaaattggtctgccttctgatatttgttggtgaacttgttttgcttgtaagatcaacccaaggatgacaattgtctgcacatgttgaaccataaataatgtaacccaatgaatgaatcatattgtttattcgtttatctacaacatttgcgaggcacaagaaaatcttttgcatttcactttagtcaggtttggaagtgtttcataaaggatcaacaattgctagttttgctttggtgggccccaagatctgcatactcatctcctacacctgaagttctatttgttgggagcctttcctatggttactgatgagaggagaatccgcacacctaaatgtattttcctgaaagacaagttgatacgaattccaaagcttgtactgaattcttttacttaagctccatatgaagtagtaatgaaatagtttgaaactgcgtatatatgcccacatgcagcactggtaggacagtgattcatttgttttattaggtttgatgaattccttgatagatgctacactacttatttcattttgctgctaaaagtcaggttcattcgaatatcctgttcaacctcattttctattcgctcagttgtttgtacgtactaactctgaaagaatatgcatggtgggatggtttaggtttgaacacttcctttcattcaggacttcatatatcgatcgcttatattttactaacctatgttgaaatggacatatggtgagtctctccgacgaccaagctgaaaggtcactactcatctactatcttatctcccttaatataagggattttgacattttatttgcactgtttgaccactcatcttattcatttttttttaaatataaaaaaagaaaaattgtgcttaaagtacattggataataagtcacaaataaaataaataataattcaaaatttattgaataagacgaatggtcaaacaacgtaaccaaaatatcaaaatccattatattaggggacagatgaagtattgcctattgactgcaatttcatagttgatcacactggaccttcttgtggttgatatttatggctaggtgtaatagtctagtttagattttattgctggttgtgttatgccactcttaattactgatttgatagctgtgccagtaaaattttataaaattaaaaacatgtcacagccgtcacgttttccatccatctcttttttttccgttttattccttctttctcccatcttcttcctgcaccgacgagcgtcaagtggtggagggactagtgaggaagtgttggttttctccccttttgagtcccctgaatccctcctcgaagatgatgccaatgcactcgtcaaggaagatgacaatcttgcagagttggtagagttacccaaaaccaatccaactttacggcctccagttgaactcaaaccacttccttcagttcttcgctatgcttttctacatggtgatacggagtcgcccatcatcataagttacaaattgattgatatgagacctctcgactcacggccgtgctagaaaagcatcgctttgttctaggctactctcttcaagatcttaaagggattagtccggctctttgcacacaccatatccctttagatccttcttatgcgtcccctcgggagccgtaatgaaggctaaacaatacaatgagagaggtcgtaaaaataaaaagaggtcttgaaactcctacacgccaggataatctatcctgtgtcatatagtgagtgggttagtacagttcaggtagtgcctaagaagggaggaacaacagttgttgaaaactcgaagaacaagttgatcccataacatatatcttgggatggaggatgtgtattgactatagaaatctcaataaggctacgaagaagaacaacttcacgctacccttcgctgataaaatgttagagcgactggcaaatcattccttcttatatttcctttatgggtattctgggtatattgatggtctttaagtaccaaatctgaccgtcaaatcctgcataaaagaaaatgaaagaatacaaaatagaatatcaaacttacgggtagtggttattactaactatttccacaagtcttggtaaatattcgtatgcaggtgaattatggatgaaaaccacccgccatgtgaagaaacacacctccgcccaatcagatgcgagtactcggattggagggcccacaaaccatagcaaaaccgacatatttgaggccaacccccatacaccgttatgagggcccacaggacagtgactcaagcgagaatgggggagaaaggcagtaaaattggttcgactgatcgcccccccatcttccacatgtcgcttcctcatgcctccccaatgacggttatggcggtttcctcagcagttacaaactttaaccgtagtcatttggagctataaaagggggagctcacttaactctcaacacacaataaagtggagtacaactcactttcatacttaggcattgctctagtagagtaggtagagagtgaggggaagctctaaaaggagtacctgttaacgaccaaatttggtaaatcataggttgaatttggagtcaaaaccgaagcgggtttggagggagttcgttattcccgaaaacagagtgtgcatcggctgcactctgcatcggctagtaccaaatcggataaggagaagccgatgcagctgatttcgacaaaggggcttagagtcattgtcggactcaatataaatgttgcaaaagtattgccaggcatggatcacgttagaagaaggcaaatgtctatattaattaggatattttaatagtttccttatatatatttttggtaagagttcgcctaagggacttgttcgtcttttagagttgtaatacaaatcgagtcgtgtccgatatggacatatcatgtattttgggtataaatatatgcccgagtctttgtaaacaattaacatcagttgtcgcgaccgggaaaattgccttttcccgaacgctagtgtattaatccccgtcccaggaaaagccggggtacaccacacaaacatgatataaaagacacatctttattatatcgataatatttacattattacaaaggcgcttcaggcctgacattcaaaaataaacagcagcggactagcgggcctacggctccatcttcacaggcgctcaactggggtataagccaggactccacctaagacttcttctccaaagcttctcttactgaagggggaaaagattgagcaagaatgagtacaaccacagtactcagcaagccacaccggcagatgcatgattaatgcaagggagtacaaggggataataatataggggttaagttttgcagtaaacagcatttaaaagtcacttagttgcccaaagccattttacaaagacgatcctagagctacacagtattattaatcaaggccgtgagcccacacgaacctgccttaacccaaggcctacgatgattcagaccgaactggcaacccgaccctgggtcccagctcgtcccaagccaacctaggccaaccattccaccttttagttgttgagcaaattttaagaattaaaacactgacttgggtacattgctcggcttgcccataaccgatggcgcggctattcgaatagattatactctgatcagaggtgtacatctttacccacaagacacatcttcctcacgtgcaaccacgtgccacataccaccacggtatacagacagaagacgtgacatagtttccaacccatcctagccatagacaagagtaccgacccaatcccatctacggccggaacccccgggacaggcaggcaggactgaacccctagcagcaggacaccggccctgtgccatgacatctcgactaccgggccgcaactcgtgtagccttcatttgccctggagaatgtccatcgacccccgacttcatccacctccatccgtgtacttttgtttataactagactgagccacaaactaagccttacccactagacatgtggaagtacggtagtgctttgcaacagaggcccgaagaccggtccttatatggccgaggtgctactatcaaaaccatgcgccccgagcccagcctaaaaccatttttggggattttgaatagtgggggcggtgtgaatccaattccacaatactccaacaattccacagtgtccaggtgatatgaatattcccaaagtctagagttgtaaaaccgcctaatgttacctaattaaaagcgaagcatctacctataatcatactagtggtaccatgagtagagtgtccactagttggggttttgtttaatctagggtgaacaaggaaataataataataacaataataaggtcataacaaaggtaaataggcatggctaaataaaacagtgataacgcgggaatttaaataaagcgataatgcaataatttaaatcaacataattttacaaactgggattcaatatgttcaaagatgatgtgacttgccttgctcgctttcccaaacgccggcttcaacttccacgaagagcggatcttccgaagctgcagcgtctacacgaccaacggaaaagaaaaggcttttactctaataaactccatataacaagcagaaacaaagcacaaaaatgggttcttgacttcttaaggaaaaattagagacttgaacggtccaattccgagttcaaatggccaagttatggccatttgaagtttatatgctctttaaatgaatatttgcgaatttcttcatttaaattttaattaaaaaaaggatttattgcgtcagccgaggggaggggcgcgcggaccgggtccacgggagtggggcccacgcggcagccccacggtccggcgaggttaggggaggggtttccaaacgaatccgagggagagagggagggaaaaatggggggaaagggggaggggatcccggggaataattccccctattgattgcacgcggggcagatgtcacgcccggaaattcactaataatttccgaactaatttgtgcataaaatcctcgtccaggcatcagccgaggtacacaaactgacaatttaatatacaaatccatcttaataataacgttacatacttacaaagaaaagaaaacagcagcggaattaacggtctagcgatggcttcagctccactcccacaggcagctcaactggggtataagccaaacgtcttctccttctggatcctttatcttcaactgaggtttgatgattattgcaagaatgagcatatgacatactcaacaagccacacagcaaatatgcaagtgcacaaggattccaaaggatggcataatataggctcttttgcaaaagcagcatttagcaaagatttaagagaagtaaaacagtggagtaatttatcagaaattttaatcaacactgaacatcacacccatgctgcataggcccaaccatcctgaacaaccatacccggctgtacagatctaatctccaaaccagggagctagcaaattattaccaggtataacatctataattattgtgagaggtgtgagactaaccacgaaaaacattgcttaactcgcccataaccgcgggcacggctattcgaatagttttactctggccagaggtgtaccattgtacccacaagacacgattccacacatgttgccatgccccgaaataccaccacggcattgcaaagggggaaatcgtgacaataccctttgcacaacacaactcaaaacagtgcaccgttcctggatcataatcacccccttataaacaaggcatggactccccagcgacccccgtggacttctcgccacttctcagtctggcgcactataatgaatcacgctatacaaaagataaagccgttgcccacgctggcttgtggttggcacgataaatgtttcacaacagtagctcgcgaaccggtccttaattgtcatgagcacaaccatcaaaaccatatgctcacaacccaccttaaccaggttttaattatcaattaattaacatcgcacgattaaccatcgtgagctaccatttaatgtaaccataattaataataatataacatagcttataattaacccctttagttagctaatgtttctaagcatagctaagcaaacttacatatagcatttagctgaaccaatccaatatataaggttcaagctaatcaatttattacccaaggtatcaaggaatagggcatccaatacaaattggccataacaaaggaataggttcacaccacccggtgacattcgaaaataaatgcacagttgaaataaatagagaatttaaatataggatcaacatgctcaaaggattgtgtttaggatctgtgtgacttgccttgcaataatcggtcttcaattaatcttcttgaatacttccagcgcactcacgaaccttcgcaacgacggaaacgacaagctaacacgcaaaacaaagtaaaagactaataaaaaccaaataaacaatacatataaaataaacaaacatgtagaacatgattttagatgaattatgagacttgaacggccctattctgacttcaaatgaatttaatatgaattagacaagattaaatctaattaaagcccattaaaaagaattaaataaatttaattcaatttatggacaattttaatatgtagatctttattttagaaaaatttatcaacttgaaccacctgaaacgaagctacggttatttagttatgatttttcgaagatttaatctattagaaaaaaactggaaaagaggaatcatgacgtcatgctgacgtcatcatcggcggcatgacatgggcgactacctccccggccatagatagatcggcggggctatccaagggcatttacacttagaggacgacgtcacgaacgcaacggtactcaccaaagcgtccaacgacgaacgatgacggccggcgacgacgcaagaggcggcggcggctcggttgaacggcgggaacggcgctacgacggccggcgacggcggagaaggggtggccgagcttccccgctcccgtgcgcacctaacggcggcaacgagaggtggcaacgacggcggacgcggcggcgcagcgtggccggaggatggccggcgacggcggcggctaaagcgacgcggcggcgactctacggcgcactagagagctcgggaaaaggggcaaacgaaagaggaggactagtgtcacaccacgaagtttccctcccaagccaaaattgtaatttataaatgaccctaagaaaataccggtgcaaatcaggagaaaaccctaagaaagtaatgcaaataataatcggatttgacatgtgggactttttcttgagttctacaggtcgaaattcattaacatgatttttagtggaattttcagagctctagaaataattttaa

SEQ ID NO: 28917 - DNA, 1483 bp, Oryza sativa
atgtcaatcgacccccgacttcatccatctccatccgtgtacttttgtttatgaccagactgagccacaaattaagccttacccactagacatgtggaagtacggtagtgctttgcaacagaggcccgagcttaatccttatagtggccggggtgctacttcccacaactggcatgcacccaaaccccaccgaaaacaggttttaggggttttgaaagaggaagagaggtgtatgtccaattccaccataaaccaacaattccatagtgtccaaatgatatgagaattcccaaagtctaaagttataaaaccacctaatattgcctaattaatcagcgaagcatctacctaaattcatactagtggaaccatgaatagagtgtccactagttggggttttgtttattctagggtgaacaaggtaataataacagtagcaataataatgtcttaacaaaggtaaataggcatggctaaataaaacagtgataacgcgggaatttaaataaagcgatcatgcattaatttaaatcaaaataattttataaactgggattcaatatgctcaaggatgatgtgacttgccttgctcagagagaacggccttccgaaccttcggcaacgaccgcaaaccacgcttcgcgaacctccggaacgacgaaagctacgcggagcacacaagcaaagctacaagcctataaagaagcaataacaacacataaaaaagaaagcacacagttctttaggttataacaaacattaagagacttgaacgggtcgattcggagctcgtatgaccaagatatgatcatccgaagtttaatgctgttatatggagatttgcggattattataattaagctttgcaactataaaacatgtgtaagcgctagcctggaaaagacaggaaggctgcgccgttgacatgcggaccccacatgtcaacctaaaggaccgcggtagaccgggtacacaaagacggttctcgggtcgacggaagcagaccccgtgtgtcaaccgaggcgagtggccgacaaacggactccactaaacaccacacggcctgcacacgtggaaaccacgcggctaccgagcgggcacactaacacggacactacacggtcaccacccgcacgcgtgaacgactaccgacaccggtacacgggtaccggggccgagaaccgcacaacgagcacgggcgacaccgaaaggacgaggacggggcagcgagggagagggatccttaccaccacgcgacgaggcgcgggaacgacaacgacgaacgggcgcggcggagacagacgggcacaacggagacgaacggcgaggggacggcttcggcggcgatccttggacgaaggcgagacgcggccggcacgaggcttgacgacgcggagccgagaacgaagacgaggacggggctgcagcggctcgcttgacgaatgcggacgacggacgagaacggctcgacggagggacaaac

SEQ ID NO: 28918 - DNA, 2785 bp, Oryza sativa
cgaggccgagggagaagacggcgcggtcggactgtgctccggcgaggagggagaggcggctggaggcggccggcgcggaggaaagagaagggcgacggcgggaacgcgcctccggcggtcaccgcgcgaaacggagggcaagccggggtggaggaggtggcggcgacgctggaggaggcgacggcgctgtcggccggtgcacggtcgaggcggcacacgcggctggaggcggcccgcggcgtgggaaaaaaaagaaggctgccgggagatggctagggaccacggggaggctcgggagggggctaaaacgagagaacgggggatgaggatcccattttatatgagagaagagggagccggccacgggggaggtcggaacggcggcgggaatggcggccgacggccatggaaagcgaccggacttggcgcgtccgttcccggggattgaaggcacgaatcaagggggaatttgggggcaattgaagaggattcaatggggattaaaaccccccaattaattttggaattggccaattgaatcaagcggatttggaggagggagcgagctaggtttccgggagagagagagagaggtggccgggcggctggaggagggagacgacgcgcctgacgcgtgggccccacgcggtcgggcgcgcggtcagcgcgcggcaacggcgcgcacgcgcgcgcacgtgcgctggacgggcgggagggcgccgctcgggttgggccgggcggccggcccatgaagaaaagaaggggaggcggcttgggccgggcaggccgggggggggggagagacagccccggaaaaaaagggaagaaggagctgggcccaggggaaaggggcccaagagaagggagagaaggagaggaagagaaagaaagggaggaaagggagacttccgcccgtggcccgaggggagagaggaaggactttgggccagacttggcccaaaggaggaaggaggggtatttttaggtttttatttttaataaactttgttaattgtttttgttgcttaataattatttccggtgctctgaaaattcaagtaaaatttgagggctccttttagaccaaggcgaatttaacaaaaattctccgggccacatttgaatttttcttgtacgtattttagtgtttgccaatttctttccgaattttaattaattctattattccttttagcgaatgatttttaatttcgggacgaatttatcaggacgtgacatcagttcaatacactttcggcgcatcgcgacctttttctactttcattgtttcgacgagttcttgttctctagttgggctgcatcgttttcgatctccggcgagaggtaaaacttgttattgcggcttgcgttctcgggattagtgctcacatctttatgacactctaatcttgtttatgtgaatcgtcgagttatcataaatgcaatataatctagattgattttactatctggtcttgtcggctcgtctctatcatcgaaatcagccgatagaatcaggtaatatcattggtttagatcatatagtatatccaccatctcgaaaaagttttcattggcttgtttactagatcttatgtttctctctatgcttaatgctacatcaattaagtttgatctaataagtaatatttagaaccataatctctagcttgcttcatgattgctaatagagatagtatcggagtttcagccgatcttacctggtttagttatcttgttctttatttatttacttgacatgctaaatctgccatttatattaagatctcgctaagactaaacatattaagcttgatctcaatctacttgggtcttcctaatagtagaccgacacttgtttaatatatttaatctataatgatatcttagtataaagatgtattggagcaatagccgatacacactagatttacctatcagctatgcaatgaacataaataatctttcctttgaagtacttttaaacttaagtgatttatactgtctcggcagccatccgatctatcccaatcgcttggtttaaacacatttcgaagtatagattatatattgttattatctaaagccgataaagtaaatttagccctttgtttactatatatatcactgctgatccgaaatataccgcatcggcttgctctcagacgatatgtcatcagcaatccagatgatcggttatcgttgatggatttaagtttggtttctttgtttcttgttgattgcaggatcaaaccaactggcacgctctgaacccaaaagcaaatttaggacctgcactagagtaaagcaaatctctcaggccagtgcgtgttttttgcatcaacacgcttttggcacgcctagtgggacaacctttggtagttcttcatcatggttgataaaaaacatgatatcgatgatgaaaacatcatcccggtgatgctagataaactgacagaggagcagaaggcgactctggaacagatgatgaatcagttgcaaaatcagtatctacattcgttcacattgactcggcacggtacggtaatccaaagacacaaggtcacgttaccgttcgatgatgaaggggcaagctctcctaaggatataatgggtaaagatgagaaagctaaatgaagtactgaggagttccatactttgcaagatcgcattgattcagctatttatcacggattgatcaaccagtcgggagtgcttgtcaacaccttaaccaatatgataaagactgtggttgatggtacgatagctgagcaccaagttaagg

SEQ ID NO: 28919 - DNA, 9263 bp, Oryza sativa
tcaagacttttaaaattatttctaaaaattccaattaaacaacaatttataaattttgaattttcagggtgtgacattaagaccataaacaaagcactgccgggagatacccggattatctttgtaagttttctttccaataaaagcaagaaactgtgtttaagatagtgtacacattcgggtattcttggtcgctaaccatttcacgttgagattaagagcgagggtcatacgatgcctaagaacacgggagccacatcaaccgtacaccatggtgatccttggtaatgcgatacgctttataagaggccccagtatcacatacttggtttttgacgtctcatgacacaaaagaccaagtgtgggggagggaggtctacgagcttgcatgaagaattccatcaaccaagaccatcttggtttacagttggtgttagtcttaccttgctgaaaaaaggaaaaaaaagagaaaaaaaaaggagagacaacaaaaaaatgaaaaaaaaagatgggagaagaggaagagagcaagagagctgacgggctacatttagatcaaagaatgcattatgtgtgagtctttaaaaaatggctatacaccttgctggtagcgatcatgatgcctggctacacccagcctctctcttgagctcatgtgttgccttggcttagccttcatccactcctagctgtgcacaactcctcactcttgcatcacctactcgcacacaagcaagaggagatgcactcttcttttctaggtgttttctgctccactccagttggtacttgcatatttgctcaaaaagagatgcatcctacgtctctacaacattgtaccaacggagagaatttaacttccaatctcttcacccagcgaaataaataaaataagatgtgtgggcgtgccagtgtactaagtacacaaaataaaatagaagaaggaaaatgcattttattataattcttgaagaattacaaaaatacaaaaatccttggtcaaatgcgctccacagctcattgacgaggtggatctgacttggcgactgtgttctcatggttcccggggtctcggaaaacacccggttaattactctcgcgggttagaccgcgagacacctcaaattaagctacgctggtcgtcgtcgtcggtcttcgcttcacattctcccatgcatgattgtgatggtggtgatggtgtcgatgtgtgtgggcgctagtagcggttcacggcctcgtcggtccgtgcgccggtgtaggtgacatcgacttcatatagactccacttgtccgtgccatttagcctcatcagtcttaaaaagcgtatgtagttggcataggttttttggttgtaagcactaggaggctggtacaactcttcttgaccgtcttggtgccatgtcaatagtgggagaataattgggagagaacattgaccaatcgttttgctcgattatcgtcgcggtaggtctctggctcggtgtagaggtacatgttggtatggccttcagtcgaccaatcaccgtgacactcgggatagcgctgcttttctggtttctagcacaatggctgaagatcattgtggtacaggagtatgccttccgatcattgcactgcacactcaagattaagtgattttaggggatgttaggggcgtagcctagcccgggaacgatgagatacgttctaggaactgggtggccctcttgtatatgtgcctgacaatcggagccgaacccaaattttgttgggtcgcctccgatcgtagtggcttaactcgggagtgcaccgacgacggccacgacgaaatcatacgtcatgtgtatgggcgttgtggagtgagagacatcggtggggatgccgaactcgtgatcactagatggtgaggtgaggattcatgtgaggatgacgccagtggcagcgacaagttgaagaacttcgccggcagcagtcgagcagcagacggtggtgcatatgcatagatatatgtatatatatccaagaatttcgtcattggacagccggggtcgtcgagcgtgacgacagcgtgagacggacgcgaggtcattaccagcccgcggtgatgccaagaatgttcgtgaaaacagctagtggctccaaacttgcacgttggcgacgaatgcacgattggtaccggcaacgacgacaagaacgggcttgtcattggcggagaaacaatcagtgcgggcgatgatgaccagaaacaggttcgccatcggtgatagccgcaaggataaatgtatgccaatgatcgttgaagatgacgaggatacgtcctgtttgtggacgagatcgcatcaccggcatcgatgacaatcatgaagacgcctcggcggtgcgggtctgagagtatgatcggcgacggcaacgattcggcaatcatcgtcgatggcggtgtacatataaagattttgtcatcgagcggtcaagaccggcgagcatgacaccgtatttgtgggtatgaggatgatcccgacgtgccgaagcgaaagcgtcgtggaaggatggcacgacgacctcagccagctaaagcgaagggatcatggctggacttggcgacgatcgtgcaagcaccaagcaatggcgctccggcattcttctcaggtggctcgacaattataacatgaggaagatcatagcattggcgaggatgatttagtagacatcggcggcaacccgcagaggctacgatgagcgtgggggacagagggcgtcaccgattagtagtctttgtggggcatctctgcccagcaaggctgcatcatgacaggtgccggcacatatagtctgacaataccatcgcggcttgtggatgatatgttaacgacctccgggtatcggcaaccaaccccttggcaacctgagaatggccttctccggtgggcatcggatggtgatggggacaagcgttagttggcaacgcctcatcgtctatggatttgggcggcttagcggcgtccacgggacaacggcaactccaacgagatggctcaagacgcaaccagagctaatgacgcctttgtcagaaaaaaactcacgcgaactggctctcagtctctctaaaacacacactctgacgcttgtaggtgcagctacagctaactgaagaagttccgaaaatacagagtcgtacagaacaactgacgaacagagttggcgctgcgtaatacagtgcagctttttcggttttctcttctatttattcatctccacacagattttgttacatgtataatagaatcaaatcatgacaatctcggatcaactactgaccgcgccatcccacgatccgagccgagtcattgcagctaaagaaggaagcaaatatgctaaaacagaaaaatgctattctactggctagaattcagactccaacagaactctacatgcaacgaaacaaaagagaatataaatgctcaagattacaatccaacaattcaccccctaatcttgaagcatcagactggaactaatcccagcttgcctctcaactccaaaaatcgaatcttaccaagaggctttgttaaaatatctgcatgttgctcctctaaccttatgtattccacctccacccgtttctgatcaacacaatcccagatgaaataaaactttgtatcaatatgtttactgcgatcatgaagcacaggattcttcaagagacttatagcagacttgttatcaaccttgatcagtgcacaaccaggttcttggccttccaactcacctattggtcgagccagccacactccttgtacagcagcagttgcagcagctatatattcagcctcacacgaagatattgctaccaccttttgtttttgtgactgccaactgatcaaactgtctcccaatttaaatagaactccggttgtactctttctatcatcaatatccccagccatatcactgtcactatagccattcagctgaggaacctgttgttgcttctttctgaattccaccccgagattcagagtacctgccacatacctcaaaactacctgggtggcctgcgcaattgcgcggctagcacccaaacaaaatcatatattttttagtattattctacttaaaatttattaaatagctatctcattgtcttaagactttgaaagaccaaaccttatcatcctcgtgtttctaattatatagtttttaaaagttacaccagtatcatcctcgtgtttctaattatatagtttttaaaagtcacaccagttgctacctcctatgtcatctctttctttatttgcttactcgatctatcactatttctattcattctttctggaacctttaaaatttggattttatagttttagagtttattgtcatatagggtttcgtttttataatttccagatgtcccgtcaaacgttgcgattatactcctctacgacccgtccactgtctcttctctttattgtcattgagatttgtcacgtcccaaaacgaccctaaaatatatcctttaaattatgcctagaataattaaaatccgtgtgaaagcctccaaaaattaaaatgtgcaaagtaaaagtcaaacaaggcttagaggatttttgtatatttcctaaaagcctgaaatgtgtaaataaattttagtggaattttcggagcacaaaaaaataattaagaaataaataaagttaaaaaggttttataaaaaaagaaaaaccctaaaagtcccccttccctcctttgggccggctcggcccatctccctctcccccctctctctctctctcctctcccccgcagcccattcggcctccctccccgcgcgcgcaccgctgacaggcgggcccgcccgccaccctcactgacgggtggggcccacccatcatccccgtcctcccgccgttcctgccgccccgcccgcgccaagcgccaccgccgccgccaaatccgccacataccgtcgtccccgcgtgcaataaagtggggggaaatactccccatgattccctctccctttccccccatttttccctctctcgcgttcaaacgggcggatttgcccccgcaaatctcgccgccgccattgatggcggccgaacctcccgcgccggtttccttcctccccagccgctctctccccttccaaccctatttaaacccttcccgcacctcctccgttcgtttccgcctctcgccgcccttcctcctcgccggattcgagctcgcgacgtcgctctctctctccgccatcgccgccgagctccggtccgccgccgtcgtcgccccggaccgcctcccacctcggcgccgcctccttcggcttcgccgcatccttgccgacctcgtccacctctccgtttcggtcgccgaccgccggagcgctgccgtccccgtcgacccgagccttgccaccgcctccctccgctctggccgcctcctccgtcgccgccgtcgcctcggggtgagttgtggaccgtcgcctcctttcccccttccctcccctctctcggccgccgctccgccgagctgatggtctccgggcgagggaagccgcctcccgtcgaccgcgccggcatggccgccctcgggcgcgccgagtggctgccgcgtggggcccggctgtcagccgcccgcgcgctcgggtgcggctgacgtgtggggcccacggcgccggccggcgtgagccagggtgcacccggtccaccgtggaccgtgaggctgccgcgtgggccccactcccatggacccggtccgcgcaccccctccccctcggctgacgcaataaaccctttttaaattaaaatttaaataaagaaattcgcaaatattcatttaaatagcatataaacttcaaatggccataacttggccatttgaactcggaattggaccattcaagtctctaatttttccttaagaagtcaagaacccatttttgtgctttgtttctgcttgttatatggagtttattagagtaaaagccttttcttttctgttggtcgtgtagacgctgcagcttcggaagatccgctcttcgtggaggttgaagccgacgtttgggaaagggagcaaggaaagtcacatcatccttgaacatattgaatcccaatttataaaattattttgatttaaattattgcattatcgctttatttaaattcccgcgttatcattgttttatttagccatgcctatttacctttgttatgaccttattattattgctattgttattattaccttgttcaccctagaataaaccaaaccccaactagtggacactctactcatggtaccactagtatgaatttaggtagatgcttcgccgcttaattaggcaacattaggtggttttacaactctagactttgggaatattcatatcacctggacattatggaatggttcaattattgtggaattggattcacacctccccctctattcaaaatcctcaaaatggttttaggctgggctcggggtgcatggttttgatagtagcacctcggccatataaggaccggtcttcgggcctctgttgcaaagcactaccgtacttccacatgtctagtgggtaaggcttagtttgtggctcagtttgattataaacaaaagtacccggatggagatggacgaagtcgggggtcgatggacatctctagggcaaatgaaggctacacgagctgcggcccggtagtcgagatgtcatggcacagggccggtgtcctgctgctaggggctcagtcctgcctacctgtcccggaggttccggccgtaggtagggttgggtcggtactcttgtctatggctaggatgggttggaaactatgtcatgtcttccgtctgtataccatggtggtatgtggcacgtggttacatgtgaggaagatgtgtcttgtgggtaaagatctacacctctgatcagagtataacctattcgaatagccgcgccctcggttatgggcaagccgagcaatgtaccaaagttagtgttttaattcttaaaaccttcttaacaactaaaatgtggaatggttggcctgggttggcttgggacgagctgggacccagggtcgggttgccagttcggtctgaatcatcgtaggccttgggttaaggcaggttcgtgtgggttcacggccttgattaataatattgtatagctctagggacatatttacaaaatagctttgagcaactaagtgtcttttaatgctgtttactgcaaaccctaacccctatattatggctcccttgtactcccttccatttattctgcacttatgggtgtgtcttgttgagtacggtggttgtactcagtcttgctcaatttttcccaaacccagaagaggagttcctggaagatgaaggctttggtgtctagctcgtgcctgccgtcaagcgcctgtggtcgtcgccctagtctttcgctgttttttgtttgtcttcttgtgtgctgggccttcgctgcccatgtaataaattaactatttacgcttccgcttgataaactctgaaatgtatcaacttttggtgtaccttgcctcctcggacaaggaataatacacgcacgtaaggaacgcccgttgggttatttccggtcgtgacaagattttaaaaatcaaacataattatcgtttgggttcatttttactttaagtcccgtcaaaccgtcagcggctttgctattgtactcttctacggctcgcccgctgcctcctttctttattgtcgttgagattttaaaatcgaacatgattatcattaggtttttttactttttggaagttccgatcctttaaaatttgaacgatgccactatgcccctctacagcccgtctgtcgcctactctttattgtcattgtgattctaaagatcgaacataactattgttgaaattcattttttattttctataactcttatacgcccgcccgctgcttctccttttatgtcattgaaattttaaaaatcgaatatgattatcaatggggtttatttttttactttctagaagtcccggcaaccgccttacttgtttgcttcacagcctgcctgacgtccctccttttaatcgtcattaggattctatttgttgttttattaacatttctaatttcagaacttatttttttaaaaaaattagttaataccgtattgtgttctttaaatgtttttattttttttatttttaatttcagttgtttcaaaattgtattcctacttaaactctcttttagtttttcaaattttagatattattttattttttatttgaaattttaattaatctcgtattgggttcttatacggactcttctttcaacattgcttatttttaattccgaatttcagctaattttaaattgaatttctacttgagctctccttttattttcttttgctaatttcggattttttttatttttattccgaattttaattaatctcgtattgggttcttatatggactcttcttttaatatttcttatttttaatttcgaatttcagctatttttaaattggacttctacttggactctcctttccttttctaattttagattttattttttttattttaaattttggttaatctcatattgggttcttatatggaaacttctttcaatatttcttatttttaattccgaatttcaggtatttttaaattagacttctacttggactctcctttttctttttttctttttcttcgattaatgtgggaatttctagcccccacagcgaacgtggtgcctcctttcaaggctgttttaataatataatagatagatatgtttcatggcagcccaatgttcagaggtcggtttctccataaacctgctaacataaccaaccgaataacttagatgaggtcttgtgttcaccaagtacctcaagctcccaattatgcttctgaattgagtttcctccatacattctcctccctcctttctcaacttcaaccgagcatccatgggagtctgacatggattacaatccctcatcccagctttgtcaagtatctttgctgcatatgcaccttgagacactgtgatcccttcctttgcatgtttcacctccatcccgagataataagagagcagaccgagatcactcattttaaaaagagcctgcatctgctccttaaacttgtttatttccatcagacttgctcctgtagtaatgagatcatccacatatacaccaaccacaagtcatgagttcttctctcctcgagtatacacagcacttttgacaccactcttgacaaaa

SEQ ID NO: 28920 - DNA, 10781 bp, Oryza sativa
accttcaattgattccatctcttcaagcatggccttcctccagcagctctcctgctcagcctccaagaaacttgctggttcctctgctgccataaggcattgatcactgtaattaaaatctaggattggggtcaaggtggcaagcgtgttcaccactgttctgtagctcctgggcccttcatcagtcccttcactagcatcagttggaggggaacagaattcaacaccagatggcagagttgttgcagttccggtgcttgatgttggtgatgttgctagcatggttggagtggctgctgcatcctgggcatgtgtctcactcccttggactgggattgtgaaattctccaccgtaaactccacatacgcgtcctgatctccttcttcatcagtgttgctgccccagtcccagaacgtcgtctcataaaaaaacgacgtcgcgtgacacacacacgcgtcgcaccacaaaatcatacatcttgtaggcttttgatccttgctcgtagccgatgaagaccatcctcgtgctacgatcatcaagctttctcaagtttggcttggctgtcttaacatagcccacacactcaaacacacgcaggtgttcgacagtgggtcggcgaccataccacgcttcatacggcgtcaccccatcaagactcttcattggtgatttgctcaagacatagacggctgcaaccaccgcctctccccagaaatatgccagcatgtttgccgccttcagcatggacctagctgctgccaccacagtctgattgcgccgctccacgacactgttctgctgccgtgagtagggtgcagtgatttaacgtttcacccctgtgtccgcgtagtactccatgaactctatagaggtgaattcacccccgcgatcagtgcgcagcgccatgagcttccgattgctatccttctccacgccggcttaatcgctgccgatgcttcgtgtttggcagagaggagtcgtatccacatgtgatgactcatgtcatcgactaggagcaagaaatacttcttgccccctgtcgtcgccggcgtgattggtccgcagaggtcaccgtgcaccagctcgagcgccgtctgcgccctgtactgcgcctcctctgggaacggtgtgcgatgttgtttgcccgcgaggtacccgtcacacaactgatcaatgtgatcaatttgcgggatcctgcggaccacgcctccttttgccaacctccgaagtgccaggaaattcagatggccaaatcgtgcatgccatcgccatgctagctcggagccgctcgctgccatacagattagtgtcgcaaggttcaacttgagaacatacaggtaacttgaatcacgatttaccttagctagctgcatcccttccgggtcacgcaacgtgaaaacaccatgccaaatgtgtgcgtcgtagccgcgcgcatcgaggcgaccaacactaacaatgttttttctcagcttggggatgtagtacactgcctctagtgagcggtgatcaccattcttgctctgaaacaccacagttccgcgcccctagatgtcaaccactgagccatcgctgaatttaaccgtgcccacaacaccagtgtcaagctccgcgaacgctgagcgtgcgcccgtcaagtgattcgtggccccggtgtccaggaaccactctccagtcttctcctccttacgcccatcctcatggtccagcacaaccttcttctctgtgagatgcacttcctgcacacaaggtgttcgaccaacggccgcttcgccggcgagcgacacccccatcacgtgtgccatgagcagagtcggctcttcctcagcctggaccagatttgcatttgcctctccccgacattggcgacgcggcatacggcactgcttcgagtaatgaccgtattcatcacaattgaaacacttcaccttagagatgtcacgacagccatggccgctggtggccatctcctttcccttcggtgaatcgccggccttgcctcgacggttctggttgccagagcccgcccggcccttgttgctgctgccagatccctcctactcccgctgcttgacaccggcctgccactgctccttagtgaggtacaatttgccaccgtcacttgcctcctcatcatcactgtaggagtcgaccgtcgacagccactcgatgagctcctccagggccatggtcttcacgtcgaggagctgctcgagggaaattgccaccggcttgtacttcttggggacaacacgcagcagcttcttgttgatgtgttcgtcttccatgactccgcccatgttgcgcatgtccgcaacgatggcagtgagccgcatcgcaaattcctccggtgtctcaccgtccttgaagcgcatcgcctcgaactgacggcggaatccctgctccctcgcctcgctcacgcggtcgacaccgacccgcatggttttaatggcatcccacgccgccttcgccgtgtcgtgctttgccaagccgcgcaacatctcgcggggcacagcttggagaatcgccgagagcgctgcacgatcctcgcggtactccgcatagcagggatcgatggccgtccagagcccctgcgcctgcaggttgacgcgcatcaacagcgctcagtctatataatttgtcctcgacaggatcaagagacgggcagtgtgccctgcatcgactagcgggagtgatgccgcagccgttgtcgcttcccccgccgccaccgccaccacgacggccaggcggtgtgtatgacattaccggatcgtctcagcaaagctctgataccaaatgtcagaaaaaactcatgcgaactggctctcagtctctctgaaacacacactctgacgcttgtaggtgcagctacagctaactgaagaagttccgaaaaaacagagtcgaacagaacaactgacgaacagagttggcactgcgtaatacagtgcagctttttcgggtttctcttctatttattcatctccagacggagtttgttacatgcataaaagaatcaaatcacgacaatctcggatcaactactgaccgcgccattccacgattcgagccgagttaacgcagcttaagaagggagccaatttgctaaaacagaaaaatgctattctaccggctagaattcagactccaaccgaactctacatgcaacgaaacaaaaaagaatataaatgctctaagattacaatccaatagccttgcaggcaccaagtagtggtgctccggccggcgttctcttcaggcagcaaggcaatgaatgtgaagaagatagcagcgttgatgagggggagcggacgtcgacggcgttgcagagaagaggccgaccagcaaggtgacgacgtccgagcatctcggcgacatctcctcgccatatagaaacatcgtcttcaacatcgccgcgccatatagaaacatcgtcttcaccttgacggagacttgcagacgacgtcaactctggcgactctgacgatggcggtgcatccggcatcttctctgctgaggagcttcataccggcgtgcatgcgctgaaatggagcaaagggatgataagaaaataggctagttacccatggcagtgaactggagcggcatcgtctccctggtgatcgtctcctccttagcgcgcttcctcagcggctcagcgcacgcgcctccttgccggacgccgaggtacggcagccgatgtcgccggccgcagagcacgctcgttcccgcaggacgccgagatactccggccaagacgacgtgcgtgatggttgccgatgagcagcctgtgtccgctctccttgtccttgtgtttctgtgtttctctcctgtgtctctgtgtatgtctctctagggactactgccaaggctgggcatggcggcagcggcggcgtgaactgcaggccctcggctcgtgcctctgtactctctctgctgcctccccccgccgtgaaggaaatggcctgttttatagtggcgatccggccgtatcagagatccattgatgtgcgatcactttccaatcgactgtggcgcaaagagagcatttccttgtatttgtatgcacacgcgcgtcccagccgcgcggacatatatagcaaggatctttggccaaaacaatattatccaccgtatttattttaattccatgcaaatgcatattcgaaatctactgttgattccaaatgagttagagcccgataactatccaactaaagaggattttttttagataatggaatagatcatcccggcctttgctcaaaagagctacaaccaattattacaaactaacactctaaaacaagtaaagttcaaaaaaaaaaataggacaccaatttaagaagtaaaataaccaaaataggataaggagtacacatttattgaagcctatttgtgaatctccatccatagttggtaaaaagttgtataaccgtcgtctcaagtttacgacatgcaacctttagaagatctccgtcttcatcacacctttataattgtgcccaaaatcagagccaatatgttgctctgaaaattatctgcatatatgtaaaagatgatgatttgttaaaaaccatatcattcctgctcaaccacagcgcccaacatattgtagaagctccaaccaatagaagtttactctttttcttgtccacccctaagagccacccatcaaaaatatgagaaatgctagtaggaaggtataaaccaaaagagaattgaactgctctctatataaactttgcatgatgacaattcataaatagatgttaaatagactcatttttcatacagaaacagcatcttaaactgtcattccaattttgtttagtcaaattatctttagttagcactaccactttaagcaagtaccacataaagatcttgatcttaagcagcatcttaagctttcaaattatcttgtttctctcaatgttgccattattaatcaaggctagatgcatcgacctaaccgagaatcgtccactctgattaaatttccaaataaaacaatcaaaagattgattcaactgaacatgtacaatagaagcacacaaatcatgccaagatacaagattatgaccaaccaatgctctcctgaacgaaacattaagcggaacagagcccataacactagcaattgaagaatttttccttctgataatagcatataaggatggatgcttatcttgaaaagcaagttccctaaccatttatctggccaaaatcttacttgttccccattattcacattccaggaacccatattcaagaaagtactcttaactttcatgtggtctaaccaaaaatgagaatcaccttgtttcctatcaacttgggttatagactgattataaagatattttctcttcaataagtcctatcaaaccccttgctcatttattaacttaaacaaccattttctcaaaagacatttattttgtatttcccaattatgacccctcatgccgccctgatctttgggctggcatataatatcccatctagcaagcctttactttttcttatgatcatccccttgccaaaagaagcgtgatctataataatcatttttttaagaaccccttttggtatctcaaaaaaggatatcataaacatagctaaacttgaaagtacataattaatcaaaaccaatctacctccgacagacatatgtttacctttccaactactaagtttcttttcaattctttgtgcaataactttccaatccttgttactaagctttttaaaatgcattggaataccgagatatttgacagggaagttacctaacttacaaccgaagatattataatactgatcataataatcctttgcgtgaccaaaacaaaataattcacttttgtgaaaattaattttcaggctagatagctcaatttcagcttttcaaagaggatattgtgatggaatgcttccattccaaaattttctagcatggaatgggatcgtgtgtgtttccattttgctttatatacacattgtattgaccagcagagagcatgcatagctgccgatcgattgtcccatatatattgccattcatcatcaggctgacctgtgaacccaggtgatcaagtatagatgcatatggcactgataaagatgtcagacaagcaacccctattactttctggtgcatttgtgcgtccttgtcagtaatcacttcagttaagactaattaccgtgtttaactaatcatggaatttacgcatatagtgaaaacttgtgggaaatgcacacagcttgtttgtttgttccttcgattggcacattcatgatttttagttttacttaaaaaaaatgcacaaaatctcgtccaacacaaggtaaagggttcttgcacctgagatgtgtgcataaccgaagcactcgcttgagttggcgtgatcaaagtgccttccttcaccacaacccgcatcaagacggaggagagatcgacaatcacatgtgatcatgctaccgctccagagatttcaacatatgcatcatgccggcggtaaggtatacaaaagacagcaaatgattcaccatttcttttacacatacttgtctttagatgagtttggcttgatcatacctggttatgcgtcctcagtccattttcgtatgctatggtttgggtggtcgtcgacattcataggctttttaaaattaagcatgatgcttaggataaatagccttctttaattaaagttgacgtggtgtcaagtttgcttaaatgaaccgtaggtccagtactttcatggacttcggatgtatatccttcgtgaactaacccctgcagggaatttttcaaattgacgagcgagtcctcaagcacgagtcacactggaggtaagacagagctaggagaaaaatcagttgctaacataaaaaggagaaacatatcacctatcaaggtgtacggtgcgcatatttctaattgctcctttagcatgttcatgcaaatttaccttagccctgtatgagttttgcttaaatgaaaatttggtgaacaataaaaaaaattgaaagaaagaaagagaaaaaaaagaaaattttgttttcaaagaataaaagaagcgtctctcgattaaaaaaatttgtctctggagtaaaaagaaaaaaagatgatgacaaaataaaattatggcaaatttgtgggatccatgcttattaagaatccaattccttgttagcatggatgtgaacaattaatcttcaggctatgataaaatcttttcaattttttgttgtccctcgggtatttgttatccactaaccttttgcaggaaataaaaaagacaatagaggagtagtgtaaaataactccaacattcataccacgctccttagtctatgagaagacagatgcttaggaaaccaagcagaacaaatgcaaagttgtgctgtattcttgcatccaaatcaaagcttggtaagacctatctggtaataattcgaaacacctcgtgcatcctcgcctcacatatgtccaccctgctaagttacccatcacctcaattgatgccataataaaaataaaaataaaactataaaaattataaaatgaaaataaaaataaaaacaaaataaaagtgaaataaaataaaagtaaatttaggcacttcatgcgcctagagttacttaaataaaatttggctcaccgatattttaccccggtagaagcctattttgctttccatcctttttgttgaataaagacaagccacaacacaagtgtgggggagtcttttcgaactctcgacgcgcaacagcatcgactcaacatgacactgtgatgaacaccagcctatggccgcgcacaaaattcagcagtcatatatgattctcattgcaaggcaatactcctcagcgactatattattaactaccaaggccatatatgattctcattgcaaaacattacatgtataggctgactgacattacattgagctttctcaaattattgtgacccatgtgagatgctttttgatactttcattatcaagatcacgtacactaaacttacaagcacgtaagctaaatttctacactggaagctagcatccattgtccatcatttattttatccattatccacaaaataaatactccatgtcatttatgcctcatcctccaaaattctttcaaaaaaaaaagagagagagaggcatggctacccaaaataaagaaaaataaatttttgctcatagaaaaatggagcattgaaaagaaaaaaaggagagagaaaatcttgctcatataaagtttggggaatgaaaaaaaaaagaggaaaaaaacggatggccatgccctttcttaatatggacaatgagagaaaattggaggaggaggtatatcaaaggagttgtaatcatttatttttcctttttccacccccaaaacaaccatacacatatcacacacatgcacattcttgatcagagagtatgacttgcgatctccttaggtctggtcttttggcttggtgaaatatgtgatgcaggtatgccccgattgatccctaccaagctccacatatacaaccttgtagaattgggacaattcagcaaaatatgccttggtgagaatccacaaatcaaaccacacgagagacttgagagaaagtcattcgaggagtatatctactttgaaaaaatatatgaaaacccaagagattgacaggaggaacaagaaggacttgagccacgacagttccattcatcaattacccaagatggatagttagacactggaaagttcacaagtacttgtatggcttagaataaattgtatacctgtattatatcttggaaagttttattccacattcatccttaaccattactcggaacgagtaaagagctaagtgtgggaggttttgttgatggctgttaaatacaaaatatatgccgtcaatacctgcataaaaccataaatgtaaaacatcaaccatagtggtagggtttatttctaatgatttccactagtgctagtgtatatttgtatgcaggtgacaaattaccagagttgagaaaaaataaacatgtaggcagggggattatacttcccgttggagtccatggagtgatgagcccacaaaccatattaaatcattatttattgggccaacgctggaagaataataaagagggacccaaatgtcaggagatagaagaaggccggaggcagttgggccagcccatggttcggctgaaccgccatgaagcccaattcatcccagccttccatgtgggcgtccaggattgctccctaatgatggttggatggtgtttgggacatttcccataatgtaactatcatatgaagcctataaatagagctcctctccctcattccaacacacaccaagacgtagagctgaattacaagaggctctaagtatactttaggttcattatatgttctatagtacacttagaatagggatagagtaaagtagaagaagtcggaggaatcccagagttgtcgataatcctctctttattcttgtactttgttaattactctggttcaatagaaatatcattctgagtaattaagatttgcttagcgagaattattcttcgttagttcctaattagcatatgggattattgttcactatagtccattaattatatagtgattgctttagtctttagctagcactagagtagttattaattgcgtagacacggtgtctggataattaatttccagtacttgctgcgtatcccacaatacgttagacgtgggtgtagaggtggtgatagccctcaagagcacttaagtcctccctgtgcgggtacatagtagagcgacatctaggaacagcgagttgctagtgcctgaagtatcgcgttaggattaaaattaagctttccttggacactttttctcactaagaaatcctctctgccctgtgcccatatttatcttatgtccttgatgaaccggaggaagagataatcacacacgttcccttggattcgatacccttgaaatactccgtagggaaagtcctacatcggtatatccatgcgcttgcggattctatctgtgatcgtaagaaataccaacaactggcatcccgccatgcctcttgaacgatgctgacctcgatcttgtcggtgatcaggagatgcaagcctactacatgctaaaggatcagatatttgctcacacgcgggcatacgatccggagctactaaaaaagataggtatggatgttaattctcataccatttggaaagttgttggatggcagagatttgcggtggcagatgagcctggttctcgtttgcttactttacaatttcggtacactttgaaagaaatagaagatggaatttcctttcgctttttccgtaaagaatttacacttacatggaaatgattaagtacacttctttgttttcacgatgactataaaaccgttcttcggaatttctgggttcgagaaaaacagattttgggaaaatatttctggtggtccaatttgcaagaaacctagaacgaatgacatccataatcctacacttaggcttatgcacaaatggattgttatgactttgtttcctagaggtgatcttaggcctataagagaggataaattgattatcatgtttgtcacagttaggaagattaaagttgctcctgtgaaatgtgcaatggttagagagtataaagtttactgctcctgttgagtgcacttccctaattactagcatagcatacagacttggggttatttctaatgatcagattg

SEQ ID NO: 28921 - DNA, 2833 bp, Oryza sativa
agaaatgaacaagaaggttcaacatccgtgcaaatgtacgaagccggttagtaaccatctggggatgcacccggatggacccaagctctacaccatagcctcagaggctcggtctggaagagtgccagcgagagccgacagagagcatctcatgacatacactggggaacatgaacattcattccctcagatcaagcagtatgccttcatcccccaatgaatggtgaatggtgctcaagttcctctcgttaggacttgggagaaattacaaggaggatggataaaattgacatgcaaacgggagagatccaattcaacctggatgtcgatttctaggatcggcaatatattttaaaaggtgggctagatcaaggatagatggtgacgcagggattatcttggttcaagccctctgagagaggaaataccgtacgtccagtgtgttctttcttgtgtatagtggaaaaatggtcggagaagctagacagaagagtcgtggagatgattcgacctcctctagggaccccttccccctcttatataggatgagggggagggttacaaggaaagtatctagttgattgcaactagatcaacctattctatctataaaagatatgcaggatcctcgggatttatatcttatcccgggaatctctctttctttatttacaagtatgacgcatggggcctaggacacttggcccaccccatgcagtgtggcccaagggttgtcattgggtacccgggtaccgtgtaccccccactcgatgaacacttaacacagacgcaagaatgacaaccgaatgttgatgctcagttcaccaacaccaacaacgcaacctgatgcagcaacagcatgacgaccttcaagcgtactttcgcttccaggggttcaatccttatcaaggaccctgagcgaaaggcaagcttggtgggagacgtctctccccccgctgaggtaacttgtatcacattgcatgtttccctttccaaatgcatgttttattttcattgcatcttataaactaaaaacaacataaaaattgcaaaatagaaaataccaaaaaaataggttagactttattatgctaggtaagacaactttttttttgactagaaatactgccaggactttgcccagcagtgtagttttatagaactcaaaaaatgttttcaaaattacagaggaaagaaaccacacaaagactataaagtttttaaccaatcagaaacaatttgttttaagggacatatgtagaagaatttctttcacaaaaagtgatctccaagcttggaaagatggctgaatattctgtaaagtaagacaacttagttctctttgttgaaatgatgaatagttgctctgttttatatctctcatatatggggtcatggttaaatactctctcaaaagtcgaataagagtagccaacaaatatccgggagcctaagggaagtgagctgcacttgctgatttgagtctaagttgttgtgagatatgagatagtaaataagagttgttatgaccctagtctgaatttgacttgaattccaaatgttttctttttctaaaataataaactcatgaagttcctcatttgatataaatttctaccaaagccaaaagtattcttattggataaaccatatacattttggtgggctgtaattccattggactttatcaaatttttgtgacttgggtagaactttttcatgctttatgattaagatcacacacccacatatatgcacatgctaactttctacactggaagctagcatccatccatttcatcttgatattccttcataccaccatccaaataaattctccatgcttaaatgtgctttcttctcctagaaagaaaatcctttcttaaaaaaaagaagagaaaataaggagggaaaggcatggctatgaaaataataaacttatgctctctcaaaatataaatcatgatgatgaaaaaaaagtagccatgccctctccatatttatgaaaggaggattttggagaagaaagtaagcacaaaggagaagcattttctttattttccacattccattttccacaatataacacacacactttgcacgatcttgatcttgagaatgtctagtcatctattttagtccaagtttttgacttagtgataaatgtgagtacaagtatgccaatgccatcgagatcatctacagtatcttcggtgtagaaatttgaaccctcaacgacgccctcaaaacaacaattagggctctccatctctaactggttgtatatcacaatcggacacttttagataatctccatcccaaacttttccagataagcaatcaactccatccatctcccaaatagtcaaatcggcattaccaacattaactgacttgtcggctggcacgatttctatctggtctcctttccattggatcaagctctggtgcatggtcgaaggaatacaacaatttgcatgaatccaatcccttcccaacaacatactgtaagaacctttcccatcaatgacaaaaaaggtagtagaaattgtcttgctgccaatagtcaactccactttcaaaattcctttggttctgaaggattccctccaaagtctttgagcaccatcttagtcttgatgagatcatctgaattcttccctaacttcctgaaggtagaataaggcatcaagttcacagcagccccaccatcaactaacatcttggagatcggcttgccattgacaaatcccttgacatataacggcttcaaatgccgatgccctgttccttctggcttctcaaagatagcttgcttaggtgacagacccaa

SEQ ID NO: 28922 - DNA, 2649 bp, Oryza sativa
gtctctgtgtgtgctgggccttcgttgcccatgtaataagttatctatttacgcttccgcttgttaaactctgaattgtatcaacttttggtgtaccttgcctcctgggacaaggattaatgcacgcacgtaaggaatgcccgttgggttatttccggtcgtgacaacttctccgcgccgagcagtgatacggaaaggacccacataccgaggtgcgagcttcccctttgtccgaaacctgtgtacacctcgcaatggcgtgacccgaacatacacaaagtcatccactgcgaattccaggtcacggcgacggttatctgcataacttttctgccgggactgtgccacctttagattatcccgaatggttctgactttagcttcagcttctctcaggatatcagtcccgaacacttggctttctccaacttggtcccacaatagcggtgtccggcatttgcgcccatacaacgcttcataaggtgccatttgtatgctggcttgatagctgttattgtaggagaactcggcataggggagactcttatcccaggtcttcccgaaatctaggacacatgcgcgaagcatatcttctaggatctgatttagacgctcggtctgtccatctgtctgcgggtgatacgcggtgctgaaatttaatcgggtacccagctcttcttggagcttcttccaaaagtgagaggtgaattggcttcccctatcagatacaattttcttggggacgccatgcagacttacgatcctagcgaagtagagttcagctagtttgttccctccataggtggtctttacgggaatgaaccgtgctaccttggttagtcgatccacgactacccatatagaatcatatccgccttgggtttttggaagtccggtgataaaatccatcccaatttcatcccatttccattctggtacttggagaggttggagaagtccggccggtcgttggtgctctgccttgacacgctggcacacatcacaaagggccacgaactctgcaatttcccgcttcatactaacccaccagtatttctccttcaagtctaagtacatcttcgtactgccagggtggatggaataaggactttcgtgagcttcctgaagtatcagctgtttaagttctctgttatctggaacgcatacccgatttccgttccatagggttccgtgttcatcctctgtgaaaccagcggctttaccctgtttcatattcttgaggagcccatgcatatccgggtcattcttctgagcctcgcgaatttgatcgagcaaggtaggcttggcttccagcgtagccaagaatccacgactaactatgcttaggttcagggcttccatctgttgattaagttccggtggaatgccacggacgttaagagtgttgcaatggctctttcgacttagagcgtcggcgaccacgttggccttaccaggatgatagtgaattcccacatcataatccttgatgagttctaaccatctcctttgccgaagattcagatccgactgggtgaagatgtatttcaaactcctatgatcagtatatatttcacagcgattcccaatgagatagtgccgccagatttttagagcatgaaccaccgcggctaattccaagtcatgggtagggtagttgccttcatgaggtcgaagctggcgtgaggcataggccaccacatgaccgtcctgcatgagcacgcaccccaatccttggcgcgaagcgtcacaatacactatgaagtccttgcgagtatccggcaagattaacactggcgaggcaaccagcttttctttgagagttctgaacgccttctcacattgcgggctccacacaaatttctcttctttcttcaacaactgtgtcatgggtcgagcgattttggagaagttctccatgaacctctgtcacgaccggaaataacccaacgggcgttccttacgtgcgtgcattaatccttgtcccaggaggcaaggtacaccaaaagttgatacaattcagagtttaacaagcggaagcgtaaatagataatttattacatgggcaacgaaggcccagcacacacaaagacaaacgagaaacaacggaagactagggcgacgaccacaggcgcttgacggcaggcacgagctagacaccaaagccttcatcttgcaggaactcctcttctgggtttgggaaaaattgagcaagactgagtacaaccaccgtactcaacaagacacacccacaagtgcagaataaatgcaagggagtacaaaggagttatactataaaggggttagggttgcagtaaacagcatttaaagatatttagttgctcaaagctattttgtaaacacgattctagaactatacaagattatttatcaaggccgtgaacccacacgaacctgccttaacccaaggcctacgatgattcagaccgaactggcaacccgaccctgggtcccagctcgtcccaagccaacccaggccaaccattccacattttagttgttaagcagggtttaagaattaaaacactaacttgggtacattgctcggcttggccataaccgagggcgcggctattcgaatagattttactttgatcagaggtgtacatttttacccacaagaaacat

SEQ ID NO: 28923 - DNA, 8770 bp, Oryza sativa
catcttcgtactgccagggtggatggaataaggactttcgtgagcttcctgaagtatcagcatacccgaaatgtctaggtacatcttccttaagttctctgttatctggaacgcatacccgatttccgttccatagggttccatgttcatcctctgtgaaaccagcggctttaccctgtttcatattcttgaggagcccatgcatatccgggtcattcttctgagccttgcagatttgatcgagcaaggtgggcttggcttccagcgcagccaagaatccgcgactaactatgcttaggttcagggcttccatctgttgattaagttcgggtggaatgccacggacgttaagagtgttgcaatggctctttcgacttagagcgtcggcaaccacgttggccttaccaggatgatagtgaattcccacatcataatccttgatgagttctaaccatctcctttgccgaagattcagatccgactgagtgaagatgtatttcaaactcttatgatcagtatatatttcacagcgattcccaatgagatagtgccaccagatttttagggcatgaaccaccgcggctaactccaaatcatgagtagggtagttgccttcatgaggccgaagctggcgtgaggcataggccaccacataaccatcctgcatgagcacgcacccctatccttggcgcgaagcgtcacaatacaccatgaagtccttgtgagtatctggcaagattaacaccggcgaggaaaccagcttttctttgagagtttgaaacgccttctcgcattgcgggctccacacaaatttctcttctttcttcaacaactgtgtcatgggtcgagcgattttggagaagttctcgatgaacctccggtagtatcctgccaaacctaagaaactgcggacttgagtgactgtcttgggttgcttccaatcagtgacggcgatcactgtttcggggtccacagcaactcctttagcagatatcacgtgccctaagaatttgacttcggacaaccagaactcacacttgctaagtttggcatacaattgatgttcccgcaactttcccaataccaggcggagatggtgctgatggtcttcctcggattgtgagtatatcagaatgtcatcaatgaaaaccacaacaaacttatccaagtattccatgaacactttgttcattaagttcatgaagaaggcaggtgcattggttaaaccgaatgacatcaccgtgaattcatacagtccgtatcgcgtggtgaatgcggtcttcggaaaatcttcttcccgaatacgcaattggtgatatccggaacgaagatcaatcttggagaatacagtggcacctttaagctgatcgaacagatcatcgatccggggaagagggtacttgttttttatggtgacttcattgagagctctatagtcaacgcacatcctcttcgtcttgtctttcttctccacaaaaatcacaggagcaccccagggggaagtgctcggacgtatgtaccccttttctttcaactcttccagctgtttcttgacttcggccagttcatttgctgccatacggtagggtcgcttgcacagaggagtggttcctggagcaagatctatctggaactcaatctctcgcttgggcggcataccaggtagttcttccggaaacacgtctccgaactctctgactatggggatttctgacagacctatctgatgcagttctgaactactgacagaggttgggggtgcaaagaaaacaaccggttgtcccggccctcggtacagagtgacggtgcgtctcgcacaatccactactccttggaattgagccaaccaattcatcccaaggatcacatccaagttcttggtgtctagcagaatcagatccgagggaaaaggaatcccctgaatttctataggaaccgcagggctataatactttgctgtcataacccctccaggggtggtgatgagcagagggtttctaagcctttctacccccaactgatttctccccacgaatggcacagatataaacgagtgggaagctccagagtcgaacaaaatggtagcagggatggaatgaatgaggaacgtaccaacgatgacgtctggagttgtcagcacgtcctcggccgtcacatggttcacacgaccccgaatgacgtccttaccaccgttgttggagcggggaggcgcttggccttgctgacgcctcggctttgggcatttatccgcaaagtgcccgggctcgaagcagttgaagcacagacgctgcggacctgaagcgtccctgcggccttggccaggctgcacagttggcgtaggaggacgaggcgcacgggtcccttgctgactctgctgttgctgcggctgtgggacgcgcaccacgaattgagggcggggcgcggagcgaggttgctgctgctgttgttgctgctgcgaggaggatccccctggatagggattggtgtagcggaccctttggttagctccctgttgattgcggaaattcgccaagcggcgcttgtgcgactccagttccttgtgcttggcttccaagcggatgctcttgtccaccagacgttggaaatccggatagtccccggagactagacggacggacagctcagggtccattcctgccaagaacttctcttgcttctcctcatcttcccgcacatcctccggggcgtaacgggccaggttgttgaactcatgcaaatactccatcacggagcggttgccttgcttcaactctcggaattcccttttcttaagggccacgactccggcgggcacatgggttctccggaaagcggcggtgaaacgggcccaagtaataggctgtccctctggctgcgtagcctggaaatggtcccaccatagagatgcgggcccctgcagctgatgggcggcgaagatgactttctcctcatcgctgcactgcacagtgtctagctttttccccacggcatgcaaccaatccaacgcatccacggggttgttggagctagagaaggtaggtggacggatgcggaggaactcggcgagtttagagtgttggggaggtggtggtggagcattatgttgtggcggattttggaggtggtggagaaaagcagtcatcatgttggcctgctgggcgaggatttgggtgagaatggcgttggtatctggtggtggtggtggaggcggaggaggaggtggaggtgggctgccatggttgttgtggttgctgccttcgggttggttgccatcactggtggcagcatttctcctggtcatcaccatctgaaaaccccacacagaaccagcaaacagagagagctgacaattaaagctaaccacccacgactaccataattcttgaatttattactgctattaaattggttcattaaagttcaagttgcttaaacaaataaaataaagacaggctccgacaaagttacaccacacaccggcataaccgtgccccacacaacccaacaagaagacaaacgagaaagaacacacgcgcaagcctactaactgctcgtctactgctgtgacgggccaggacggaaggtgagcaacagcgcatcctccgtgctaccaacgccggaggcttccccctcctggggaaccacgggcgcgggctcggcacgaggggtctccacgaagcaagtccacgccagggactgacgaacaagctcgggcctggaggtgctcttgcgggcggtgatcttctggctgcggtagacgcggcgatgcttggggcggcagatctctccctgggcgatcttgagctgatgcagctgcgcctccaccgcatctaggtccttcttgagctgcaggttctcctgacgcagctccaggatcttcatgttgttctcgaccatcccacgacgcaccatctgatggaagtcgatacgagccgcgtcgtacgcctccaccatgcgcgccaggtgcacgatggtagcgtcatcctccgagctagcgtcccggaaggtggcgtagtcgcgggctcctccgcgacgagggtggtagcggtagggcgagtgctgcaactcgtccgggtagcgctggtgaagagtgccgatggcgaggagagcggcgctctggcaagcggcggggaaggaatccccacccgcggtgactgtcagcgaagtccgctcgggagagccagcgaggatcactgcagtgacctcccaagcagcgtggggctccgcatcgtcaccctcctgctccggaagcggcctggcctggtagtccactccatgtggataccccaggaccacgcacatgccccgcagctccaagacgaagccagtcatgtccaaaccacgacggctgacgctgccggccatctacaaacaaaaacaaaaagaaaagcaacattttaaaggtcagattttggcgataaatgaagcagcaggacagagagagaatagaggattttcacaaataagaagggatttttattttgaaaatattgctaaggcttgggatctaaggctcgtcctagggtcaagggggctctgataccaacttgtcacgaccggaactgacccaacgggcgttccttgcgtgcgtgcattaacccttgtcccaggaggcaaggtacaccaaaagttgatacaattcagagtttaacaagcggaagcgtaaatagataatttattacaggggcagcgaaggcccagcacacacaaagacaaacgagaaatagcggaagactagggcgacgaccacaggcgcttgacggcaggcacgagctagacaccaaagccttcatcctccaggaactcctcttctgggtttgggaaaaattgagcaagactgagtacaaccaccgtactcaacaagacacacccacaagtgcagaataaatgcaagggagtacaaaggagttatactataaaggggttagggttgcagtaaacagcatttaaagatatttagttgctcagggctattttgtaaacacgattctagaactaaacaatattatttatcaaggccgtgaacccacacgaacctgccttaacccaaggcctacgatgattcagaccgaactggcaacccgaccctgggtcccagctcgtcccaagccaacccaggccaaccattccacattttagttgttaagcaggttttaagaattaaaacactaacttgggtacattgctcggcttgcccataaccgagggcgcggctattcgaatagattttactctgatcagaggtgtacatctttacccacaagacacatcttcctcacgtgtaaccacgtgccacataccaccacggtatacagacggaagacgtgacatagtttccaacccatcctagccatagacaagagtaccgacccaatcccacctacggccggaacacccgggacaggcaggcaggactgagcccctagcagcaggacaccggccctgtgccatgacatctcgactaccgggccgcagctcgtgtagccttcatttgccctggagaatgtccatcgacccccgacttcatccacctccatccgtgtacttttgtttataaccagactgagccacaaactaagccttacccactagacatgtggaagtacggtagtgctttgcaacagaggcccgaagaccggtccttatatggccgaggtgctactatcaaaaccatgcaccccgagcccagcctaaaaccattttggggattttgaatagagggggaggtgtgaagccaattccacgataatccaacagttccaaagtgtccaggtgatatgaatattcccaaagtctagagttgtaaaaccacctaatgttacctaattaaacagcgaagcatctacctaaaatcatgctagtggtaccatgagtagagtgtccactagttggggttttgtttaatctagggtgaacaaggaaatactaacaataacaataataataaggtcataacaaaggtaaataggcatggctagataaaacagtgataacgcgggaatttaaataaagcgataatgcaataatttaaatcaacataattttacaaactgggattcaatatgttcaaagatgatgtgacttgccttgctcgctttcccaaacgtcggcttcaacttccacgaagagcggatcttccgaagctgcagcgtctacacgaccaacggaaaagaaaaggcttttactctaataaactccatataacaagcagaaacaaagcacaaaaatgggttcttgacttcttaaggaaaaattagagacttgaacggtccaattccgagttcaaatggtcaagttatggccatttgaagtttatatgctctttaaatgaatatttgcgaatttcttcatttaaattttaatttaaaatcggatttattgcgtcagctgaggggaggggcgcgcggaccgggtccacgggagtggggcccacgcggcagcctcacggtccacggtggaccgggtgcacacggcttgcgccggccggcgccgtgggtcccacgcgtcagccgcacccgagggcgcgggcggctgacagccgggccccacatggcagccgcggggcgcgcccgatggcggcctcgccggcacggccgacgggaggcggcgcgcccgcgccccgatggtcaccggcggcgacctccggcgcgacggagcggcgcccgagagaggggagggaagggggaagcgagatggcagtcctcggctcaccccgggtcgacggcgatgacgggaacggcgaccgaagcggagagaggcggcggcgcggctcgggtcgacgaggacggcggcgttccggcggtcggcgggcgaaacgaaggggtggacgaggtcgacgaggacgcggcgaagccgaaggaggcgatgccgaagcgggaggaggtccggggcgacgacggcggcgaaccgaagctcggcggcaacggcggagagagaggacgacggcgcgagctcgattccgacggggagagaaagcggcaagggtcggaaacggaggagggaggcacggggagtgcttaaatagtgttgggagtgagagagggcggccggaggggaaggaaaccggcgcggcgatctcggctccatcaatgacgccggcgaagtttgcgggaggatttccaaacgaatccgagagagagagagggaaaagtggggggaaagagggagggaatcacggggagtgatttcccccctctttattgcgcgcgggggcggcgggatgcggcggaatccgcggcggcggcggcgctagggcacgggcgaggcggcgggcgcggcacgaggtaggggatgacgggtgggccccacccgtcagcgagggtggcgggcgggcccgcccgtcagtgacgcgcgcgcgggggaaggccgatgggccgcgggggagaggagagagagggagggagctgggccgagccggcccaagagaggaagggggaaaaaggacttttagggatttttctttttataaaaccactttaactttgtttatttcttcttaattattatttgtgctctgaaaattccactaaaatttatttacgcattttaggcttttaggaaatatacaaaaatcctccaagccttatttgacttttaactttgcacattttaattgttggaggctttcacatggattttactaattctatgcacaatttcgaggatgtattttagagtcgatttgggacgcgacaaacctacccccttaaacggaatctcgaccccgagattcagaaggactggcgaagagatcgggatgggctgccttcagctcgtcttcacgctcccaagtagcttcttcctcggcgtggttgctccactggaccttgcaaaaacggattacccggctcctggtcctgcgctccatggcgtccaggattttaactggcctctccacgtaggtcaagtcttcgcgaacttcaatttgctctgagtcggcctgctcggatggcactcgaaggcatttcttgagttgcgacacatggaacacatcatgcacgttgcccaaggaggcgggcagttccagctggtaagcgacttctccgcgccgagcaatgatacggaaaggacccacgaaccgaggtgcgagcttcccttttgtccgaaagctgtgtacagctcgcaatggtgtgacccgaaggtacacaaagtcatccactgcgaattccaggtcacggcgatggttatctgcataacttttctgccgggactgtgccacctttagattatcccgaatggttctgaccttcgcttcagcttgtctcaggatatcagtcccgaacacttggctttccccaacttggtcccacaatagcggtgtccggcacttgcgtccatacaacgcttcataaggtgccatttgtatactggcttggtagctgttattgtaggagaactcggcataggggagactcttatcccaggtcttcccgaaatccaggacacatgcgcgaagcatatcttctaggatctgatttagacgctcggtctgcccatctgtctgcgggtgatacgcggtgctgaaatttaatcgggtacccagctcttcttggagcttcttccaaaagtgagaggtgaactggcttccccgatcagatacaattttcttggggacgccatgcagactgacgatcctagcgaagtagagttcagctagtttgttccctccataggtggtctttacgggaatgaaccgtgctaccttggttagtcgatccacgactacccatatagaatcatatccgccttgggtttttggaagtccggtgat

SEQ ID NO: 28924 - DNA, 3353 bp, Oryza sativa
  unsure (1)..(3353): unsure at all n locations
gtatgggcgcaaataccgcacaccgctaatgtggaaccaagttgaagaaagccaagtgttcggaactgatatcttaaaagaagctaaagctaaagtcagaaccattcggaataatctaaaggtggcacagtcccggcaaaaaagttatgcagataaccgtcgccgtgatctggaattcgcagtggatgattttgtgtatcttcgggtcacgccattgcgaggtgtacacaggtttcggacaaaagggaagctcgcacctcggtatgtgggtcctttccgtatcgttgctcggcgcggagaagtcgcttaccaattggagctgcccgcctccttgggcaacgtgcatgatgtgttccatgtgtcgcaactcaagaaatgtctccgagtgccatccgagcaggccgactcagagcaaattgaagttcgcgaagacttgacctacgtggagaggccagtaaaaatcctggacaccatggagcgcaggaccaggaaccgggtaatccgtttttgcaaggaccagtggagcaaccacgccgaagaagaagctacctgggagcgcgaagacgagctgaaggcagcccatccagatctcttcgccagttcttccgaatctcggggtcgagattccgtttaaggggggtaggtttgtcgcgtcccaaatcgactctaaaatacatcctcgaaattatgcaaagaataagtaaaatccatgtgaaagcctccaacaattaaaatgtgcaaagttaaaagtcaaataaggcttggaggatttttgtatatttcctaaaagcctaaaatgcgtaaatacattttagtggaattttcagagcacataaaataattaagaagaaataaacaaagttaaagtggctttataaaaagaaaaatccctaaaagtctttttcctcccccccttccccctcttgacatcannggcccacgtccatccctctatgtcatctcccccgcgacccatcggcctcctccccgcgcgcgcgccgctgacgggcgggcccgcccgccaccctcgctgacgggcggcgggaatttaaataaagcgataatgcaataatttaaatcaacataattttacaaactgggattcaatatgttcaaagatgatgtgacttgccttgctcgctttcccaaacgtgggcttcaacttccaagaagagcgggtcttccgaagctgcagcgtctacacgaccaacggaaaagaaaaggctttgactctaataaactccatataacaagcagaaccaaagcacaaaaatgggttcttgacttcttaaggaaaaattagagacttgacgggtccaattccgagttcaaatggtcaagttatggccatttgaagtttatatgctctttaaatgaatatttgcgattttcttcatttaaattttaatttaaaatcggatttattgcgtcagccgaggggaggggcgcgcggaccgggtccacgggagtggggcccacgcggcagcctcacggtccacggtggaccgggtgcacgcggcttacgccggccggcgccgtgggtcccacgcgtcagccgcacccgaggacacgggcggctgacggccgggccccacatggcagccgcggggcgcgcccgaaggcggcctcgccggcacagccgacgggaggcggcgcacccgcgccccgatggtcgccggcggcgacctccggcgcgacggagcggcgcccgagagaggggagggaagggggaaacgaaatgggcggtccatggctcaccccgggtcgacggcgacgacgggaacggcgaccgaagcggaggaaggcggcggcgcggctcgggtcgacgaggacggcggcgttccggcggtcggcgggcgaaacgaaggggtggacgagatcggcgaggacgcggcgaacccgaagaaggcgacgccgaaacgggaggaggcccggggcgacgacggcggcggaccggagctcggcggcgacggcggagagagaggacgacggtgcgagctcgattccgacggggagagagagcggcgagtggcggaaacgaaggagggaggcacggggagtgtttatgtagtgttgggaggaggagagagcggccggatgagggggaatcggtcgcggaagatccggccgccattgatgcgccggcgaagtttgcgggagagtttccaaacgaatccgagggagagagagagggaaaagtgggggggaaagggagagggaatcacggggaatgatttccccctctttattgcgcgcggggacggcgggatgcggcggaatccgcggcggcggcggcgctagggcacgggcgaggcggcgggtgcggcgcgaggtaggggatgacgggtgggccccacccgtcagcgagggtggcgggcgggcccgcccgtcagcggcgcgcgcgcggggaggaggccgatgggccgcgggggagaggagagagagggagggaggtgggccgagccggcccaagagggggaaggggggggggaaaaagacttttagggtttttctttttacaaaaccactttaactttgtttatttcttcttaattattatttgtgctctgaaaattccactaaaatttatttacgcattttaagcttttaggaaatatacaaaaatcctccaagccttattcgacttttaactttgcacattttaattgttggaggctttcacatggattttacttattctttgcataatttcgaggatgcattttagagtcgttttgggacgtgacacattagtacacattcgggacaacttatgactcactattatttaatgatggcttaatgatagttcacgatggtcaatcgtgattagttaattaattaatgtgccaactaaaacctggtaatggtgggttgtgagcacatggttttgatggtcgtgctcatgacaattaaggaccggttcacgagtttcggttgtgaaacattaaccgtgccaaccacaagccagcatgggcaacggctttatcttttgtatagcatggttcattgcggggcaccagactgagaagtggcggagataagcccacgggggtcgctggggagtccatgccttgtttataagggggtgattatgatccaggaaggtgcgctgcagtggattgtgttatgcgaggggtattgtcacaactcctttccgagataccgtggtggtattgaggcacatggtgacataatgtggggttgtgtcttgtgggtacagtggtacacctctggccagagtaaaactattcgaatagccatgcccgcggttatgggcgggtctaacaatgtctttcgtgattagtttcacacttctcaccttaatgaatgatgctatattggtaataatt

SEQ ID NO: 28925 - DNA, 8244 bp, Oryza sativa
aggaagagttcttcaatgaggctgatggtgtggaggagtaggtgtagccttggtcaagctgcctgtggagtgaagccgtctacgccgtttaatttatttttccgctgcttagatctttattgattgagaggaactatctacctctgtaatgacattttatacgcttattaattagagtaataattgtactctattatcaatttgttattgtgtgcctcggctaattcctggacgagggttcacacacatgtaagcgtttggaattttggatagaaattccgggcgtgacaagttggtatcagagcctccttgaccctaggttatgccaaatggttacccatagaagccctctaaaaatattggaaaagtagaactgttctcctccctttctcttttaattaaaccaaactaatggcacatacacttcataatcccttttaatggttctcattcaaaatttattccagtgttattagtaccgtacatctattactgtactaatggcttatttatcagcaaaagttttacaatattgttttatttaatcttgctgcaataaaataaagttagcatgttgattttataactttcttttatttcttttgaaacctgttattcaaaagtacaaaatttgtgaccttgtttccaactgttttaacttatcttgcaagtttggtttactttatttacttacctttttactctgatttttctaaactttattcaaattaatccaaaaacttgtgctgttaattggatagatgtcttaactccctcctttcacttgtctttagatgccgcgctacaagcctgagtacctgtttggtgttgagggttttgtccaggagttgcgtacgatgtcctttgtcataggatttgggactgcccctttttatgctcagattcctcatgatcgtcatgaagagaagtgccgagtcaaagtcaccttgaatagtaatagtgaagatgtcccctcagtgatgttcgaagctggaggaagaaactacatccatgcatgtcaggaagtggcaaggatcgccataggagagctccgtgatcgctacagtgatcggttggctgacactgagtatcgctaccatcctcgtcaaccacagggaagtgaccgtggcagctaccttgagactgaaggaattgagaatgatgctaccacaaggcatttagttgagatgctgtgggctatggatgaaagccgtgcagagactgtgttagcggctcaagatcgtgaagattggaatcgtggtaagatttgcaagttagaagacaaggtggatcgtttggagaaggaactagccgcgttgaagggagaagcaccaccgcagaaggccaggattcgtcttaccgcaaggaagagagctctatttgtccctcgctatcaattggcgccaaaagttcgtgtggtggagaaagaagttgccccagcagatcctccggtcatcatcataagtgatgatgaagaagaagaatccaagcgcacccattccaagattgagtgggtagcaactcaagatgatgaagacgagccgaacgagcctacaatcgacctccgatgctcggaagaactagagtgacttgttaagtcgttgtcttagatcgttgtgttagtttgcttgctttaagtttgcttgtgtgtgtctcgcatgtgatttacatcagtggtgggatgtaagtgcatgcgtttgtttgcttttgagtgttaggaagttggtgagtttagtggtgtgagagtcttcagtttgtaataatgaaactcagttaagatcaataaaagttaaagtaattctctatcctaagtagtttcccccggtttctcttcttgtgccctgccagatggtgctcactcgcagcaacgggaatggccccaacagcaacaataacaacaacaatggagagaacccaacacttgctcaagttcttgctcaacagactcagttaatgaacatgatgatgcagcaacttcagaatcagcaaaaccaaggaaataaccatgcacctccccagaacaagttagcagaatttcttcgtgtgaggccgcctattttctctagtaccactaatcctgttgaagctggtgattggttgcatgccatagagaagaagatggatttgcttcagtgcactgatcaggagaaggtctcatttgcatcacatcagttgcttggccctgcctctgaatggtgggatcacttccgcctgaataggattactgctgaacctattacttggcttgaattcaccgctgctttccggaagacgcatataccatcgggagtggtgtctctcaagaagaaggagttcaggtcgctcacccagggatctcgctctgttacggagtatctgcacgagttcaatcgtcttgctcgttatgctccggaagatctgcgcaatgatgaagagcgccaggagaagtttttgggaggacttaatgatgagctttcttacccactcatggttggagattatcctgatttccagaaattagtggataaggctatacgtcaggaggacaagtacaatcgcatggagcagaagaaacgccggattgctcacttcaaggcacaacaggggagtaatcagaagccgcgtcttactttaggaccccagtctgtgccacagggaggttcttcgtccattgttcgtccgcagcgtcagttcttcaacaacaatgctggcaacaacatccgtaatcaagtcccacgtcctgttgctgcctcgacacagcaacaacctgccaagaggaagcaaggcagcaagcccgtggtgtgtttcaactatggagacccaggacattatgctgacaagtgtccgaagccccgacgcgtgaaggttgtccctgcccagaataactctgctgtaccagcatcaaaggcccgtgtcaatcatgttgctgctgcagaagctcaagatgctccagatgtgattttgggtacgttccctgttaactcagttcctgcaactgtgcttttcgattctagtgctacacattcattcttatctatgagttttgcgggaaatcatgggatggaagtagaagatcttagacgtcctttgatggttagtaccccaagtaatcaagcactctctctgcaacgtagcccctctgtcagaatagaaattcaaggggtaccatttctagccaatcttatcttgttagaatctaaagaccttgacgtcattctagggatggactggttagccaaacataaaggtgtgatagactgtgccaacagaaaagtaactctcatcagcaatgatggtcgagttgtaactgttcatgcattgtcatctgagtttttaaggtcaagactgaaccagataactttgggagagattcctatagttcgggagtatcccgatgtgttcccagatgatttacctggtatgccgcctaaaagggatatagagttcagaatagatttggtacctggaacaactccgatccataagagaccttatagaatggcagccaatgagttggcagaagtcaaaaggcaagtagatgatttgcttcagaagggatacatcagaccgagttcatcaccatggggagctccagttatttttgtggaaaaaaaagaccatacccagaggatgtgtgtggactatcgtgcactaaatgatgtgactatcaagaataagtatccgctacccagaattgatgatttgtttaatcagcttaaaggtgccactgttttctccaagatagatcttcgatcagggtatcaccagttgagaatcaaagagtaagatatacctaaaaccgcttttaccactaggtatgggttgttcgaatgtacggttatgtcttttggacttaccaatgctcctgctttcttcatgaacttgatgaataaagtatttatggaatacctagacaagttcgtggtggtctttattgatgacattcttatctactcccgaaccaaagaagagcatgaagaacatcttcgccttgcattggagaagctacgagagcatcaactgtatgctaagtttagcaagtgtgaattttggttgtctgaagtgaaattccttggtcacgtcatctcagccggaggagttgccgtcgatcctagtaacgtggaatccgtaaccaattggaagcaaccaaagacagtttcagagattcacagttttctaggcctcgcaggatattatcgaaggtttatagagaatttttccaagattgctaagcccatgacacgcctgcttcagaaatatgtgaagtacaagtggtcggaagaatgtgagcagagttttcaagagttgaaaagtcgtttaatatcagctcctattttgattttgcctgatccaaagaagggtttccaagtgtattgcgatgcatctaaacttgggttaggttgtgttctgatgcaagatgggaaggtggttgcctatgcatctcgtcagttacgtccgcatgaaaagaactaccctactcatgatcttgaattggccgcagtagttcatgcgttgaaaatttggcatcattatcttttcggtactcgtacagaggtgtataccgatcacaagagtttaaagtatatctttactcagccggatctgaacatgagacaaaggagatagttggaattaattaaggattatgacatgggaattcattatcacccgggaaaggctaatgttgtagcagacgctcttagcaggaaaggttattgcaatgctaccgaaggatgacagctgccattggaattatgcaaggaatttgaaagattaaatttgggaattgtcagtagaggttttgttgcagccttagaagcgaagcccacactaattgatcaagttagagaagctcaaattagtgatcctgatattcaagagatcaagaagaatatgagaagaggaaaagctatcggtttcttggaggatgagcaaggaactgtatggttgggcgagagaatttgtgtccctgacaacaaagatttaaaggatgcaattctgaaagaagctcatgatactttatactccattcaccctggtagtactaagatgtaccaggatctcaaggaaagattttggtgggcaagtatgaagcgtgaaatcgcagaatacgtagcggtatgtgatatttgccagcgagtcaaggcagaacatcagaaacctgccggtttgttgcagcctttgaagattcctgaatggaaatgggaagaaatcggtatggattttatcactggtttacccagaacgtcatcaggccatgactctatttgggtaatagtcgacagacttaccaaagtggcacatttcatcccggtaaagacaacttattccggaagtcggttggcagaattatatatggcaaggattgtgtgtttgcatggtgtccctaagaaaatagtgtctgatcgaggcagtcagtttacttcaaatttctggaagaaacttcaggaagaaatgggttctaagctgaactttagtactgcttatcatccacagacagacggacaaaccgaaagggtgaatcagattttggaagacatgttgagagcttgtgctttagatttcggtggaagttgggataagaatctaccttatgcagaattctcgtataacaacagttatcaagctagtcttcagatggctccttacgaagcactgtatggtcggaagtgtcgcactccgcttttgtgggatcaaacgggagaacgtcaggttttcgggacggatatcttaagagaagcagaagaaaaggtaaagatcattcaagaaagattgcgtgtggctcagtctcgtcataagagttatgccgacaatcgccgtagagatttgagttttgaagaaggagattatgtgtatcttcgtgtcacgcctcttcgaggagttcatcgttttcacaccaaaggaaaattggcaccgcgttttgtgggaccttataagattgtcagtagaagaggagaggttgcttatcagttagaattacctcaatctttggcaggagtctataatgtgttccatgtgtcacaattgaaaaagtgtttaagggtacctaccgaagaagctaatattgagcagatagaagtccaagaggatttgacctatgttgagaaaccaatccgtatcttggaaacaaatgagagaagaaccaggaatcgagttatccgtttttgcaaagtccagtggagtaatcactcggaagaagaatcaacttgggaacgagaagatgaattgaagtcagctcatccgcatctgttcgccagttcttccgaatctcgaggacgagattctgtttaaggggggtaggtttgtcacaccctgaaaattcaaaatttataaattgttgtttaattggaatttttagaaataattttaaaagtcttgaagaaaagatctaattttaattaataaattccaatataaaatggggccagataaaatttcattaaatactttgcttaattctataattcctagattttttctgggatttatttgagctaaggaagtatttttaataaatggaattgcatttaagaaataatttaaattgaaaaaggttttaaaaagtctcttttggctttgggccgaaagtcggcccaaaaccgctctctctctcctcggcccagtccggcccagtccgcagctgccgcgcgcgcgcgccctcgctgtcgctgacaggtgggtcccacctgtcaggcccgtcgtcttcctcgggccgaaaccctagtttcgcgccgccgccgccgctttccaatccggccgtccctttccttctccggccgaattgatagaggggaaatgatctccgggatctcctctaccttttctcctttggaatctttggctaaatcgttttggaaagcgttggattcgagtttgtctcggattcgttcttcccgatctttccttcctcgccgccggccgccgtgggcctttgccgtcgcctccgagcccctttaaaaggacccccggtgtctcctctacccgtcgccaccctcgccttcgcctcacgtcgtcggaatcgctctagcgccgtgtgccctagctttgccgtcgccgtcgccgctccagccgtgcgccgccgtcgtttcagccgtcgccgtcgctcgggaagaccaccgtcgtgctcgccaagtcgtcgccgtcctcgtccgcctcttcgctgtcgccggagatcaccggagcagcatcgccgtcgtcgacccgaaggttcccgccgcttcctcctcgtcgccgtcaccgtccgttggtcttccgccaccgtttaggtcaccggtgagttcgccgcgttgtcctctccgtcttggtgccctccgtttgcgtcctagcaccgccgttcgccgacgagcgtgcgccgttcgagccgtctcctccgccgagccgccgccgctgtcggtgatgtcaccgctgacgtcatcggggtcgtccgccgtgagccgccgtggacccgatcgatctcggccgtccgttttggatcaagttgatctcggccgtccgttcgtgtgaaccgccgcccgtgcgcccggtccaccgaaaccctagcccgctgacgcaataaaccttcttttccttttcaaaaataattcattattgcgtcataattcaatttaagccgatataagtgttttaatccgatttaatctttaaaaattcataactaattcatcttagctccgatttagttggttcaagtctctaaatttttctaaaattgagatctacacattaaaaatatccacatgtactgttcatgcttgtttatgtgctgttttggtgattttgttcttttctgcttagattccgtcgtttccggagagtccgttttcgcagaagaagagtttgaagagttccaaggccagcaaggcaagtcacacagatcccaaacaaccctttgagcatgttgatcctatttaaagctattgtttctattcaactattgcatttattttcgaatgtcattgggtggaattaacctattctttgttatggcccttttgtacttgattacttcattccttcataccttgggttattacaatttgactagttgagctttatttatattggttcaactagatattagatataattgcttagcctgcttagaaacattatgtcacgaccggaactgacccaacgggcgttccttgtgtgcgtgcattaatccttgtcccaggaggccaggtacaccaaaagttgatacaattcagagtttaaccagcccaagcgtaaatagataatttattacatgggcagcgaaggcccagc

SEQ ID NO: 28926 - DNA, 2088 bp, Oryza sativa
tcatgcttttttatgtgctgatttggtgattttgttcttttctgcttagattccgtcgtttccggagagtccgttttcgcacaagaagagtttgaagagttccaaggccagcaaggcaagtcacacagatcccaaacaaccctttgagcatgttgatcctatttaaagctattgtttctattcaactattgcatttattttcgaatgtcattgggtggaattaacatattctttgttatggcccttttgtacttgattactacattccttgataccttgggttattacaatttaactagttgagctttatttatattagttcaactagatattagatataattgcttagcttgcttagaaacattagtacacattcgggataacttatgactcactattatttaatgatggcttaatgatagttcacgatggtcaatcgtgattagttaattaattaatgtgccaactaaaacctggtaatggtgggttgtgagcacatggttttgatggtcgtgctcatgacaattaaggaccggttcacgagtttcggttgtgaaacattaaccgtgccaaccacaagccagcatgggcaacggctttatcttttgtatagcatggttcattgcggggcaccagactgaaatgtggcggagataagcccacgggggtcgctggggagtccatgccttgtttataagggggtgattatgatccaggaaggtgcgctgcagtggattgtgttatgcgaggggtattgtcacaactcctttccgagataccgtggtggtattgaggcacatggtgacatgatgtggggttgtgtcttgtgggtacagtggtacacctctggccagagtaaaactattcgaatagccgtgcccgcggttatgggcgggtctaacaatgtctttcgtgattagtttcacacttctcaccttagtgaatgatgctataattggtaataatttgattagctcctggtttggaatggtatattcctggtttggagatagaactgtgcagccgggatggttgtacagaatggttgggcctatacaacagggtatgttgtatagtgttggattaatattgtttaattattacttaactgttttattaaattctgaaatgtttgctaaatgctgcttttgcaaatggaaccctattatgccatcctttgttatcctgtgcacttgcatatttgctgcgtggcttgctgagtatgtcatatactcaccttgcaatcattcatcagaggaagagttcttcaatgaggctgatggtgtggaggattaggtgtagccttggtcaagctgcctgtggagtggagccgtctgcgccgtttaatttatttttccgctgcttagatctttattgattgagaggaactatctacctctgtaatgacattttacacgcttattaattagagtaataattgtactctattatcaatttgttattgtgtgcctcggctgattcctggacgagggttcacacacatgtaagcgtttggaattttggatagaaattccgggcgtgacacttaagcttgacctttgggacatcatcatgtaagattagtgtgaaaacatatacgagatttgcagtatttatgataaataaaaggatccaagaccacttttctaacatgttggaaaaaagaatcgtaaagtggttgtggtcctcgcacgagggggtagtactaatcgaacaggagtctggggtttccttatatgagcatgaatcatgagggattttgaaagagaaggtttcatgctcatttgtggagtgatttctcttgtccaccagagctgatgtctcaagcttgtccatggcctgaaggttctccttgccaaaggatgtgtcgtgcatgatcgaggttgtttcctgacaactatcaagaacaacatctcgagggccagagggacaaggtttaggctcgagatgaggttgcgatggtggttctatggataacacttcaagggtctcgccggaatcttctttttgaatgaaatgataaacatcctgttctaaaagggattcaggggactcatgaagcagaatcgccattacttcctctatggg

SEQ ID NO: 28927 - DNA, 13547 bp, Oryza sativa
  unsure (1)..(13547): unsure at all n locations
gtttgactgcgacaccataatgangtgtgtgaataagctatgacanggtgactctcncacttacacatataatcatcgtccttattctcataatagtattcgttattctctctanttcctcctcccnnccnccncccccaggaggtttggatttgcatttgcanctaccgcaagnagcncatcactcaacgattcgctccgattcttgggggaaaagaaagaggagaacgagaggaacaaaacccctcaaaaacccggaggaatcggggtcggattaaggcggatttggaggtagaaggcggcggcaaagcggcggctcgggcggctcggccggaggttgaagacgagcccgacatgtgggccccacatgtcggtgactcgagagagagaagggcgggcggcggctgggccggcgtgggccgcgcggaagagagaggatgttgggccgaattcggcccaacggcttagggaggggtttctttgaactttttcaaataaaacaatttgtgaaatgttgtttcaattaataaaaatacttcccttgctcaaataattcccagaaaaatctagaaaatagaggagcaagtatagtatttaataaaattttatctagctcatttttatattgaaaattttcctagaaaattagggtttagcttgtaggcttttaaaataatttctaaaaatgatttaaaatatgcatttttaatttagttgatttttagggcgtgacaatccccttacaaaaacagtttgaaaattttcagaaaaatttctctgaggccgatctgaccgaaggtgtacagccggtctgaccaagggtcggtctgaccactgctgtaccgttggtctgactggtgctcagtctgaccgaagcacagccgccggattgactggtcgccggtctgaccgcgggacccattgcggtctgaccggtttcctcgagaaaacaccagatttttgccactttgattttgcaaaagcaatttctctctgctttttctatctatgagctaatctaaaacaaaaaccaacaagatgtccatctttaccacaaaaagaacaagcatcctttttctttagaagaagatggttttgaaatatttgtttttgtttattttagtgttgtagaaagagagggcataactccagcagacttgaaaactgttttcttagcactaggtttggtcaaaatttagccatgttcagtcacactcaaaacattgggttgattttttattgaaaaagtcatgaacatcaaaacgaacacccctattgtagctagtcactttagattgatccaaaataatgttaagttgtttcttaccatcagaaaatctttgcaaagaacttttcaaataagaaacctatttttccaaattagcacaattttcacaatctaccatgacacttttgctttttcgacatttggggcaagaaagcacttcattggttttcacaacatcttccatgtactcaacacgacctaaagcatgttttagtttcatcttgtttagtgtgcatattgagcaatcaaaaacactttgttgttgttgttttaactttttagcacaaaccatgttaaacatcaaactagcatgaaaagatatttgatatttttttcaacaactttttagttaaaaacaactcatccaaagtacgtgtgtgcaagacaaaaccaagagcaagacaagatctatttttcaaatgatgtgcaacgttgacatctctaatttttgaaatttcatgcattaaaacctcacaatttttgcaaccatcatcattaggaataagagattttaatctataaattttagaattaagggattcaataataaattcctgttttctatacatcttctcacacttcttattttttgtacttaaaataagaatagcttcctcaaaagaactcacatcattgtcttcacactctgaatctgattcaccatgtgccatgaagcaaacaccggagatgttctttcccttatcttcatcttcactttctccatctacatcgcttagtggctcaaaagcggcatagactttctcaaacatcttcttgagattctccttggtcttcttccccttgaatgtgctcttagactttgttctccttagtcttctctccaccattgtcttcctttttgcctctcctaagcttaggacaatgcgaacgattgagatcaagagcaccacattcaaagcaacgatcgatttggaccacttcttttcctgtacctaacattattcatagctcgagaaaacttattaatgaccaaaaccatgtcctcctcctcgaactattcgagttgctcattcgacatggcattaattaaagcaagaatagtagtaattcgatgaagaagcaccaacatccaaagaagtcaaggaagaaaccaaatcactagacttagagtcaactttacaagaaataatattcatctcatgtgttttgagttttgtgtaaagcgaatccaaagtcaaagtaaacatatcaacagactcctgaattgatgtaactttcatctcccaaatagacatgtcaagaccattcaaaaagtgacgagaaacctcagattgtgtgtaatttatatcataagaagaatcaacagatttaagatcactaaaaattttttgaacctagaaagatagtcattcaaagcttctccaggtttcatctcaaattttatatactcctttttgaaaagttatcgatgaagttctttaatatttgaagttccttgatgaaagtttttcaaagcgttccaaatctcatttgcagtttcaagatgcgaaatacgatcaaaatccgaacgagaaatcccacccaaaagaatattgtgagctttgcaattattttcaaattcagtttttaaagcaatagtattaatttgatcaggaatcacataaggattagaaacttttctcaaaatatcaatatactcaatcataatgtaagattgcatcttactacaccaataaagaaaatccgttccatcgaaaacatggagcttagttgcaaacttattagccatggcaaaaaaaactctagatcagttaaaatccaaaaaaaaaacaaggttctaatactacttgtaggatcgaatagaagaactaagccaaccagagggggggtgaatggttggtatacccaaaaacccaaactttttgtggaattaaaagttacactcaaattcgacggatcgtggtctgaccgaagttgtcccgtcggtctgaccacacttgtgccgtcggtttgaccgatgtagatcgcccggtctgacagccccgaagtcgccactgcctcctgatgccaccgccggtctgaccgctgcgatgccgttggtctgaccgccggtgtttcgccgggtagactgctgaatccgcgtaaacacaaattgaagaactcaagatgtagatgacaactttattacttttctctgtgtttacaaagtgcaacaacagcactcctcatgaaaatctcgactaaactcgaaatcctaactaaactatcaactcaatggtctcagaagcaataccgggaagcctcacgctccctctctatttatacataaggtaggcagcctaaagccacgaaccaaactcatactagaagtcctaatccacataggaaaccttcccgtacaaaaaacaaacattacaaactccaatcataccaaatttggccttccaaatttaactccacatcccatatgcacacaatacatccatcgtatgccatatggaatcttcaccaaccacgtgcattgaattctagcctaagtatccgcatgatatctaaccatcacggacgtcgccttatccccaagtcgactcccgatctatcaccagcaatactctctagagacatcaagtcacctatacatgaatcaaacaaagaaaccatattccgagactaagctatctccaacttgactcattgttagcaaacaacagtattacatacgaatagtatccatctagaagccataaacatgaaacaatcatggatatccaaacaaacaacccgaaaccgaaaccgacacagagtcggccggtcagaccgctcgcatagcgccagtatgaccggcagcacctgcccggtctgaccgtacccgacaaaacagcagcacctgttaatcacttgaaaatccaatcatctccaaaaccacttcgccaataatctctaaatatcaaaaccaataattacaaatgccaattgttcatcacaaaataggactcaaaaacactttgattttacatccaatacctatttagatgtaggtaattgggagggagttcttttctaagtacgatgtgataaatatgagccatacattatcacttaaaattcaattcacatccatacttcccatgattctcatctctactatcaaacaaaggaataggaataaaaatgaaactcccatgatcagtcgtcctctaaacttccaatccgctttccatctcttgccaaacaggcagtataaggcctacacaagaactatttcaattcaaaaattcatacaaatctctatcatttgcagggagacctaaataaaagcgcaatggcgtcttacataacattatcgaacattttgcattagcattcatgtttccttggccacagcacgaagtggcttagccatggacaacacaagaccaaactcttctgccatgtccaagtcatcacccttaacttcatcagggatcgtccactcaaaccgatgcagtagtgatgcaagcatcagatgcaggcatgcagcatcccttctgctaatggcatcccaaggcagatgcgtcgtccagcaccaaacggtatgaactcaaaattggttcctagaaaatttatatctctacccaagaacctgtatggcatgaacttgtccagatcatcccaaatcttagctctcctacaaattgcccatatattcacatatacagttgttccctgaggtatcttgtagccctggatttctactgtggcctcagccttgttgaatgctattggaacagttgggtgaagccggagggtctctttgatgacagcttggagataaggaagctggctgatgtctgattctgcaacgtgagtttttgtgcccataaggcctttgagctcctctggaagttgtatcatggactttggattttgcagtaactctgccattgcccactctattgtacttgaggttgagccgcttccagcgacgagcaaatcctgataaattgcaaaatatgtttaaaactaaacgtgcattccgtatgtgtgatgtgtcttccatattaactcaaacaattcatacacctataacaaaataaagcttaggtggacttacgtattttcctaaatactgccatttttggcaaaaatatcatgtactatcttttaggtatctaatgaaataaacataacaaacttttactcactgtaaaattttgcaaaattggctgtcgagagaaaaaaaaactgtattaataaaatgaaattgaaaacctgtaaaaattgaatcacaatgggacagtattaatattaccatgaacattcccctcatggtgtcttggttcatcacccatccttcgctttccacttctccttccatgtcaaacgccacatccagcaagtcattcttgcgaggctcgcagacgatgcggcggcgccgccgccggtcgatctgcacatcgatgatgccgtacacccatccgacgagattatccatccttcgccgcacgcccatgacgtcggcggcagcgatcaccgggaaatagtcagacaggttcggcgctccggcgaccaccaccgccttctcgatgacatccctcagctgccgcgtcgtcgcggcgtccatgtcctcagagaacatgctccaccacagcacgccagccaccgctgcgaacgcctcgcgtgccaccgacaccggcatgcccccggcgctcccgtcggacacgcggtgcgcgagctcacgcgccacctcctcccgcatggcatgtgtcacaccctgaagttcttctcgcaagtctaaattaatttaataaattacctcaagaaattatctgtgtattggcaagagagaaaccctaatttaataaatgcaaataataatcggaattggcatatggaatttttgttcacttctacaagtcaaaatatgctaacaggattttcagtagaattttcagaggtcaagaaataattttaaccaattaaaaatgaacacaagcaattattaaatcccttgaaatccctttttttttccctttttccttcgagtgggccatcggcccattctcccctcccctccccgtgcgcaagctgggctggcccgaggccaaggcctagcaaccggcccagccgccgcctcgcacccccctctccctccctctgggtcaccgacaggtggggcccacctatcagccccgtcccctacctccggccggcgccgcccgcgcccgcaaccgccgctcccgcctctcccgcacacgcccgcgcatgtcgcccactccccgcactcgccccgcacgtcccgcaactgctgcccctcacccgcccatgcgccccaccgagatggccgggattcaatttttgaatcccgcctctatctcctccccacctccccacgtcgccggccgattcccgcgcctctcggcttcatctcgcccccttgtgcctataaaaagcaaccccgtcccctcctctaccattttcccgttctcgtcgagctctcccgtgcactccaccaccctagcgtcgcgcaccacccgctgccgccgcttcagccacctccggccgccactcgccgccactcgttgccgctagagcccccgccgagcctcgccgtcgctgccgtcgggttcacaagcccacgggccacgccgcccaccccttccccgtccaatgccgccgccggagtccggcttccaccgtgcgccggtcagctcgccattgccacctcctttggccggcgattttgcccatctcgctccctctctccctctctaatcacactcatttgcttccctaggttaccccggagcccgtcccgccgtagccgtcgcttcccgccgctcaccgtcgtcgatcgccgtcggtgaggcccctccccttcttcccctctctctcccgcgccgcctagcgctgctgctgcttaactgccaagcctccgcgccgccgcctagctgcgttgccgttgctcgctgccgtcggctgcgccgccgcctagccgtgtcgccgccgctcgcctcctcgggccgccgcgcgccagggccaccgggccagcttaagccgcccgcgcgtgcgctcggccgtacgccgccttcgccgtctgatctaccctcgggtagatcggggccatccgttgccgcccgcgtggcagcccacgtggccgccatgtgtgcgccacgtggcgctccccatccccgatcccgtggactcggtccactgtggaccagcggacttgagccgatgacttgtggggctcgcatgtcggcgccccccccccttcgctgacgtcaccagggttaattattgtgcaatgaatcaattaagttttttctttttatagtaaaaaaacacagtgaatcttctaaaattcatagataattcatccgtgctctataagccattcaagtctcagtaaatcaagaaaaattcaaagaatccaattaaaatggttttgttctctatttcagtagtcttacagcctgtttgcattgtttgctttgtatgtcgcatagattccgactctcccgacgctccagtgtacttcgaaatagtcgccgaggttcctccagccacagagcaaggcaagtcatgattgtcacttgaacatgttgatcccatattggaaatgctctattgctttcctttaaatattgcattgttttataatgttaccatgggatgattacctactgtctcagccatgcatgttatttgatacctttatactttgctagcttgggttgtaacatgattagatgttggattagggattgcttagccatgcctagttcaactagtacacaatgggggaactacattaatacatagacttcagattctagtattgatgttggattagtgccaccgctttggtgttggttaactaaaatatattaaatggtgggctgtgggtgcatggctttgatggtcgcgcccatggcaattaaggaccggttcgcgggatgccctggaagaatttatcgtacttaccacaagccagcgtggacaacggctgggcttgtagtgtagctttcctctagctgacgcatccaggcaagggtaggcgtgatggagcgggatgggccctgcgacggcctttggtacttccggattcacctaaacacgagaggggactgcccgctgccttgcaaggagtgggggtgaaacctgaggtatggtgtgtttggttagagggggttatgcgaagggtcctatcacggcctctttccagtatgccgtggtggcatgtcggcgcacgggaacgtgtcgtggggctgtgtcttgtgggtacagttgtacacctctgatcagagtaaaactattcgaatagtcgtacccgcggttatgggcgttcaaccagattcaacgtaattagtctcaccctagtttagtctaatggaactgattagttcaggtggtggtttgggcctgtcccaatgtggtgtagcgttgagcagtggctggtttaatattggctaattatcacaactgttttactgctttcaactactgtttataaatgctagctttatgcaaatgaactcctttagcctcctttggttatatcttgcatcatacctcctcttccggtatgacttgctgagtatagtgggtagtactcagtcttgctctctcttctccacaccagagctgaagttcttcccagttggagccatcccgaaaaagttggttttgtcgctgccatcaaggatgcctgtggaatgaagtcacctgctgtaggagtcaagtcttcaggcttagctcgcttttaccttctctgctgcatttgtaatcttttatatttttttaagccgtggatatgtatgtcaacaattgttgtttgtgtaccctagctggtactggacaggggtttaatgcacatttagcttagaaattatagttcattaatttctgggcatgaaagtgcgtagccccgtgagccgtctcggcgtgagcagtgtcgacgtttgatgtcgcgattccggtatttgcatagtatggggatcgttggtattaggatatatgcgagacttaggtaaaagagacagaggcgaggatttttctacaggttcgggccctagaattgtcaggtaatagccctacatcctgttggccgaagccggtcgttgctcttattcaccataatcacaccagtacaatatttggggtagcctatctatctgttgtcgacatagcggactgaagtatcatcacgtagtcgacaacagggtagtcttcctcctcgaatctgtgcccggcgagatcaaatacagcgctagattcctctctttggttcccgtagataccatatgaggttttcctaggcttatctctgatatcgatatctggcagcttgtcttggcgtatgtaggcttgtattggcttgtggttttgtggcgtctatgttgtccgtgtcccctctcctcctagagggcgttgtatttatacccataggtgtcctcttgtccaagtagaactaggaagaccaatatggatacaatccgagtactccttgtcgtttccatgtaaaactctagttgtctttctttatccggaactccctccatatccgaggtcagtttccatataaaacatggtatgtgatgggtcctgccgagatttagtcaactactattaggtatatggtatccataatcctaacaagcagctcctccgtgcagagcattctcatggcgcaccacttccagcgcggccacagcgcgatgctggagttggcgtggtggccgcaggcgtgccacgagtccataccgccgcggccggtgatgtcggcgttgttcctctgcaggatctccctcgcggcgtccgcggacatggcgaccacggcgcggacgccgccgagccttatggacatgagcgggccatagcggtcggcgaggcgagcgaacgcgtggtgcgggttcttgccgatgttgtggaggttgctgatgaccggcagccggtgaggtcctggcggaaaacggcggcgagcatcgagcagaggttggaagatgtaggagatgatgaagacaaggagaagagacgagatgcataggtggaagaacgccatcattctagcttgcgagttgcgacactatgcaaagtgcgcatgcattggcatttggttctattttgctagttagttctgtcaatttttttccgaaattgccaaaaaatactgtcgcaagttttttttaaaaaaaaactttccaatgttactgtagttgcagtgtaagtataatgtacattacggtgtaactgcatttagatataaagttgcatgtattattttaatacttatatacaaattatattatattagttatagtaaaattatattataattatactatagttagatttgaaagtttttgtcttaaaaaactcgtggcagattttcttttgatagtcctttttttcttatatatttttgaatgttggatgccgtttattttttacacatgtgttgaatcatttcttttataaagcaaataatatgatttttatttattttgatttgttttgtcactgatggtactttaaatatgactaatatttttctacatttacacaaattttttaacgagaaattagttaaatgtatgttcatccatatcaaacattaaataccgaagggtacacttgcacgacataaaaacaaaagagtttctagctaggactactaattttaatgtaacgcctaaccattactatttcagatgagatccgtagggacttgaagtacttcttctgtcatgacgcgtactagtaataatcataacaaaggtagaatatatcagtctttcgaagataattgaatactccctctatttcaaaatgtttgacaccattaattttttatacatgtttgaccgttcgtcttattaaaaaaattataaaatatgtaaaactatatgtttacatgaaagtatatttaagaataaatcaaatgatatgaaaagaataaataattacttaaattttttgaataaaacaaatggtcaaacacgtactaaaagtgtcaaacattttgaaacggagggagtactttggtactaccgtgtgctacacttatttttctgtgcatcaaatggacatttcagtattagtacgtgattgtgctgtctcgtattagttgtacatgaaatgggtggaaaaaaaaggaaataacgaacgatggaaaggaagtcaaggtattaaaaaatgattcaaactttccatgatatgatgatacagttgcacggatcaaactgagctttcagatcagatttaaatgaggaacttcgttaatgcgacgtggccatttcaaccttcacttccagattttagcctcgtggcatgaatgtctttaatgtgataggaccatatctctgaactctattaaaaacacgcaccaaatggaattcttttccaagatccaacaatgcataagttagggctaccatgcattcaaagtatgacgtttgataatttatcttattcaaataattcaaagtagttactccctgcattttgttaatatcttagtacatggctctgttggattttagtatgacgtttgataattcatcttatttaaataagttatatatgcttcatttattttgataattgtgacttattttatcactaaaagttatatgatgatacctacaagccagattgaatcagcaggagttactgacagatattttagctaattttgttgaatttattttatagagatatatttttactataattaaaaacttgattgatatgtaaggcattttaatcaggatttgaacccatgttaatatatgccaactaactatatataagtaacatagggcacacatttatcagtaatgatacgatattaagatggttaatgcattgaatatagaaacgatttactgaagaaatattgagttcaaaaattggcaatagtagccagtgataatatttttatcaatatttctcacattgattttctatggttgtgtataatttcatgcctctggaaaacattttataaatgcatcttcgtttatattgacagtatgttgatcataaggtatttcagaaatgtctctatactaatttaaaggcattttaaaagtgcatgtatagtataagaaaaatatctttacaaggtatgtttgttgtagtgtacacgacaagagtaaggacaatcatattcacttattcattttgtttaaatatatataagtataacatagtatttcaaacattggcattgtcttcaatatataattaattagacattcttaacattttaatgttgaatatatagcattttttcgactaaaaaattaaagttacacaagattgatagtatactctttcagataatttagtgtgtttcgcaaatcacgatccaggtgacatgttctttaagcgaacacatttttcgagattatggagtactgaacttcagattgatctgactactgctgggatgtctgaaaacaccgtttcaaattaatactcctaggcactgttttgatcccttctcaaaaatttttatcctgtcagatcaaatagactaaaaaaataactaattgtacagattgtgactaatttacaagacgaatcttttaaacctaattactccatgttttgataatgtggtgctaagtaaatatttgctaatgacggattaattaggcttaataaattcgtctcgcaatttacaggcggattctgtaatttgttttattattagactacgtttaatactttaaatatgtgtccgtatatctaatgtggcacgccaaaactttacacccctcgatctaaacaccccctattaacaaacaacgtgtctttacctccaactatatataaatgcattttcatcaatatttctgacctattatttccgattgggcgatatgatagcttgattcggatgcacatgtgcgtgtatcaccagtttttatattagagttagcttatacaagtgaatgtgctggacatttttctatagaagcatttattttccttgtagcataagttagaggaaacgtgttactgtacaagcttgacaaaaaattgtcagattaccggtggacgatcataatcaaatactttctttgtcccatttcaagtgcatttgtatgtttctgggttcaatatttaactgtccatcttatttaaaaaataaaaaaataagttacaaaaatattattcatattttatcatctgataacaataaaaatactaattgcaaaaataattcaaataagatggatgatcaaacgttgggcatcgaaaccatagctgcacttaaaatattaaaatagtacggaggaagtagctt

SEQ ID NO: 28928 - DNA, 12930 bp, Oryza sativa
  unsure (1)..(12930): unsure at all n locations
cgatcccccttgagtgacgtatcactggtacacnagctcatcataattcaataatatattccgggttatcaaattttgtaatatttattaagagaagcgggctaatctagtagtctaacatattgcgtgtttttatagtagaaaatcttaatttaaaaagacgatataattttttctactgatgtacatacatattttaagggtgttatagttttttttactcgtgcataaaacaatatctaaaggttttttaatagtttttcttgtcgtacttatgtacgtttctttgtttccatcgttagtacgtgcgctagtttctgatacgcacgttatactgagaggaagcaaaaatagatctaatataacagtctatttagtccaccaatttaaatgaaaatcgacggtgagattataaaatgccatatggtgatttaggagcgtttgtagggatgccaaatgacggcttaagaacgtttataagaagattaatggactttagtatataatagatagatagatgtatacatgcatcactcatccatatatttgcaacaaagcgcggggtatcaactagtttatatatgagaagatatgagacagtggatgtttaatttatagacataattattggtgtgattatttctgatttttaagaagtgctattactcgatctttataccatatattgttggaaccaaacactcattatgcattgagccacatcatctagaaaataatagttttttttcctattaatactttgatcacaaccattcatatatcatattcattgacaatccacttagcatagttattatcgtaaagctcaacattaattgagttatgccaccttagaaaaataatacccactgcatttctctcatgcttcatcgtatccgatcatgtgtcatgcctaaactgttatagaagtttaaatattatcctttaagcattatgactacatattttctaaattgttttctttgaactattttataattatttctaaaattcccacggcaatatgtggggtatccactagtgaatattataagtgtgcacaatgaacccaattagcaaaaattttccttctgtcgagcaatcatcgttaggaagtacaataatatatgtttgcttggatgggagaataagctgtatataacggataaacattaaacaggtgaaatgagttcttgaagttaccttaggtactacttattgcttcatttcttattattcatctctctttacttgtcgttctgtagcttattgatgtttttctttttctgatataaataaggacacggccctgatttacaatttgtagaaatcaagcgtacgtagttgttcatttcaagagtcgtcaagtctgcacagcaacgaggagaataagatcatgagcccgtttggtattactccatactatgaagtgatacagagtattggtttgcaaaagcaacggaaatcaccatatatatggcatcccctttttttcacgaaacacggcaaagtcgcaggtgcttatataaatgcacacacattcctccttataaacacaccatacctctgtaattgcctctgaaaactaggttggcatatcttgagattcatagagtcattataggtgtctcgctgtcaacagatatgtcgtgtaacattgaaagaataattagccgtaaatacgagcactcatctcaagttgaataaccggataggtaggtttcatcacaagaaacattgccagttgaattacactcacttcacatcctatttttgttttacaatacttcgtgtatcagaaaatatcttgggtgattacatatttagagcagctatcatcgcattacatttgtaatgttcttctattcttcatcataaaaaagtcacatgtttcttattgtatttcttgagctattacatagaggggagcaacaaatgatagtgttaacccaaacctctccctcatatccactccatttttcccagcctcagctggcaatgtccatgtgaatcggtgtagcaacgagccaagcatcaaatggaccattctgtgagctagtggcaatccaaggcaaatgcgctttccagctccaaaaggaattagttgaaaatccctccccatgaaagtaatgtcactatcgtagaacctctctggcatgaacttatctggctcggtccatgtgttggcgcatcgattgatcgcccacaagtttataagcactttcgctcccttaggaatggtgtaaccttgtatttctatcgtggcttcggcctcgtatggtggtagggcagtttggtaatatcatgttcatccatttgttgtttgctgcctatcacactcttgagttcgtgcacccttctcatcgagtttggacactgcaatagttctgccattgcacactccattgtgtgagaagtcgtctctccaccagtgaacaaatcctacagcaaatgaaacttgagtttagaattatcaatgaaatttacttggttaaattacaaaatttaatcaaaacgaaaaattgtaatccaaatttaaattagaaagctggttcaataattttagctaaattaaataaattagtcatgcatgataacaagggtcttatcttttcgcttatgcttatatttatcagtcaaaatttgaatttcaaccttaaatttggatctgattttgaggtttttaatcgaagtttatttttcagctgatggttttagatcgctaagaacacgtatataaaagtttgttttattcacaaattaatatccgtccgcaagttgtacaagtactcactgtaaaaagtccacggatggcatcacggttaatttcgttgctatcttctttactctccccctcctccagcatcacgtcgagcaggtcgttcttgcgtggctcgccggcggtgcggccatgcatcctccgctcgatctgctcgtcaatgatggcgtacatcctcttcaccagcctcgccatcctccggcgaactccctggaggtcggccggcgcgatcgccgggaagaagtcggagacgttcggcccggtgcccagcaccgacgcctcgtccacgatgtcgctcacctcgcgcgccgcctcggggtcgaggtcgacggagaacatggtgcgcgacaggacgcccagcgcggcgacgtgcgcggcgtggcccacgtccacggcctcgccgcgcgcggcgtggccggacacgcggcggacaagctcggccaccttctcctccaggagagccctcatggcgtcgagccggcgcggcgagaagagcccgacggtgctgagccgccgcagggcgcgccacctgcggcgcgggggcaggcaaaccacggagttctcgcagtggccgccggcgcgcatggagtcgccgaaggacctggcggcgatgtcggcgttgtgccgctgcaggacctcccgcgccatctccggcgacgacgcgacgacggcgcgcacggtgccgaggcggagcgacatgagcggcccgtggcgcgcggcgaggcgcgcgagggagcggtgcggcaggtggtcgagctggtggaggttgccgatcagcggcagcggccacgggcctggcggcagccggcggcgagcgtcggcgaggagctggaggacgtaggcggagatgacggcgaggaagagggagaacgcgagagggaggaagaacgccatggtcgtagcaaaacgtgcaactcacctcacctgtccttgtgtgtatatactgctgcattgcttgctgatgaagactgtttattgtttgccatttcggtcgtaacatactctatgttcccaacctaggtgtgtttagatcctaaaaatttttggccaaaaatatcacatcaaatgtttggacatatgtatagggcattaaatatggacgaaaaaaattaattgtatagtttacatgtaaattgtgagacgaatcttttgagcctaattgcgccatgatttgacaatgtgatgctacagtaaacatttgctaatgacagattaattaggctttataaattcgtctcgcaatttacaggcggaatctgtaatttgtattattattagtctacatctaatacttcaaaggtgtgtacgtataattaaaaaaattttggcccaaagaactatacacggccctaatttctaatgaaaattttggttggaagtgaaggaactcaagtcatggatgacaaccagaaaggactatgataatgctgagattgactataataatttttatataactagatcgaagaaacgtatcagatcgtgcggctacgaacggagggatcactgttgcactgtagcaagaggaatgcggccacgtagcgacggcaaaaacaataagtttattatgatatgatatgcatggttcatacagtgcctgtagtggctatggtagtagcagtggcagtagtagtatttgtagtagtagcagtaacgttaatatggttagtagcaatatctgtagcagtacttgtgaatttctagtgtactgcatatttgctgagcttttagggtttgtgtattattacgctgttatcgctcgaggcttgtcttgagctgtatctatggtattgtaataactggaaccaatacgatgtttctgctatgctactctgatgtgcatatctctgagtaaacgatgtttatgaagatatatgctatagacttatattctactcttcttgtggaatatgtcggtcgtttcagagcggttgcggtgaggaggtggcgtcgccgttgccgctcgccacacagccgcccccgccaccgcccacctcccacccatgcgcgccctgtgagagagatagtggagagagaggggaaggagatgtatgacagatgggtcccataatttttttaaaaagaaaatactatacagaaacaaggtgttgcatcacctacaatgagcctatgggcttgtttggcgcattccatcttgtttggcgcaatcacagaaacaaggtgttacatcacctacaatgggtctatgggcttgtaactaggggtgggcaaaataagaccgaaccgaagaaccgaaccgaaaagaccgacaccaagaccgagaaattcggttagtagtccggtcttggccattgaaagactgaaatttattcgggtaattcggtcattgctctcagttaaccgaattaaccgagaaaaccgaattgtgtcccaataagcctaggatgcccaataagcccagtaaactactaaaccctagaggcaaccacacagccactccctcctcccacggtcccacgagcctcatgcagcgccgcctctccccaattccccatcgcgtcgcgcactcgcgctcggctcggtcacggcgcctccaccgcgccgcctccggttccacggcgccggcaccgcctccgccttccgcctccacagtgccgcctcggcctccaccgtgccggcgccgcctccacctccgcggctccgccttcagcctctagccctccaccgcactggcaccggcgccgcctccgctctccgccctccgccctccaccctccgtgctccgccagtccgcctccatcgcgccgcctccccggcccgtcatcctcgacctctatcgccccggcgctgcatccgccggtccgtcctcggcctccgtcgcgccgacgccgcctctgcccttcgctgtcatgccctaaaaatcaactaaattaaaaatgcatattttaaatcatttttagaaattattttaaaagcctacaagctaaaccctaattttctaggaaaattttcaacataaaaatgagctagataaaattttattaaatactatgcttgctcttctattttctagaattttctgggaattatttgagcaagggaagtatttttaataattgaaacaacatttcacaaattgttttattttaaaaagttcaaaaacccctcctttaggttattgggccgattttggcccaatactctctctcccgcgcggcccaagccggcccagccgccgcccgccctcctctctctcgtgtcaccgacatgtggggcccacatgtcgggcctttcttcaagctccagccggccggccgaccgagcccgagccgccccgccgcgccgccttctcctctcaaatccgctccaatccgaccccgtttcttccggatttttgaggggttttgatcctctcgttctcctctatctttcccctcaagaatcggagcaaatcgttgggtattttgtccgagttttttgtttccggcttcgattcctctcgtttggagtccgatctcttcaatccaaggctatatataggaccacctcgtcgccctctttcgtttgccctctctctcgtggtctcccgtgcctcctagccgccgcgccgccgccttttagcccgccgccgccggccgtcttcggttgcgccgccacgccgctcctgccgtcgccgccgcttgccgccgccgtctttaggtgcgccgtggtgaggggaacctcggccgccccttccccatcgttgccggtcgccgtagctcgccgtcgccgcgcaagccgagccaccgccgtcgcctcctcgtcgccggccgtcgtcgtgcgtcgtttgtcgttgtggtgagtaccgttgggttcgtcttgtcgtcctctacgtgtacttgtcctccaaagccccggccgaccgttctagctccggcgaggtggccaaccctagccggccggccattgatgacgtcatgctgacgtcatcagttttcctttttcccaattttctaatagattaaaacttcggaaaatcataactaaataaccgtagatccgtttcaggtggttcaagttgctaaatttttctaaaatcaagatctacatgtaaaaatatccacatgtactgtttatgcttgtttttgtactgttttgttgattttttgtttaattgctttagtttccgacgttccggaggagagtgtttccgttgaggaaggttccgaagcgtttgcggaagcccaaggcaagtcacacagatcccaaacaaccctttgagcatgttgaacccgtttaaagctattattttatttcaactatgcattgttttcgaatgtcatcgggtggtgaacctttcccaattaaataatggccgaagatgactttattttcctatgggttataatttgattagcatgaaccttatatattggattggttcagctaaatgctatatgtaagtttgcttagccatgcttagaaacattagctaactaaaggggttaaatattaattgataattaaaatctggttaaggtgggttgtgagcatatggttttgatggttgtgctcatgacaattaaggaccggttcgcgagctactgttgtgaaacatttatcgtgccaaccacaagccagcgtgggcaacggctttatcttttgtatagcgtgattcattaaagtgcgccagactgagaagtggcgagaagtccataggggtcgctggggagtccatgccttgtttataagggggtgattatgatccaggaaaggtgcgccgtaatgggttatgttgtgcgaggggtattgtcacaactcctctccgaggtaccgtggtggtattgaggcacctggtgacatgatgtggggttgtgtcttgtgggtacagtggtacacctctcatcagagtttaaactattcgaatagccgtacccgcggttatgggtgagttgagcaatgtttttcgtgattagtctcacactactcatcaatgttaataatgtggtaattaatttgactcctggtttggaatggataattcctggtttggaggtttaatttgttcaactggggttggttgttcaaatgtggttgggcctatgcaacatgggtgtgttgtatggtgttatttaatattgattaattattcaactgtttttactattctcttaaatatttattaaatgctgtttctgcaaatgagctatattatgccatcctttgttatcttgtgcacttgcatatttgctgtgtgacttgttgagtatgttatatgctcattcttgcaatattcattcatcagaggaggagtatctcagtgaaggtgatgatctggaggattaggcttgttcttggttaagatgcctgtggagtggagtcgccatagctgttccgtagtttgttatagttttttttttccgctgcgtagaacgttattctttgagaggaactatctacctctgtaataattagttatttgcgaatattaaatagttatttatttgtactctattattaatttgtcattgtgtgcctcggttgattcctggacgagggtttaacacacatgtaagcgttcggaattttggatagaaattccgggcgtgacattcgcctacatcacgccgcctccgtcggtccgccctctgcgagcccgcctctgcctcaatgctgccaccgcgtcgcctccgtctccagccagactgcggtgggggatttgatgcggtcgcgttcgatccggtctcttctctgtcaaaattcggttagaccgagatcgagaccgaatttgtcggtcctaagttttttaggaagaaattcggtcctcacttttcaaagaccaaaatgaccgaaagaccgaagaccgagaccgaattttggtcaaaccgaatgcccacccctacttgtaacttcatttgggacccaggcccaagtagggcccacgtggggtgcaccccaaacaggtggagcatgaccctagggactcctaggtcatcctcccacctctttaaatagctaggtgcctcttcagggtttctcgggttttttcagactaaagtttagcttcgttacttggccgtataatcccgtgatcggttagatcgccggtttgttcgttacagaaccctaacttatcatttgtattcaattgctatttgcaatttagattgcttttatcttgttcttgattgtttcttcgatttgcttataggaataaggttgatctgcaccgacaagattaacaacccacggagttaaggcgcaacacaacaacgtctcgtacgattgtagttgggtcgtcaacgtttctcccaaatcgtaattatcatcaactcaccgaaagattgggccaatcctagccatgagcatctcaagtggagctcagggttcatcagatagggttggaaaagatccgactcattgtgaacctgtcagcagagagaagaatcccctcaagggacacatcgtctcactcatctaacttttctttttggtattgctagtagttatatgctgtttgtgcaatcctttccctaatttgtttgtggtgtgccaagggagtttgtgaaggtcggatctcaccttcgaagggaagagataccctcagtggaaggaggagtgcatttgaggaaccttatggggatagggttggaaaaaaccgagctcattgtgagcttgttaacatatagtagaatcccctcaaggagttgaatttcgggaacgcatcatcttacaagaactccggtgatatctctctcactcatctagctctgctgcttggtaccactagtagtttagttgttgtttgtgtaatcctttccctaattgtgttactgtcacttttttgctcgacttgttaatttacttgtaaatctgagatttttgtaaatatctgaaaatattaggaaatattcgacaaattcagcttatgcttttccgtaaagtttgaaacgcctattaacccctctctagacaatatcaaggtcctttcagcaccaaattgtgcttaccgcgttaagtgtagcgcgtagtcatactaaatttatcgattagtttacatattgattttcaatctgtcatcttcttggcaaccagctgcttgaagttgaatggagtggtgaagtgggacatgccatcgtagaaggtggcggcggtgagctgtgcggacctctgggagggatgcacacggtcccagaagagaaaaccttcatggtccgtgcagagtgtggagtttggcaaacaatcatcctcggcgcccattattccgctcccacagcatgcgctatcggtgttcgtgaaccctgtagcaaaacagacacaaggtaaactctacgtatatagatcttggatgacatagtggagccataaaatattgtctgacaaaacagggtatgtactaatatacaactcaaacaactcaataaccataggatataacacaggataacacaatgtttggtagaacaacttaagtaatattatgatgaaaaaagaacacattgactagccaacagagcaaagcttattacattgtatagtggctacatattggttcttaacgaaatcagcatagcttatggtgtattggcccctgcctttgtgtgattatataactcaacaaattgtttgtcattttacttgcttagaaggtagagggttggagatatatcacttcttgtttccaataaattataagcgaatgttatttgacggaatcccatccccacaatattaacaaatattaacaggtggcatatagctcccaagtccccaccaccggtgccactatctgccgcaactcccaaagtccccatcaccatgctgtttagggtggaaaataacatctgagatctcgtttgtttagagatacatatatgtgcgggcgtgccagtgtacctaaatacacaatgtaaacaaaacatagggaacatgctctttattaatcttaaatgatcataaatacaaattcccaatgtaatatatatgtatgcgcgctccataatctgtcattggacagatctgacttgtgcgatatggtctcctgattcctggggcctcgagaagctcccagttaattacctccgtaggtctaggcctgcaagagaacctccgattaagctgcttgtggtcgtctcgtcgtctccgcttcacgttctccatgcatggttgtgatgatgatgtagatgtgtgtgtgtgtgtgtaagcgccggcagcgatccatggcctcgtcggtccgtgcgctggtgttggtcgcccaccctccgtcgtctagcctcgtcggtcttgaacaacgtgtcgacgtagattgttggtgaagacatgcatggagttgcatagcttgaacgacttgacgtcacagcagttgcgtcgagattagattagagaagaatcagggaggaattattgaagatggttgatatagacggcggccggatttaatcaaagctcggcatctcatttgggacaaataagaaaaaccaacaggacttcttcagcccacgcattggtttgtgcatggcactgtagcagcgatgacatgtcatcctccaattggttggccacgttgccacaataatttacttaatcaacatgcattagctagcttgttgccatccaacagcactggctcaccgtcctcccgtcgtccttcctctgtactgcagccatacttgcctccatcgtcatccgctggtttcgacgctatgcgtgatgcttgacctccggcatgagaactgatagaagtcttggcagtcggcggcagctccggcgatcctcggcgcgctccggcagggcggcttcccgacgacctcctccatggttagcccgctccagtgcggtgaagcttgcaaatcaaggatgtctggtatctcggcgaggtcgcagcttcgggtagatgcatcaccagcggcttgaattagcagcgtcgagtctagggacaagtagcactacgtcggcttgaacagacgccggcatcgatgaggcttctgtgacgcgtagatgaatcggccaccgcaagttccccggcgacgacgatacgcgcagatggatccctatgcatggatttgtgcgtgctgtagatgaaagaaaacgaaacaatcttgctagcttttacctggactagccatcaagctcctctcctgcgcttgctgatgatcggatcaccgcgcgtgccctctcctgccggacgccgggactccggccgaagtcgctcgccgccgccggtgcgtgtcgtcgatggatggatcgccgatgagagttgatggatggatgtgttgatgctggatgggtagatgcgttgatgatgggtggcttgtggatgctagatgcgttggtgaatgaatgtgtggatgagttcgtgaatgcccctagctgccgaggggtcgacgccttatataggggtctgaggtctgtgctcgccacgtccgcacgccgtttcctccgcgtcaagttcgttgtagataaggcttgatcgatcaatttgttatttgttcatatccttctttgattttatctcttagcttctcctagcgtcaaatatctgatttgtaattcgctttgtttctctactgctgggccacagtccggtgataagcgcctcgccagcgctcgcgcgaagtaactaactagatcaagtttgttatagagataaaatcaattggtttgttggttatctcttaattcatctggttttatctcttccgcatattaacttctgaaatcttggcgcgtaggcagctaccgtcttcggccatgggccgagcccatgattaatcactcggatatgcataggttgcttaatcacccaggcatgcacacacatacgaccgtctactgtagtacatgcatgcatgcacgtgattgcctcaccagccaatcttcacacggctagttattggttaattatacatgcacatatactaatccaagtatatatattcccagctgcctgtgcatgcatttatttgcgtgtatatacatggccgagcattgtgtagaaatgataagctagccaacttacaaactgcttgtttgctttgtccatcatgagtaagtcttgtgtacacatataatcgccaaaataccatcaaacacatgccccccaccaagtaaattttgatcgtggagcgagcgaaattaacttggtgtcgtgtcggctcatgcgatacatgtccggtagagtttagtcatgcgacgaaaggactcccatgttg

SEQ ID NO: 28929 - DNA, 9142 bp, Oryza sativa
  unsure (1)..(9142): unsure at all n locations
atattggcgtcattatctttcgggtaacggccaaagaatgaatccggatcatanaagtttgaagtacattttcactcaacctgatttgaacatgcgtcagcgaagatggttagagttgattaaagattatgatatggaaatccactatcacccggggaaagcaaatgttgtagccgatgcccttagcaggaaaagctactgtaatatgtcagaaggtcgacatttaccttgggagttatgccaagaatttgaaaggttgaatttgggaatagtcagcaaaggttttgtggccgctttggaagctcaacctactctgtttgatcaagtgagagaagctcaagtgaatgatcctgatatacaagaaattaaaaagaacatgagaagaggaaaagccatcggttttgtagaagatgagcaaggaactgtgtggttaggagaaagaatttgcgtcccagaaaataaggagttgaaggatactatcatgaaagaagctcatgaaactttgtattccattcaccctagaagcactaagatgtaccaagacttaaagcaacaattctggtgggccagtatgcgacgtgagatagcagaatatgtggcactatgtgatgtatgtcagcgggtcaaggcagaacatcagaaaccagctggtctgttacaaccgttgaagattccagagtggaagtgggaagaaataggaatggattttataaccggtctacctagaacgtcggcaggacatgattctatttgggtagtggttgatcggttgacaaaagtcgctcacttcataccggtcaaaacaacctatacggggaataagcttgcagagttatacatggccagagtggtatgtttgcatggtgttcctaagaagatagtgtcagatagaggtagccagtttacttcgaagttctggcagaaattacaattagaattgggtacccgtttgaatttcagtactgcttatcaccctcaaacagatggtcagacggaaagagtaaaccaaattttagaagatatgttgagagcctgtgttctagattttggtggaagttgggataagaatttgccgtacgcggaattctcatataacaatagttatcaagctagtttgcaaatggctccgtatgaagcattatatggtcgaaagtgccgtacgccgctcctttgggatcaaaccggtgaacgtcaagtcttcgggacagacatattgcgacaggcagaagaaaaagtgaagattatccaataaaggttgcacgttgctcagtcacgacagaagagctatgccgacaatcgtcgtagagatttggcttttgaagaaggagattatgtataccttcgggttacgccgttacgaggtgttcatcgtttccaaaccaaagggaaattggcaccgcgttttgtgggaccttttaagattgtgagggaaattggcaccgcgttttgtgggaccttttaagattgtgagtcgaagaggtgaagtagcttatcagttagagttgtctccgtcaatggcgggaatacacgacgtgttccacgtgtcacagttgaagaaatgtttatgtgtacctacggaggaagcagatccagatcgtatagagcttcaagaagatttaacttatgttgagaagccagtcagaattttggaagtaagcgagaggaataccaggaatcgcgttatacggttctgcaaggttcagtggagtaatcattcagaagaagaagccacttgggaacgagaagatgaattgaagtcagctcatcctcatctgttcgccagttcttctgaatctcaaggacgagattccgtttaaggggggtaggtttgtcacgccctaaaaatcaactaaattaaaaatgcatattttaaatcatttttagaaattattttaaaagcctacaagctaaaccctaattttctaggaaaattttcaatataaaaatgagctagataaaattttattaaatactatacttgctcctctattttctagatttttctgggaattatttgagcaagggaagtatttttattaattgaaacaacatttcacaaattgttttatttgaaaaagttcaaagaaacccctccctaagccgttgggccgaattcggcccaacatcctctctcttccgcgcggcccacgccggcccagccgccgcccgccctcctctctctcgagtcaccgacatgtggggcccacatgtcgggctcgtcttcaacctccggccgagccgcccgagccgccgctttgccgccgccttctacctccaaatccgcctcaatccgaccccgattcctccgggtttttgaggggttttgttcctctcgttctcctctttcttttcccccaagaatcggagcgaatcgttgaggatttgatccgaatcgagttcgttttgattttatccctaaaaccgagtttgaattttttcccgagtcgattcctctcgtttggagtccaatctcttcaatctaatgctttataaagcatcccctcgtcgtcctctcccgtttgccccctttcccgtcctctcccgtgccccatagcgccgccgccacgcgcgccaagctcgccgccgccgccggccgtcttcggcgtcgtcgctgcgccgcctccgccgtcgccgccgcttgccgccgccgctgataggagcgccgtggtgaggagaagctcggccgcccatccttctttgccgccgaccgccgtagcccgccgtcgccgcgcaagccgagccgccgccgttgccctctcgtcgccggccgtcgtcgtgcatcgtttgtcgtcgtggtgagtaccatcgggttcgtctcgatgtcctctacgcgtaggtgtcctccaatcccccggtcgaccgccctagctccggcgagctcgcaaaccctaaccggccgccattgctgacgtcagcatgacgtcatcatctcctttttcttttcttttttccaattttctaatagattaaaacttcggaaaatcataactaaataaccgtagatccgttttaggtggttcaagttgctaaattcttctaaaatcaagatctacatgttaaaaatatccacatgtactgtttatgcttgtttttgtactgttttgttgattttgtttatttgctttagtttccgacgttccggaggagagcgtttccgttgaggaaggttccgaagcgtttgcggaagcccaaggcaagtcacacagatcctaaacaaccctttgagcatgttgaacccgtttaaagctattattttatttcaactatgcattgttttcgaatgtcatcgggtggtgaacctttcccagttaattaatggccgaagatgactttattttcctatgggttataatatgattagcatgaaccttatatattggattggttcagctaaatgctatatatgtatgtttgcttagccatgcttagaaacattagctaactaaaggggttaaatctaaattattttattattaattagggttatattcaatggtagctcacgatggtaaatcgtgtgatgttaattaattgataattaaaacctggctaaggtgggttgtgagcatatggttttgatggttgtgctcatgacaattaaggaccggttcgcgagctactgttgtgatacatttatcgtgccaaccacaagccagcgtgggcaacggctttatcttttgtatagcgtgattcattatagtgcgccagactgagaagtggcgagaagtccatgggggtcgctggggagtccataccttgtttataagggggtgattatgatccaggaaaggtgcgctgtaatgggttatgttgtgcaaggggtattgtcacaactcctttccgaggtaccgtggtggtattgaggcacatggtgacatgatgtggggttgtgtcttgtgggtacagtggtacacctctggtcagagtttaaactattcgaatagccgtacccgcggttatgggtgagttgagcaatgtttttcgtgattagtctcacactactcattaatggtaataatgtggtaattaatttaattcctggtttggaatggataattcctggttaggaggtttaatttgttcaactggggttggttgttcaaatgtggttgggcctatgcaacatgggtgtgttgtgtggtgtttatttaatattgattaattatacaaccgttttactattctcttaaatatttattaaatgctgtttctgcaaatgagctatattatgccatcctttgttatcctgtgcacttgcatatttgctgtgtgacttgttgagtatgtcatatgctcattcttgcaatattcattcatcagaagaggagtatctcagtgaaggtgatgatctggtggattaggcttgttctcggttaagatgcctgtggagtggagtcgccatagctgttccgtagtttgttatagttttttttttccgatgcgtagaatgtttttctttgagaggaactatccacctctgtaataatttattatttgcgattattcgatagttatttatttgtactctattatcaaattgtcattgtgtgcctcggttgattcctggacgagggtttaacacacatgtaagcgcttggaattttggatagaaattcccggcatgacaagttggtatcagagccaccttgaccttaggataagccaaatggtaaaccttaagtagccttcaaaatattttgaaaaaaatagaactgctcttctctagtctcttataaattaattaagttggcagcacatgcaaggttatgcacaaaaatttatttaattcaatttcttttcttttaaaagcaaaaattcgtccttctcaaaatgtttctttctctctttaccaagtcttattgatttgtcggcactgtacatccattatggtatcgatacaatcatgatagcactagtactactcatctttcctatggtgacactgtaccgtgcttataatagatcataagtattttagtttatttttgttatttgtcaaaaaaaaaaatttttttgtctctgtccaaaaaagttaaattctaaaaatatttataaaatagctttgtatgtgtcttttcttttcttcctttttggtcaaaaatcagttaagtctagttggtgcagctaacttagaaaaatatgcattaattcttctcttctatgtttctttagatgccgccccattcactgagaaatttgatcaaggtgttaggattcgtcagggagctgaggttgatggcttttgaggtaggctatgaagttgctcccgagtatcgccaaatttcccatgaccccgacgaggagaagtgtcgtgttcgtgtgacgttggctagtgatagtgaagaccttccgtcttttaagttcgaagctggaggaagatcatactgccatgcttgtcaagaagcagcgttggtggccattggagagttgcgtgaacactttgaagaagagttggattcatcagctttccagtatcatcctcacaagcctcatggtcaagactatggaatctatacctgtcctgatggtgaagagagtgccactctgatgcatgcggtgcatatgcttagtgctatggatgcagtaagtgtggaacgagacaaagcagctcatgacagggaaaactggaatcgaggcaagatttgcaagttggagagcaaggtgtaccgtctacagaaggaattagctgaacttaaaggagaaacgccgccgccaacacccaagcttcgcctcactccaagaaagagaatctgtccgccacctcgtctccagttagcttcgaagattcatgtgatgggtgaagctgtgcccgatcgtgctgaacctgtcatcgacatcataagtgatgaggaagaggaggaagatcctgaagaaagagagccagctactccagaggaagaagattcatcgcttcgttccgacgcaaggcgggattagtcgcttagttagaacgttgccgtagttcgctgtgttagattgcttgtttaagtttgcttgtgagtgtgtgggttttagttgttgcttacatcatgggtgggatgtaacagcatgagtctagttcttttgcttgtcagagtgtaagatagttggtgagatagtgttaatgcaacttaaatgtaatcatacacagttaatagcaatatagaatttaaattaattaaataactccgttctaagggtgtctctctgtcgttctttcctgttgtctctgcttatcgtcagatggtgaacacgcgcaccggaagtggaagtggagctactaacaatggaggagatcccacgctagctcagattctggcccaacaaacacaactgatcaatctgttagtgcagcaggcacagaatcagcaggcaaacaatcagaatcagaatccaccccacctccccaaaacaagctggcagatttcttacgtgtgagaccccctaccttttcaagcaccaccaatccagtagaagcaggagattggctgcatgcggtggagaagaatttggatttgatccagtgtactgagcaggagaaagtttcttttgcttcgcatcaactgcatagacctgctgctgaatggtgggatcattttcgccaaggcagggctgaaggagagcctattacgtggcaggaattcatggccgctttcaagaagacacacataccaacgggtgttgtagctctaaagaagagagaatttagagcactcaaccagggatctcgttcggtcaccgagtacctccatgatttcaaccgtttagctcgctatgctccagaggatgttcgtaccgatgaggaacgtcaggagaagttcttggagggactgaatgatgagttgtcgtatgccttgatgtctacggatttccgggatttccagcagttggtggacaaggcgattcgtcaggaagacaagtataaccggatggagcagaagaagcacagggctgcccaattcaaggcacaacagggcagtaaccagaggccgcgtctcgttactggacctcaagctccaccgtaccctcaaggaggatcttcatcagttgtctgcccccaacgccagttctacaacaacaatactggtaatcgtggcaatgacaaccgtaacacggttgctcgtcctgcagcaactccagctcagaaccagcccgttaggaaggaacagggaagcaagccagtgatatgcttcaattgtggtgatccaggacattatgctgataagtgtcctaagcctcggcgtgtgaagaatgccccaaccccgaacaactctaatgttccagcaccgaaggcacgtgttaatcatgttgcagcagcagaagctcagaatgcaccagatgtggttttgggtacgtttcctgttaactctatacccgcaactgtgctttttgattccggtgctacacattcatttttgtctaaaagttttgcgagcaatcatgggatggaagttattagtcttgggagacctttactagttaataccccaggcaaccaagtattttcgacccagtattgtccttccgctaccatagaaatagaagaagttcctttcccatcctcgcttatcttgctagaatccaaagatctagatgttatcttagggatggactggttatctcgtcacagaggagttatagattgtgccaaccgtaaggtgaccttaaccagtagcaatggggaaaccgtttctttctttgtgtcctctcctaaatatcatggtgtgatcttaaaccaagttgctctacaagagattcccatagtacaagactaccccgacgtgtttcccgaggatttgccaggtatgccacctaagagggacatagagtttcggatagacttggtacctggaaccaaccctatccataagagaccatacagaatggcagctaatgagttagctgaggtgaagagacaggtggatgatttgcttcagaaaggatacatcagacccagtacttcgccatggggagcaccagtcatctttgtggagaagaaagatcatactcagagaatgtgcgtggattatcgagcgttgaatgaggtcactatcaagaataagtatcctctacccagaattgatgacctgttcgatcaactggaaggtgctacagttttctccaagatagatctccgttccggatatcatcaacttcgaatccgtgaggaagatataccaaagaccgccttcacaactcggtatggtttgttcgaatgtaccgttatgtcgtttggactcactaatgccccagcctttttcatgaatctgatgaacaaggtgttcatggaatatctggataagtttgtcgtggtgtttattgatgacattcttatttactctaagacgaaggaagaacatgaagagcatcttcgtctagctttagagaaactacgtgagcattagctttatgccaagttcagtaaatgtgaattttggttgtccgaagtgaagtttcttggtcatgtcatctcgtgtggaggagtggcagtagatccaagcaatgtggagtcagtattaagttggaagcaacccaagacggtttcagaaattcgtagtttccttggacttgctgggtattactgcaggtttattgagaacttttcaaagatcgccagaccaatgactcgtctgcttcagaaggaagtgaagtacaagtggacagaggattgtgaacgaagtttccaagaactgaagaaaaggctagtgactgcgcctgtgttaattttgcctgattcgaggaaaggtttccaagtgtattgtgatgcatcccgactcggtttgggttgtgtgttgatgcaagaaggaaaggtggttgcctatgcatctaggcaattacgtcctcatgagaataactacccaacgcatgacctagaattggcagctgtggtgcatgcattgaagatttggcgtcattatcttttcggtaaccgtacagagatgtatacggatcataaaagtttgaagtacattttcactcaacctgatttgaacatgcgtcagcgaagatggttagagttgattaaagattatgatatggaaatccactatcacccggggaaagcaaatgttgtagccgatgcccttagcaggaaaagctactgtaatatgtcagaaggtcgacatttaccttgggagttatgccaagaatttgaagggttgat

SEQ ID NO: 28930 - DNA, 812 bp, Oryza sativa
atgggattgattggctcgtctgcaagtagttcatcacttcttagggataagaacaatggccgtatcattgaccccttcaggcatcagtccagtttggaagaaacggcgaactgcaccgattatatcagctttaattgtgccccagttgcgctgatagaacctggctggaaagccatctggaccaggtgatttcaggggcccaatttggaaaattgcctgagaaatttcatcctccgtaaaatcctcacaaagcttctcattcatgatatccgtaaccttttcctggataagacgagtaacggtttcaggattaagatttggatcagcagtgtacacatcctgaaaatattcagttgccatgctctccaacttcattgtcgaactgtgaacagttccatttgcatcccgtagtttggagatttattcttctttgctctccatactgcctggctatgaaaaaatttcgtatttcgatccccatcctttagccaattaactctggaccgctgcagccacagcatttcctctctgtacaacagctcgttcatatggtctgtcgcattgcgaattaccgttctgtcggcgtttgattctataagttccgccaattttttccgagccttctccagttctcttcctacatttttcactttggctctgctccaagatcgcagcggctgtcatgaaccttttgcaaggctttggttgttgtttttgagaatcagccttttcttcccggaacttcccaaggtttcttaatttaccgggttggtttgtggtcccctctcccacacaattcttaattggggggt

SEQ ID NO: 28931 - DNA, 11455 bp, Oryza sativa
  unsure (1)..(11455): unsure at all n locations
agccgtctgggtatgtcgttcgcccgctttaaatgttgcttttccacaacttatgctaattttcttcattttagcccccccttttttttagatacccgcagctcattgttcgaccgagcgaaccgtgagggctcgccttgacagctttaaaagtcgtcttcgggctaaggatgaagaactgggccgcaaggggctagaaatggaaaacctagccaacacccttaaggagacgaagactgagaataagcagctccaagttgagctggagaaggggagcgagcgaaggccgagatcgagcgcctcaaggctgagcttaaaaaagaacgagattagtccaccgccttgactgattactataaccttaccgagccgaagatggaggctcttcgtcaggaggtcagcaaggtagaagcagccgctaagagagacgcacaacggttcgcgcgggagatggtgaagaccactaagtccgcaaagaccgtgtgccgcacgctttgccttgcccttaccgacatgtgggcgaaggtgcgaggagtccccgacgaagatgcttctgcctttgacttctcggagtggactcaataggccagtggtgtggtctctgattgcaccactgcatacggcgattgctacgcgcgtgtgttagcggcctttaccatgggcctgctacaacaaaatgggtgcgagcatatcgccgagttccccaagttggtgaagggggattgggaagtcagttgtcaggatctttcggccgcacttcgtgcttggcgcaaacaattctggcaaatggacggctgatctactgccaaggcgcgcctgctcgagcacttggcaaaggcagaggcggcggatcaaggcgaggaggcagcgggcgaaggaggtggggcagatgcgggcgctggggtagacatcggccataatcacccagaggtgtgaggccctccgcccgctctttagatttttagattttttgcgttggccacggaaggcgaacgatgtaaatttggccgatgtttcccccttttgtactgtagccgaaaatggccttttttatatggaatagatgaaccaagtttcgccaattatcccgtttttagggctttgatatgtatggttgcatcattttgtacacgaataggggctacactttttgcccgctttatgagcttcgccctctcttaaccttgtgctttcccatttgcccctttttatgttgttttagcagggtcttcactagaaattgtgtgttcggcttcctttcagagattggcgtaaaaagaatgagaaattcatcacagttgaaggcttgctgaaatttaagtattcatgttgcgagatgataataaatggcaatagttacaaggttttgaaagtttccagctggatgcgggcacaccccgggcgaaccatggacgactacgaccgtgtccatgtggagcatcgggaggacatggctcgcttttggtgaaatcatcggaggactgatcgtcaggaagcgatcgcccaacgccgttacggtctagtttatgtctcgcccccttctcctcttagggtagtgtataatattagtagtgatgacgaaccaagttcgccagatcataccttagggcgtggagggtgttttgggggtggagatgtaatttttttgtaagttaggctgtaaagcccgttaccttctttcgcctgtaccatgttgtatggcctatattttttttcgaagttaatgaagatgtgttttatttccttttcgctattgtacgcatagtcacctttcatgattttgttaggtcgaaatatgtcggcccccttgcgtatattagcgaaatatgtctgctgacttttcagcttcctacttccgttttcgatctgtagtattccgcgctaaagaaatgctcgtgtttttcacatagatcgaatatgactgtgttcggttatttatttcccgaaacaagatgttgcggtttcaatgttcagcgagcgatgcttcggtcgattcatttcgcccccctggcgctttcgcttatcaggtgtttgccttagggtttttccacgaattatcatttacacaagtaaaaaggtgaaagacacatggattatatactggttcgggcctccaggatggataatagccctacatccagtttttttcctttttttattttcctctttttttgtatttttgtgccgaagggcctacataatagtatgtacatttttacaagttggcgaatggggtgccaccccttctagacatagaaacgcttaagagaagcagcgttccaggagtggtcgaactcttcgccttccagcgtcgccaagcgaaaagagcccgtcctggacctgttcttgatgaggtatggcccttcccacttcgattcaagctttccaaccgccattgggttcgccttcttccttagccaggcagcagctctatcggttgaacctttttgttgtaaggtgccaaagtgctcttggcatatttgcgcatgtgttctagtgcttcgactctcaccctttcgaggagttcgagcaacacctcgcgcccatcttctccttcagaaaacattacccttggtgagttagcctctaactctgttggggtcattgcttcgtcaccataaaggagcatgaacaggctaaacttggttggccttgtgggggtcgtccgaagggcccaaagaacagataacatttcgtccggccatttgcccttcaccgccccttcaagcctcttcttgagcgcctcaaggatcttgccatttgctcattcgactgccccgttcgattgtgggtgtgcgacagaagcgaacttgatttgcaggtctgggccttcgcacatctctctaaacttgtcagaatcaaactgcttgccattgtcagtgatgaattctttcggcactccgaaatggcaaacgatgttcttccacacaaatttttatacagctgccgaagtgatcgcaccaagcgattcggcttcgatccaacgagagaagtattcaattgctacaattgcaaacttgtacccatttcgtgccaccgggaaagggccaatgatgtccaacccccatctggcgtaaggccagactactgcgataggctacagctcgtactggggtgctgtctggcttcggccatgccgctggcagcttttgcatttcttggcttgctccacactgtcacgtcccaaaacgaccctaaaatatatcctctaaatggtgcctagaataattaaaatccgtgtgaaagcctccaacaattaaaatgtgcaaagttaaaagtcaaataaggcttagaggatttttgtatatttcctaaaagcctaaaatgcgtaaataaattttagtggaattttcagagcacaaataataattattaagaaataaacaaagttaaaatgattttataaaaagaaaaactctgaaaagtcccctttccctccctctccctcttgggccggctcggcccatccccttccccctccctctcctctccccgcggcccatccggcctctccccgcgcgcgcgccactgacgggcgggcccgcccgccaccctcgctgacgggtggggcccacccgtcatccccttcctcccgccgctcccgccgcctcgcccgcgccctagcgccgccgccgcgaatcccgccgcccccgtcctccccgcgtgcaatcaataggggggaattattccccgtgattccctctccctttccccccattttcccctctctctctcacgttcaaacgcgcggatttgcccccgcaaatctcgccagcgccattgatggagcccgagagcgccgcgccggtttccttcccctccggccgccctctcccccttccaactctatttaaaccctccccgcacctcctccgtccgtttccacctctcgccgcccttcgtcctcgacggaatcgagctcgcgccgttgctctctctctccaccgccgccgtcgagctccggtccgccgccgccgtcaccccggaccacctcccacctcggcgccgcctccttcggctttgccgcatcctcaccgacctcgtccacccctccgtttcgctcaccgaccgccggaacgccgtcgaccccgtcgacccgagcagcgctgccgccttcctccgcaccggccgcctttttcgttgtcgccgtcaacctagggtgagccgtggactgccgcttcttttcccccttcccttcccctctctcggccgccgctccgccgcgccggtggtcaccggcggcgaccatcggggcgcgggcgcgccgcctcccgccggctgcacaggcttggccgccctcgggcgcgccgagtggctgccgcgtggggcccggccgtcagccgcgtgggccccactcccgtggacccggtccgcgtgccccctcccctcggctgacgcaataaaccctttttaaattaaaatttaaatgaagaaattcgcaaatattcatttaaagagcatataaacttcaaatgactataacttggccatttgaactcggaattggaccgttcaagtctctaatttttccttaagaagtcaagaacccatttttgtgctttgtttctgcttgttatatggagtttattagagtaaagtccttttcttttctgttggtcgtgtagacgctgcagcttcgaaagatccgctcttcgtggaggttgaagccgacgtttgggaaagcgagcaaggcaagtcacatcgtccttgaacatattgaatcccagtttataaaattattttgatttaaattattgcattaccgctttatttaaattcccgcgttatcactgttttatttagccatgcctatttacctttattatgaccttattattattgttattgttattattaccttgttcaccctagattaaacaaaaccccaactagtggacactctactcatggtaccactagtatgattttaggtagatgcttcactggttaattaggcaacattaggtggttttacaactctagaccttgggaatactcttatcacctggacactatggaattgttggattattgtggaattggattcacacctccccctctattcaaaatccccaaaatggttttacgctgggctcggggtgcatggttttgatagtagcacctcggccatataaggaccggtcttcgggcctctgttgcaaagcactaccgtacttccacatgtctagtgggtaaggcttagtttgtggctcagtctggttataaacaaaagtacacagatggagatggacgaagtcggggatcgatggacatctctaggacaaatgaaggctacatgagctgtggcccggtagtcgagatgtcatggcacagggccggtgtcctgctgctcggggctcagtcctgcctacctgtcccaggggttccagccgtaggtggggttgggtcggtattcttgtctatggctaggatgggttggaaactatgtcacgtcttccgtccgtataccgtggtggtctgcggcacgtggttacacgtgaggaagatgtgtcttgtgggtaaagatgtacacctctgatcagagtacaatctattcgaattgccgcgccctcggttatgggcaagccgagcaatgtacccaagttagtgttttaattcttaaaacctgcttaacaactaaaatgtggaataattggcctgggttggcttgggacgagctgggacccagggtcgggttgccagttcggtctgaatcatcgtaggccttgggttaaggcaggttcgtgtgggtccacggccttgattaataatattgtatagctctagaatcgtgtttacaaaatagcttcgagcaactaagtgtcttttaatgctgtttactgcaaaccctaaccctttatattataacccccttgtactccctttcatttattctgcacttatgggtgtgtattgttgagtacggtggttgtactcagtcttgctcaatttttcccaaacccagaagaggagtccctggaagatgaaggctttggtgtctagctcgtgcctaccgtcaagcgcctgtggtcgtcgccctagtcttctgctgtttcccgtttgtctttgtgtgtgctgggccttcgccgcccatgtaataaattaactatttacgcttccgcttgttgaactctgaactgtatcaacttttggtgtaccttgcctcctgggacaaggaataatgcactcacgtaaggaacacccgttgggttattttcggtcgtgacacacacaaacttttagcacagtgggccaatatacactctggcaaaaaactttggaggcaaccgttcttgcggcttgatgcgcactgcacagcccctagtgtatttctttcgctatttcctcgcctttagcaaaggatatgcagcgaagcaagcgttggagcaccccagagcgatacaactgccctgagtttgtatcttgtggctctgagctgtaggcgcttcgcttctacttcatcctctaggagccaaccattcttgaggtacttcacgaacggtgttcgccagtcttctgggtcttcgcccagttctgcctggtcaattgccatgatgtccaggctctctgtgggcacacttggtgcgtacaagacttcaaaaaatatgcctggcgaatgtggtcctccgcaagcagcggatttcgccagggtgtctggctcctcgttctggcctctaggtaagtgttcgaccgttatgcggcgaaacacttttccatagatcgaacagcctccagatacctcttcatgccttcttcctttgcctcaaaagatgtaacgccccgattttcgttcgggattaaaacccattaaataatgcattttctagatttttaataaaagttaaagcaatttaataaagtgaaataatgggagaatttgaaattttccttaaaaatcatttggccggaaatattttgtaatattctctgtgccctaatgaactctctgaaatttcccgcgaattttcggagctcaagaaataattttaaagtcacaaagatcatttaataaaattaaataaaaagaaaagcaaataaaacctccccttcctccttgggccattttcggccccaggtcccttcctcctcccacggcccacgccccctctcttcctctctcgcctcggcccgtttccccttcccctcgcgcaaagtctaaataaccccctgggttctcctccctctctccctccccgacaggtgggcccagcgaccccacttcttctgtaagtattttacgcttttatttatgtttggaactatattttacttgtcgttttgtgtaccctggctggtcctggacaggaatttaatacacaaaatagtctagaaatttgggctaaatttctaggcgtgacaaaagacttgtcaacgtggcttgccaccagtttggagtctgttcggataagcaagcgccgaacccccaatgctttcgcttttcttaggcccatcagtacagcgtcatactctgtcgtgttgttgatcgtgtcgaactgcagccttgtggcatatcgaattggcacgccacctggcgaagtgagtactgccgcggcgcccgcccccttgtgcgaccatgagccgtcagagtacatcacacaaggttgttcgacaggctcaggttcaaaatgacacttaaattatatcctggtttggtcttgtaataatcttttagatttctaatattttcttccccatggattataaggatggatcgtattgtgggaatgatattgttattagtttaacttataattgtctgtcgtggatgtccgtatttacaggggagactctgccgtaatttctaataattttggaagttagtggtttgagtggtttttggtgtggcactcttggtacgtggttatctggtgtgttacaattggtatgtgagtgggcagtaggtccatgggaagtaaatatgacaacttaaaatattgatcatgttttccttaggatgggaaaaatagaagtaaaatttgagttaaatttaaaccaataaaatttgacacactggtgcacagtaggatgggtttgggtcattctttgcatcacacttctgatttattttatcgattactgatctctatctcattgtatttgtgatttctggagttatgttgttactatatatatatatatatatatatatatatatatatatatatatgctcttctacgaataagacctgattgcataataagtaaagctaggaggtataaaaaaattattcagttttgattcgttggtgtggtgtatagtgtggagattaacgtttgcgcataactatattcggaaagctattagggagaacaacatggggtgttacagttatacttgaggtgtgtgagtgtacatgataaagttttagtttccctagaccttagttaaactagtttgatcatggctctaacttgtgttaatctcttttatagaagtaattaatgttgtatcctataagactcaatggtcctttaagaataggtaacttttcttccgtataggcaatgcaaagtggttagaggaggggactttttctttattttttttcccaatgccaagtgaggttgtccgagtgtgagtgttaggtcgtgatacatctatcactgtaccgagttaatagtttgggtatgggatggattggcccccatgtcatctactcattctattcttttcttacagtggtgagatgtgtctacatgttatgcatgatgcaccaaggtagtgatgtcttcacccgaaaagcaaagaaaaaaagtaagaaaaaaaaaggatgttccatttttcagacttgagattcaaaggcgatatggcttattagtttctttttgtgagttctattatgtgactatggttgaggtaatgaaaaaaaaaaactttctcattcgtggtacacgttctgaaataattccaaaaggaaaacatttgactctgcattcatcacttggtgacaaatattctcctgatttctatttttttttactttcagaaaggaattaacactaaatatttattttagtttcacttttgtggctttcattcgcttggttgttcaaacataagtgttgtgcgattgctttgtactgataaattataaattattgatatgcacaatactatttgaaaatactaatttaaatcttgttatggagaacttgtattaaatttgaatttctttaccaagtgatttattttcattacatggctcagaactgtgtgcagtattgatattcttggattgatgtccacacttatttgattattaatctttatttgaatttttttatagaatggctttcggattcgctatttgagttgacaaacaaactccaaaactttgaattttggtttatgagtttatggtaaaaaaatatttcctttttgtttttttttaaaaaaatcaagttgaagaggatgcttccttctacgcattttcttcaaaaagtggttttatactcggtccatgttctaaatatttccattgtctttacgtgtgattcttgaatttattacagattgtcattatcctgatctcagatttcttaagaaaaccgtgtttgagactaaatattcatttttttatgtgtttgttttgttgcttgaccttccatatttgattatttctttccaattacatgcacccaacaaattgttttttattgagtggatttaattcatttactttggaatgtttgagtttcttagaaaattcaagatctatcgatgttcagagcagtttttgaggataatgctttcgttctagttactcagaatgttcattataagtggaacaagtgtggcctatggtccttgagattgacttcgtagatattgtttattacctctaaataatttgcaatcaaagatagacttttagttgttgaagatgagcaacatactaataagatgtgatgggtgtgagtgtttatttctttaaattttaaattaaaagcttgtgttgtattctcgattcccttgagcgtaaaggttgttttcacaatttgtttcattgctttgtagtaagattcttcatgatgtgttccaatgatttttgtatatgtcccaattgggtgttttagtatgtgcattgcacttctttggcaagccaatattcctgtctagtaggtccaagttggtttattagctgcttttgaattgttggctaccatactttcttatgctagttaattattatctaccatacctagacgcaagcagtgttgcgaatataggagatgtcctcgaaattgcttgagagtcctaactactttatatgtatgttttgtgtattcctttccatcttacggtttctcaagctctacagtgggcgaattcgagggcgaattcgattgaagggggaggaatgtaataccccgtatattaaaagatatttaggtttttttaagtttggattgacttgttaaaataaagatgttaacagaaataaacaaaagaaaaatatctttagaagtgggccaacatgtgaaggcccataaaccaagcctgctttcaagcgcgacttagaccatttaaatggcaaaataaaaatatgctttctacatgaaagttgtaggtattgttctgtagatttttaaaatgtatacattttcagtcatagccttttcatatttcaagatataaagatttgaagcagcagtcttgtttatagtccaagcggcgttccttgttattgagttttgatgggatggggcagtaggttcacctttttcattgttttatacgcatgttcgaatgtgtttgctgaggttttgtttgtgattaggtggtggaccattagatcatgcatgataccaatctttcgttggaggcaagtgcatgacgaactaattatgcgattcaaagattgtttgctctatctatctatttgcgttatatttctatgtggtatgtgactgcttatgttcagactgttgttaatgccatttatatttcaaatttatcttatgtcacgacattattcatgtttcattatttcggatgttttatttatattattcaaggaccatgcgtagtcatgggagtgtaatttggatccttattcatgttcctgtcagtaagcgctgatcacgcttacttggatttgccgacaaatgctaggatgtattcactattgtccgaaatggaaactactatttcaattcatgcctgcccaggatgggaacttctatattctttgacatggtgtttggaaatgtgtttcctatcaaagaaagaaagccttatgttcatgctttatcgtcaatgatgtgtatatgtgttttctagttccatattgtacttgctgagtatttttatacccactcttgtgcaagtagatgtgtatataagggtgctacttcccgcccatgcatgtcggtctcaatgcgtacctaaaaccaaataaaacacaagagtgatgagctncttgcagagnnggaatgtcactcaaatgccatg

SEQ ID NO: 28932 - DNA, 4103 bp, Oryza sativa
  unsure (1)..(4103): unsure at all n locations
cgataaaggttagttagataggaaggttcatggctagctacaaaagagaggagctcggagagagatgcgaggttgatttagaagaagtttcatacgccagagttccgtagaaggacggaggattagagctgatagaaaggtagattggggcagggagaagggaagtcaaacggggaagtagaagtgcgagggagattcaagggtatgacggggagaaagcctagggtgaaaaagaaaggcggagggggcgtgcatagatacagagtgtaagaaaggaaaatagtggctaagctgtgaggtaaataagcatagcagaaggtgggagcaccaagaatgcaacaagagccatatgaaactggagggcgctcgtgcaaagcataggcaataaggcatggacatggatttctttttttgaatgggaacacattttgaatcagcaagtcaaagaagatagtagttcccataccgagcaggcatgaattgaaatagtagtttccatcacggataatagtgaatacatcctagcatttgccgggaaagccgagtaagcgtgattagcgcttacccacaggaacatgaataaagatccaaattgcactcccatgactacgcatggttcttgaataattgaaaaccagaatcaaagaaccaaagtgaaacacatccatggcaagcagagaacttgaattatttaagcagaacaagaatccagaatattaaaacaagaataacattgtacacataagatcaacttgaaatctaaatggggtgaacaataatatgaacataagtagttacttatcacgttgaaatatatcagaaataaatagatagagtaaacaatccatgaatcacacaattagttcgtcatgcacttgcccccaacgaaggattggtatcatgcacgatctgatggaccaccacctaatcacaaacaaaaccttagaaaacacattcaaacatgcgtagaaaacaatgaaaaaggtgaacctactgccccatcccatcaaaactcaataacaaggaacgccgcttggactatgcacaagactgctgcttcaaacctttatatcttgaaatacctacaactttcatgtagaaagcataattttattttgccatttaaatggtctaatttgcgcttgaaagaaggctttagaatctgtctagaatttcagactgtccacactgaaacaacctaactggagttctactcgcccaatcagggtgtactttaccaatatgaaagctatgaaaaacctctacaactttgtctataggcggcctggctgattccactgtttaaccccttcaaaaacagttcaatctactactatccagattatgacacaaaaacaacagtcatattaaaaaaattatatctcctaaaccacttgagataaaatcgttccctttggtcagaagatatatccaaacattatctacaacttcctagttatacacttttgcagaaaataacatttagagccccgaaacatcaaaacagtgaaacactgcaaatctgcccacatgcagaactgcaacaaaccgaacagcaactacccaaactccttctctagccttccctaaccacgaattaatacactaaagccatgctataacaactgatacaacaaggggacaagcctcacctaggctttctttagagaacttgtgagaagacaataggggagactccagtctaaccactccttctactcctctcctcctcctcgttccgtttttctacttcgcttcttgatgcaagctatgaaggtggagatctagggagagcaatttgctgtagatgggagagatgcgaacacaataggaggggaggaaggaggcgccggccaagaagaggggtggcggcactatgagggaaggtgggatttggttcccctctctctaggttttagggaagaactaataggctgagtttatgggccttctcatgttggcccacttctaaagatattttgcacttatttatttctgttaacaactttattttaacaagtcaacccaaactaaaaaaacctaaatatcttttaatatacggggtattacactcatcaaaagtaacttcgcaagtctcaacaattttgttagtttaaaaaacatgtacacgatagccacatgaatgtgtggggtaaccaagaaacattccattggtagagtgtgccgcaaacttatccaaatttccagatttcaagacaaagcatttgcaactaaaaccacgcaaatgtgaaactttgggttgacgtccaactcgaagctcgtaagaagttttaccaggtttaaacctcaagaaaatccgatttgaaatatagcaagcagtgttaaccgcatcagcccaaaattttctagaagtatgatactcatccaacatcgttctagccatctcaaccaaagaccgattctttctttcaacaacattgttttattgcggaatatgagaagaagaaaattcatgttcaagacccttttcgttgaaaaatggttcaaatgaagcatttttaaattcaccaccattatcactttgaattcttttcaaagaactaggaaactcaagatccaatcaaagatacaaaccacgaaagtgttgaaaagcttcatccttagttgccatgaagaaaacccaagaatatctagaaaaatcattaacaataaccaacacataccactttcctccaacagattgcactctaactggaccaatagtgtccatgtgtaataattgtcccggtgcatctgtcatcacagaaccaataggagcatgtgaagaagcaatcatcttagcacgacgacacaatgtacaaaccagatcaagatctttcttaagtttagacaaaccacgaacaagatccaaaccacttaacctcgtgagatgatcaaatccaatatgtcgaagtttacgatgcgaaaacatcgcatccttattaaacttagaaaccaaacatgttatcataggtaaaacagaattttcaaaatcacctttaaacactcttccatagcgagagatattcatcataaaatcaccacaagaatcaaatactttacttacaattttcttaaagtgaacctcaaaattttcatcgacaatttgtgaaactaaaagcaaattatactttaagtcctcaaccaaagctacatttttcaattcaaacttgtcatttaccttgaccaaacctgtggcatgaacggcactagtagaagcatcaccaaagataatcgattcagtcttggatgcctattcgagggagggagaaccaattttattaccggtcatgtgccacgaacaacccggatccatgatctacatgttcttttttctcgccaccaaagcctacacacaagaagatgtcgaagccttagtattggggctagataataaaaatttaggaatccagtactgagatacacgaccattagatccaataggcatatatccctgtcacgccgggaatttctatccaaaattccaagcgcttacatgtgtgttaaaccctcgtccaggaatcaaccgaggcacataatgacaatttgataatagagtacaaataaataactatcgaataatcgcaaataataaattattacagaggtggatagttcctctcaaagaaaaacattctacgcagcggaaaaaaaaaactataacaaactacggaacagctatggcgactccactccacaggcatcttaaccgagaacaagcctaatccaccagatcatcaccttcactgagatactcctcttctgatgaatgaatattgcaagaatgagcatatgacatactcaacaagtcacacagcaaatatgcaagtgcacaggataacaaaggatggcataatatagctcatttgcagaaacagcatttaataaatatttaagagaatagtaaaacgggtgtataattaatcaatattaaataaacaccacacaacacacccatgttgcataggcccaaccacatttgaacaaccaaccccagttgaacaaattaaacctnctaaccaggaattattcatttcaaactaggaattaaaataattaccacattattaccattaatgagttgtgtgagactaatcacgaaa

SEQ ID NO: 28933 - DNA, 19703 bp, Oryza sativa
  unsure (1)..(19703): unsure at all n locations
atatttgagaagctgcatcttgaacttgcagttgtctctattgacccatttgctgtgtgctaataataagtcgttttttttccgcagatggagaaagacaaaactgaagataaaaaacgattagccgagaaagatgtagtattgttggtgaaggacaaggaagaagatgtaactagattaacaaaggataaagaagccatgggaaaattgttgaaggacaaggaagatataattagattgatgaaggagaaggaagaaatggtttggatgatgagggagaaggaaaacatggttagtttaaataatggcagggttgaagataaacatcaactgacagataaagatgtagctaattcagctaagtacaggaatgaaatcattaagttgatgaaggagaaagaagatagtaatgatacaattatgaaattaaatatagaactggaagctatgaaatcctcatatgaaggaacccgcattctgttagattctaagaagaaagaggtacttcagcttttgatggacaaggagagcattgaatatatagtatcacaacttaagcaagagcttgcaatagaaagaagctcacatcagacacatattcaagaattggagactagggcttttcaggcaaataataatttagacaaaggnataaagnaaatgagcttcatgctagaagactctaaacaagaagtaagagatcttgaggaattgttagaatcaagaagccaaatttggagcaaaaggaaatcaggctgaaccaatttattggtctacaaatacagaatattcaggtattgattggccatatcactttttcccactatatttcttttaagagtttgtgaagtcatcaatttaagcttaaaattgtcccttaccaggatttgaggttgtcttctgtttccatcaggcatgaaatcctacactgccagaaaagatggtctgaagaaatttgtgacctcggtgagaataaatgaaataagttattttagtccacatggaatagacatactgtagttatcattttataactttcatatcatttacaactctgcaggacaaagccttaaggtattgacaaatgctgctgaaaattatcatgctactcttgaagaaaacagaaaattattcaatgaggttcaggagctaaaaggttgcaaagcaaacagtattgctcatttatatgctgatatccttaactatcaacttcttatattatatgcttatttatcaggaaatatcagagtccattgccggataaggccttttcttcctggagaggatcagacatctactacaattgaatatgttggtgataatggtgaactaattttagcaaatcctgcaaaacgaggaaaggaaggacataagttgttcaaattcaacaaagttcttggcccctctgctagtcaaggtaagaataaaagcgacacttaagtgaaatttgttgtgctttagtgttgattatactaattgtccagagaaagtaccgaaattttgcagtgctaacatacagtttatgttcatttgtatattcattttctggctagatgaggtattcaaggaaattcaaccactaattagatcagttcttgatggctataatgtttgtatttttgcgtatggtcaaactggatcagggaaaacatacacaatggtatgatgctctcagcataagaatattgatctaatttatgtcattgagaagtactattgacattattaatgttcttgccatgccatttttacaaatatcttagactggacctgaaaatgcaaccgagaaggaatggggtgtcaactacagagctctgaatgacctattccatatctcacggagtagaagagacaccgtgatgtataaagtagtgttcagatgattgaaatatacaatgaacaaattcatgatcttcttggcaacagtggttcagagaagaaatatccttttggatcacaggctttaaagtgataaataatattatttattgacaattttgcacaagtagtttgtgaattcactggaaagttttatgcacatgaatttccagggcaacacatttccatttcatgcaactgagtttcatacattgtctgcaatacatcactattgtctcggtgacaatgaatgacgtgttgtagatatggatgaaacagaggcaaagtgtagatttatccttaatttctctgttgatgtagtcaacatcaaatcaccaggttttttgatttggttaacaaccccagcacaactgtatccactgcctagctatggactgtcagttgattcagttcgtagaaacgtgaaacatagttggtcaccattttaccacaattaaataaaatctagatatatgtccatcttgtaatgagacacctttaaacctccacaagaaagtgattccttatttttctttaacttgcgcacacttgggattttgaatgccagccaacccaatgggcttgctgttcctgatgcaacaatgcatcctgtcaactcaagttcagatgttattgaactaatgagaacaggacttgagaacagatctgtaggcgcgacagcattgaatgaaagaagcagcaggtctcacaggtaatttttttcgtttcatgtttctgataccatttcttttctgcttctaatcaaatataaatatataagcttattttgagtaatctttcagtgtagttactatgcacattcaaggtgtagatctaaaaaccggagttactttgcgtggtgcgctacatcttgttgatcttgctggaagtgagagggttgatcgctctgctgctacaggagatagactaaaggaagcacaacacatcaacaaatctttgtctgctctcggagatgtcatattttctttgtcacaaaagaatgctcatgtaccgtaccggaacagcaagcttacacaagtcctgcaaaattctttgggtgcttacctttgctaatcgattgtataacattgttttacatatttaagcttacacgagtactgcacaattcatggcgtacttacctttgccaatcaattgtataacattgttttacatattttgtttaacctaaacgttttcatgtgtaggtggcaatgcaaagacgctgatgttcgtgcaggtcaatccagatgtctcatcttatgcagagactttaagtactttgaagtttgctgacagagtgtctggagtggaactaggtgctgcaaaagcaaataaagagggaaaagatatcaaagaattcaaggagcaggtgacaatttgcatttgccttttgctgacagtgttattactctcgtttgaggatggcactaaataaggatttacctgcctctgatatttatatatgttttatacttgttctcatacctgaggtgcagtttacccttattttgtgcaaagagatatggtttacgcaaaattttacatcagcatgagatgaaataacagttattctcatcagatgctattctgagtgttaataaaaggaaaagcaattgcttactctaataaattttcaacctgcagctctcactgctgaaagataaaattgcaaagaaggatgaagaaatcagccgactacaactacagagtcataatactccaagggcgacagctaaacgtgccgattcattgttaaaacattcgtcatcctccccaggcatatcatcactaggaagcaaaatccagcaccgaagaacagcatctggtggaaggataaagatcgttggcagtagagcagggtcggatgttgacaacttctctgacatcagtgacagacattctgaagctggttccatgcaatctgtcgatgatatccagcagtcaagggagattatgggtctctctaagctctccatgagtgagatgggacataattctgttgaccctgagcttccttgctttggctatgatgattcagaggggaggctaagcgacatatcggacagcggtctttccatgggtgcagaaactgattgttctatgagcagtgtggttgagcttacctccttgccagatcaggatagagtctctggcactcagaaagagcaacacatggcaccaagcactccaaaagatcggttgtaagtactttttgttctgcagtaaattgataacaactaactgatgagaagtaatctaccaatcaaactatgtcgggtcaaggggatgaaagtatgtgagaaatctgtatgatcctaaaagaattaatgggagttagatatgttacttatatgacacttaatcttgcctatttcttgtacacttttatgtttctggcactgtagcatcgatattaacatatgtaagcacatgttcttttccaaacaggcataaggtggccactcgagcatcgaggacaactacaccaaaaacaccacaatcgcctaccttgtggcctaaactaagagatccacctcctcctagatctccaagtaagttcacttagcaagccttactttctttctaactgtgaatttcttgaaaagcatgtgccctccagggaaaaaaaagctgcacacataacttaaagcatgttatactgatatactcaagaagagaaatgtaattttaacggatcccactgacaagtaaatttgctgcgaagaataatcataagcagggtttacattatcgatagaaagaatttgaagtacttatcctaacttctaatattcctaccatcaattatttctcaaatgcttagttttgaatcaacaaaaatggtagttgtagattaaacttattaggttttatagacattataatgtaaaattgatggtcgcaatttaaaaagtttaatcaaattgtgtcctaagtttcaaatatttatgactggaggaagtatctaagaaagtctcttaatgggccaaaagccctgtgaagctagggctcaacaagcccaattatgtaatgcatgtgaaagattcctccgtggttaatccccaactccacagcatgcacttacctcctgagctcgaccaagcacttttcctcacctcttcattttttttctcaattttctaataatttttgctatattttcccccatttatagaaccaaaattaagtccaacactaatacctgtagcttttcgctaaatccgacgatttttgttttctaacatgtggttatcgcagcctcgaaatttcaaccatttcactcggtttttggtggatgtttaacggaaccccagaattcaaattcaaattttggtttcaaattttgtccaaaatttatcggtttcccagagtgtccatcagaaatgtaaactctgatcataagcattctaatgatttattagctatacagatgaccaaagtagccagggcccaaaaactagctgctattttgtgagagaaaatgtatggactagcagtacttcaagtgttaattttgcttgataaaatgatcatgtctgatagtacttcaagttcaactagtacagtaagggataataagttcaaaaagttccaagggaattaccacaaatgtaagtgctattgcaaactgttcactaattttctttttgcagtatctacaagcacaggaaaggtcagagtaacacaggcaacatcttcatcaagaaattccagtactcagaaaaggtggacgtaaaagctgtgcatccttgacgaacatcttgcaacattggtataacctttttgtacattacatctagaaaagcatttgttttgttatttaatagatactactcattgattctgcactctggttttctttcacaattgaagaactgcaaaaccagttggaatagattgttccctgtaaatgctcttgtacatatgctatgttcacaatacgataaacatttgatgtgtttattataagcaatgaaaagacggtgagcttaagacatgaggaacttagtatacgaaatactcaaattttttcttgcataaaacttcatgttgattttcccaaagattagtgacatgcccatgcattgcagcgggtcagacccaaatgattggggatgggctgggagggtggataagtcaactactgtagtagaagaatcactccaaatgaaaaaaacaaagaaaaatgaccaactatgtaatttacggcaaaacagatcttctgaacccctaacattagaatttgcaagcaaggaacatacatattaggcctaatttagaatgtgggaagtttttcccatctttgtggtattgagttcattcctgtgaagaacatgcaaagtttctatgaaattcttgcattcgaaaggagaacaggaacttgcagcattttcacatggaaaattcctgcatttgaaacaggaccttataatcatttataagaccctgtggtcactacacttgatttctattgagaatttgttgtgacaaaagtaatccaatggaagaataggccacgaacaaaatttctgacaacaatgctcttataaagtttacatttccaaagctaaaaggtcatatgaaacctcgccacatttggcgatgtatggaatacagaaaacctaccagcatatttacatggcatatatagaccacaaaaatgtgaggataaaagaagatattatctgtggggaaaggacaaaagaagatttggttcaaaaccaaaaaaaagtttccaaccagattttgcctgttgtttcaatgcccctatcgatgttggaagttcaacttcttgatgcaaatggcatacatgaacgcgaaaaacacagcgaagagcacgagcaccggcgcaacaactggcataaatttcctgtgatatccaaaatgatgagtaacatagtagctgattgtctggttggattggccagggactgagatgatttgttctaggtctccatactgtgtcactatgagcccatacactgtccatgccaatgggcaaagccagtagtaccagatccaccatttgggaatcctctgaaataaaacatgaataacaccattactttgatcttccaagaagaataaaaagttcaaagaaacggtttgatccaagaaaactcactggtctcggaatgaagaatcctgagaataggttgaacaaggaatagaacgccgcggcaaagatggctgcaacctcatggtttggtgagattgccaccgtcatcataccatagtaggtgaagtagagaaatgagaagtaggagacgaagaagaaccagaagaacttggctgctgtccactggaagctcatcatggcataaacaatgagggtataatatgcagtttggacgaacacatagggtatctccatgacaacctacaacaaattatcaagagttgagcaactcctggaaacaaattataccttaactgccttagctaccaccataagttacctgagcaatggcatagggcatagcagagtacatcccagcagccctctctcggtagaaaactgttctctcaatcgacacgattggctgcacagtcgcacaattgttgataccgataaacatcactgctgtatacattgctccaatgaccattctaagagaattggcatttcccctgatcataagacaccaaaaacgtcagatactggaacattaagattaaggagtcaaagatgaaaaagagaggaagtatttacatcttggtgccgatcttccaaaagatggtgccgagtagcaaggctgtgaacagagtgaaggaaaatctaacaagattgtaatctgggctgcgccaataggtcagccattgcttccagaggcaggccctaaattgccctatggtggattgagagtattttgtaggaaaatgcagatctgatgttcctggctctggttgacttagctgattcaccaataccttgttttgcctgaaaacacggcccatctattccatgagaattgacacacaacaactaaaaactttaagaagaaagataagagtttaaaagtagaagaaaaaaaaatgtttcgcttacttgtacaggtctgatgtcttatagtactcagcaaagtccatatttaagcgtacttccgcagcaactgaactgacctcaagcatccatgtagctggattgtacttatctttgattttaggcacaccaggaattgcctggtaatattaaatagcagattggttagaaaagtaaatttattctagttattcataacacaccttccacttagcaaaagttaaccaccatctgaaactatctgtacctcgaaatattcaatcattttctgggaattacgacccaattgcccagagtatatcacctgccctcctcttttcagtagtagcagctgcacgagagttcaagctcgagttactatttagttactaaaaggtggaattactatgtaagtaaactattcatagtcacctcatcaaaagcctcaaatatgtcaatgcttggctggtgaattgtgcaaaccactgtccgtccagtgtcaactgtgttcctcactgttctcataacaatggctgctgctcttgcatcaagacctgaagtcggttcatccatgaagatgatcgagggatttgcaacaagctccactgctattgtcaatctcttcctttgctctgttgaaagccctgtgattccaggcaggccaactaacgcatccttcagattgtcgagctccactagttccataacttcatcaacaaattgctggaaacaattgaacttgtgagtttgacaaattgtgacgacaaatcctagtaatcagaaattaaccacccaatattcacaaaaaattaaaacacctgattgacaataatgttttgtgttagcaacaaacaaaagtaaatgacttataatacaccctgatgatgaaaaaagatgcagtgttttgacaaggaaaaagacatgacttacaatcttgatatcatcagtgatttcttgatctcctattttttctggaaggcgcaggaaagcagagtatatcaaagactccctaactgtgacctgaggtgaatggatatcgttttgctcacagtagccagaaattcttgcaaatgtttcttggttcttaggataaccagaaattctcatatctccttcaatgtaaccaccagtctttcttcctgccaaaacatccataagagttgtctttccggctccactgactcccatgagtgctgtcagcactgcaggcctaaatgatccagtaacgtcacgtaacaattggagcctatcatccaccactccttgctgcttcatttcctatgtataaaacattaatctcaatcaaatattacaaattttcgattgaggatacgacagggaacaggacaagatgccaagagaagttaagcataggtaaactcactgcaggcatgtcgacatagtagttcacatcatcaaaagacatggatagaggagtaaatggaagaaccattcctcttcttggaccagcttcattgctaccaatggacatcagtcgtgaaactccattcgatgaactattgctcagacgagcactcaatctcatctccctcatttcttctgaaataattgccttattattcctcagttttaaaaacttccaattttttcagatttaattatgacttgaagagtttcttactgtgatttccaccatttgattttgtgctgccatttcttactgtatgtcttgcatccccattgccttccgcttccttcgcagtttcttcagatatgacagcttgtggtttgcccagagctaacaatcaaagaaccagcaaatcacgtattggtccaataactataatcacataagcatttagattttaattcagatacttacgattcagataaacgagtgacagagtgaaaagcacattgaaaaacatggtgaaacccaggagccctgctgctccaatccagaaccaatttttgtcagtgaagatgttggcaccttccatcagagctattcctagtcttttaggaacgccattgttatcctgtcaagatgcatgcaaacattgtcagaaaacatatttgcaagggattttaaggttcttgaggcggtactacaaggtaagccttttctgttgtaccttgtgatacttcctcaaggactgtaaagaacctctatacgcaaacaagtgaaaaggcagtgctataatgagcttaccagtacaaacttgttcatccaccgaggagagtagaattcattgactgctagagcattatacccgtacatcagtggtgaaacccagtaaccccagatccaccattttgggatgaatgctgttaacagtcaagggcaaagtaatattcaatagagctgcaacatttatgtgcagaaaaaacgtggagtgaaaataattagataagtaaaaaaaaccttttggcagaagaaatcctccaagaacgaaaaatatgagaagggccagggctcctccagtttgagcaatgatcatggatctgcacagaccagcagttgctctgaaaaggccacctgccatctgctggatcaagaacactagcagcaactgcttgaaaaatctgtgcagaaagatgataggtaagtggacagaaaccttgctttcctgaattcatgtttaattctttttctgctttttgtgtacctgtcagcctctggggcaaatcctatagtgtagtatgtaacaatcacccagactatagattcgatgatggaaaatgggattctcagaataacattcggtagagtgaagatccaagcagggtagaagaggaggtcccggtgcttgaagaacactggcaaccttgtgatggtcaaagagagctcagcgaaaccattgaacatgttcacaatcagactgaaaagtagtgctccaatgtacacaaagccatcatctaaattccttgtgtgcatctgggtcctaagaaacactgtcgacgcgacaagggctacaatgatgagcttcaaagttcaccggcagaaggtgtcagtcgattgcattgtgtattttgagaagtggcaagactgaacaggaaactttgctcacctgtatggtcttgaagatgtacacaaatgagttgcgcttaatgaggagccactccttggcaaaggatgccttgaggagctctgttgttgacaccgattgcttcgagaagacaagagcagcctgatggctacgagttttatcaaatgggactgagagatgattctcaagttggagcccaacatggaaccttttaaatctctgtgcaaattctgagactgaaatgtatctgtatggcctatgcttgtcggcccaatactgctcctgatccttctttgatgtcacctgaaaaattggcaaaataaagctgttcaggtaaattcacatattgaagctttcagaaacatagattctaataattagacaactgcatgatgttacctcctgaagaaagtctgcagtacccttacgctctgggcagcggaatccgcatgactcaaagaactcaaggacgtattcgcggggtccctgataaacaatctggccttctgacagtaggataatgtcatcgaatagctcaaaagtctcaggggctggttgtaggagtgacatgaggatggttgcctcgcccaagtgcacgatttgctgaaggcatttgacaatctggaatgtggtggagctgtccaatccagttgatatctcatccatgaatagaacctttgttggaccgacaatcatctcacctgcattccaaatgagcaaatttgttcattgttagcatccttacaattttcggggaaaaaaagggtcaataccttcaatactttatagttcatactgatcatttgttgaattgctagtttttgtgcttttcacttcttaacatatttttacaagaaaaataattgcattctagattttagccatataatgtaattatgcaaaagaaattgtacaccttttcttccagaatatatgacattttggaagggtttggtctctaaaatccatctttgaccgatatcttttgtgtgaaacacttatgagaaatagaaaataataatatagtatgaaaatatttttatgtatagtcatgttaaaagaaggcaatggtggggatgggggtgaatctgcctaggggaatatcgggagtggaaacgtgccggtgccaatccagaactgataatttagattgcaagcaccaaacataacacaatatcttcatgcattagacttgttacacgtctagaagctaatactataattggaaccatgtaaagaatttcaagtgtttcttgttgcaaaaatgttcttttttagggcagcaacagaactgttcttaagtgaatgtatttaatggaaaagaaaagcacagtaatctgttttgaacatgtatgattcatttttatccgtagtatttagcacttagcaatagcttttccaaccaaaatcggtatgacaacaggatccagcaaaacttgaaccctcctataatgcaatagtcccaaaagtaagtactactcggtcatatctctctgcccccatgcacttttggttcattctaatagctatcagtatcacactgaacccaataacctacaatgcggtactgtctacagtataggatgcggaatgaacaagctacagctcttcctcacactctcagaggataagagtggtcactggacaagtgaccatccaacaactatgcagtgcattaaccataagatgcctgtacaatacagcatgcaccccagtcaagtggtcatgcacttcttcatgtgtggacctcagaggcacacatatatctcatgatcaccacacctttttccagtaggaaccacaagatgtagacaccggaattgcattgtctcctacacatcatagtcttctagaaagacttaaaaaaaaaatttgcaagttcctttcaggcccttctaagtttaaatttagtttaattcgtacatctgtgccttctaccccctaaaccagaaaggaacaaaggcacagagcagcagctcctttcatgggctgaaatgagcatgacacaatgctgacggaagcagcttaccggtggtgacgcgtttcttctgaccaccggagatccccctctgcatctggtcgccgacgatcgtgtccgcgcatatatccaatcccagtatctgctcccaagaaaattcagtcaaaaagaaataattttcaccagctccagttgctacttgcaaccgtcgggatcaagacagtttaaattaacatgactaattcctgctaaccccatgtcaagcatgggcttaatgcccctgaaagctactgtcacctgccccccccccccatccccaaaaaaaaaaaaaaaacacacatttcaaactttacctaccatccatcctgcccaatgtaattatgttactacgtggccagtgctcggaaactcgcagtaaagctgataagaagcagaagctttggctgggcatatcaacaaacatgtggtgggcatcatcaccacgggtgcgcgccatttccaccaggccaagtgggtgcaccaaccccccaatccccccttccaaagctacaaggatgccccaccaagaactcaattcgagctccatctcccaattagcagtaggtgaggaggagggaggaagaaaaagagggaagaaagaaccatcctttgtggtcaagacacaagagagtcagcaaacaaacccactccctcctgcctgctgctgctgctgctactaatcagtaggagaagtatgtgcccaagaatcatagtagtggacttggtggttgattggatccttgaaaaaaaaaagaaaaaaaaattccccttttcccatttggtgtgcagtgttcaccaacctgggtcatggttagtactagttgtttgcttgtggacaaatgtgcaaccaagtcctatatgatttgcccatgattgattggaattgggatggtttgtcccttgtgttttccaatgtcaagactgaatctttctttctttttttttttgccggtttgatgacataatggtgaggaaatcttgcgctaatcgcttgttaatccatgtgtgaatgatgttgctatcagcttaattttgtagtgtttctcccttgtgctttctctatcaaggctgaaccaatttttttttattggagaacataatgatgaggaaatcttgtgctaaattgtttgttgttaaatcatattatgtcaatgatgttactatcagcttaatttggagtattatggaagcgaaaaataataatagcaaattcaacaaagtcgtgaaaagctcattactctgagggtgtaatctgtctgaaggctgctctcgactccttccatcgaagtagcctgcaaggaggaattaatcattcgtcacgtaaacaaatcaaaattaattatcttcgaaacaaagcatagtttttcctctttttttttcgattgaaacaaagcataatcagcaactactatcaccactattaacaccccatgtggtacacgtacgtctaaccgattgtgagatgtcgttttcgcaaagatcgtgtttgtcattaaccctgctcgaatctcattttcataatttcatgtcctttacgaaggtacaaattgcacggaaaatatatagttagattcctgtggaaatttccagtgaccactgtatataataatacaaggaccatctgatttagaccctgcaaactaaagtgagtgtacttgtaccatgtgcggctttaattaagctgctaatcgaaatagtagtaattaatcactcattatcaacaaaaaaaataatcactccagttaattaattaattaccttcatgaagaggtcgacctcgggctccggccggatgccggcctccttctccctccttgccagctctgtcagaagatctgcacggtccatttcccatccaaccgtcaggattgatcgatcgaattaatcttgaaaaattaattaattatgggacaattgtcaggtataaatatagtattaattataatttggttacattatagctacaatacaatttatatataacttccaataaaaatcccgcagtgacacgctattttcgtgaaacggaggtcgtgagactgaatctcctcacccatgtgcgcgttattttttttcccctttctaacttgcatgaatcttaagataaatccaacggtttaaaattatttaaaaattaaattattgttaaatgtaagttataatataattacactcaacaataaaaaattatcgataaacgtacaacaaaattattaatagatcgttcatcatcatcatcatgatgagggtgcgagtaattgcacgtaccgtacttggtgccgacgccctggcacctggccgagaagtcgagcgtctccttgacggtcatctcgccgacgtgcacgtccgtctggctgatgtacgccgccgtcttctgcgccacgaactcctccagctcgaacccgttgtacgtcacctcgccgccgcgccggagcgacgggtccagcttcccggcgagggccaggaggagggtcgtcttccccgacgacggcgggcccagcagcagcgtcatccgggagggccggacggcgccggagacccccctgaggatggtcagcgtcgcctgccgccccggccggacgccgacgagccccagcgccgcctccgcgatgttgcgcgccgtgttcagcagcgtcggcagcgcgcggctgcccacgtggcacctcgcctgcaccatcagctcctcgaaccgcacctccaccgtcggcagctcgatgcccaccctgcacgcaccaatttttttctcacatttttcttaacaataagggaatgtttttttttttaaaaaaaacactcatgagttagttgaagtttggcatttcaccctataaagtcaatttgttgtaaatgcttactcctacttaattttcgttaaaaaaaatcaccttaacgtgcacgtgcttaattgagttaccatgtttttataaattatgaaccatcaatatagtctttaccaaaactaaatactttaagatcattatagtcacttttttttcaaaatgaaaaaaaaaactagagctgaaatattgccgggttaggttcctccgtatccatgaaaaatttaatgaaatataaaatcaatttgttgtaaatgcttactcctacttaatttctgttaaaaaatcaccataatatgcacgtgcttaattgagttaacatgtttttataaattatgggccgttaatatgttttttttttaccaaaactaagagtatagctagtcactttcctcaccatcgtacttctatacgttaaaaaaaaaaccacactagccaaagacaagtgtttttagtaaaaaaatggacccactaaaaaatgggatatatagaaaaactcaaccctataaaaccattcatccgtttttctccaaatcctattacagcacataggcatgataaatctctaacgttgctatagtctctggaagggtatccacgtatatatgtattaaataactgtttttcatattttagtatatttaccaccgaagtttagtccaaatcattgtgtcctctacctaaaaagtagtttaggtcaagaaaataatatttttatctgattggtcaacggagatatgtcactggctaaacggaaatggttggtgtgtgttacggttgatgctaccatgattggcattgactcattccatttggagcacgcaaggggatcagttgcaatgttagtttgggtgtcaactttagtttcagcaaacctactgccagggaccagcgacaggaagattgtgttcatttggaagtgcataaaaaggaggatcatacacatatgtgaaagctagttgctctcctaccccacataaaatggcacttttggtcaagaaattaaaattatattactcaatctaactgcttgtatagtgccatcgtatctgtaactgataaactaaagaatgtgtgctaaaactgaaattaatacatactttctccgttgcacaatttaagacttttagcattgtccacatttatatagatgttcattagcatatatatgaatataaatatgtgtaatgctagaaagtattacattgtgaaacggaggaagtatgtgtaaccagtaaatattaaaaggcatgtaataactaattaactaccagtgatactaatatgcacacacatcaccgggctatctatttgtcaactgactgatttttttctctcctcatgatctattgaattcctttttcaactactgaattaatatccaacaaataacatgaatatgcctttttttttctttcctcgtggaagtaaaagtgtaaagcaagcaatttcaaacttcaacctaaaaatttgtactttgatatgcacggttgccaatatgaaagtcaaaagtatactaaagttagccacaaattgtatataggttcattaatttgggaaataataatcaaatcaaagttacaatgagttcatattaagtttgcagctttcttaattgtgcaagaaaaatcaggcgaataataatagcaaaagtaaaataaaaaatcaatttgatttaagtgaacctactagtgttccaaaaggagccatgcacccatcatgttggaggccgaaaacagtcacaaaaaagggaattggcaaaggaaaaagagggcacacactggtgctgatatcatgcacacgtcagctgacttcattaaccataatatccagcacatgctgtttttcttcttcatcatataatttctcatcttttcatgattttgttttgcaggcagaaacagaaaccaaacatgttgattattaagaaagacatgaaaattaataattgaaaaaggtagtaggatcatcatctgctgctgcccagctgctcctgcgcccttcattccatcaaatcaatcaatcgctctctgcttcttggtgtattgccttctaaattagcttattcctactcctagtagcaactctctcaagtcccaaccacaattatgtatgcatttattcctaatacgatgtaattagaccgtttaatggagctatcccaactaaccctcccagcatctgtgagtcgcaaagtgcaagaaaaagcagtagtctgaattgaagattatattcgtcttgctgcatcagaaaaattaaagataaaacaaaaggaggcgccggccggccggctagttgtctggctgaaattgaatatgttctttttcttcgagattttgggtgttcaaatgtatctttccaaacgcatgcctatatatcttggcttgcaatatggtgaagatatggttggctcaatttcggccatagaaaaagggtgcaaagcttttgtgtggaagaaaagccaactacctgtataaatcatgcaacaacccatgtgtactcgtatagctacgtatcataactttatacctacatgcgtatttgtcctaaaaatatacgtttaattggtacttcctcttatgtagattgtagaagatggattaattaatttttctattattaaaaagtaaaccctttttgtcccctcgagctgagctgccttggactcggaccatcattgtttgactagtagtcaagaaaaattcacttcaaagctgcacaagctgtactcctatgtaatagaggattacctctgttttttaatatagacgttgttgattacatatattttttaaataaaatgaactgccaaacgtattttaaaagataaacggcgtcatatattaaaaaaaagagtaatttctttttcatatttcaaagatttttctttttacaaaatcgattaagtagctagcttaattaggtttgagattgtacccctccgtactataaaaagctaacataatatactgcatgtgatatattttaatacgttatactaaaatgtgtcatatctagtcatagattcgtttttcgtgaaacgggagagtaccttacagcagcatgcatgatgcatgtatggatgatatgagattatcagattaattaatccgttggagatgattaattaattactacatatgcgttaataataattagcgtacctgtcgatccggttgcgtagcttctgaaggaatcgctggttgtcctcctcggcgacgcggaaaacgcgctcgatgaactcttgcctctcgccgacgccgagccgccggacgtccacctccttgtactgctgcttgcctgctccggcggcggcggcggcggcctcttcttcggcgaagaagagaatgncggtgcgcatgcggctgtaggtggggaggcgctcgatggcggcccaccggagcgcctcctcgtcgtcgtcggcggtgccgccgcggccgctcctcctcctccccctgctgcccccgccgccgccggagttctgcggcatgaaggcctcgtcgacgccccacgcctccatccccatccccctcccgatgctccggctcatccgcctccccgactcccacaccttctccatcgcgctctccatatctctctctctctctctcagtttcgccgccgcgtcgcgccgcgccggcgagctgatgacgagaagctgtagctaggtgagagtgagacgaagcgcgcgtgtcatgtggtagtgatggcgccggcgagcggcggcggcggcggcggccggggcggcgcgggggtgggagtggtggagagagtggaagaggcgaggcgaggcgcgcgctttttatcaactcgcgcgcgggcgcgggtggttttctctacgtgggggttgtttttttctttttcttttttggggtttataaatagaagaagcggggtaggtgtatagctgttcaagaggntgtcatctaggcccg

SEQ ID NO: 28934 - DNA, 25061 bp, Oryza sativa
  unsure (1)..(25061): unsure at all n locations
agagagtggcccacggccccccccacgaggtagagaaaagggacaagcacgcccgccatccgaactaatattgtcaccacccccaccgcaagaaatatagaggaataaagccagcggagcagacaaagaccaatttccccaccaccctcccaggggacgggtcaaaataaccacaaagacgcccaaccttatccatggcgcctacaaaaaagaaagaatccctataaactgacccgaggagtcagccgcgcccgtgacttaataaggaataccgtagagagtaagagtaaaatgaagagacggcccctggtggagaaaatgacccggcaagccgcggccgacatcgtcgaaatgtgccacctcgccggcggaaatgttgtagacaggccaaagccagaaaaagggacgcacgcaagccaactgcgctgggccgcggaagatgtaaaaaactgacagccctcgcctgtgtaccagtaaggggggcattaaatgagaacaacagtagggttcagctgcctatcgagacgacggtagatgataaggcggcagacgcgtacgtgcnccatgggtgggggactaggaagaggtgaaaaaacgtcggaatcgatagggaacggtttgtttgaatttgtgcgaaaaatgtccgaaatcataggaaatcgcgtttgactctgcacgaaggatgtgggaatttaaattagatggacgaattttcttcttaaaagtttgacgtatgtgattataatataatcgtgatataattacactataactaaaactaacatgtaattataatataacatgtataaactttcaaaattgctctgtatcatactattttcgtgaaatataggtcgtgggatcgaatcctctcgattacatatgcgtgcactgtgatttttttccttcccacttatacgaatcttgaaacaaatataacatttcaaaattatataaaatttacatataagttacattatagttatatgcaggttacaatataattacactataattatatttgtcaatttttagaagaaagattgtctataaatatatagcaaaattgcagattaaattgtctcacttgctttgtaaactattactttttttccttgaaacagggcagacagaaacggtatacctcaaaacaattatgatatcggaatgttgcaaaaagacatattattaagaggggaaacacggcaatttcgaatgttgaaaaaataaataagaaacatagcaatattgactagaagtagtaaatcatgtcatgtgtgaaaacttgaaacacggcaaagtgttagaagttgataaaatataattatgatatgaaaatgatgatagaaacgatattttatcctgagccccgaaacacaaatatcccggctagattaagaactggtactaaaaatactttaatacatgttctaaaagtccaagtctttagaaatatcttcaatcctggttgatattagtaaccggtacttaaaaattggtaacatcaatcaaaactcatgatctttactcctagttggagatgcatttttagtaccggttggtaacaccgacgacccatactaaagatatttttaagtactggttgatgttatcaaccattattaaagatgcctttaggattagttaaaaagaaagcatttctattcaagtcagatatgtttagtatgtgagatggacagatggtaaagcgcgtgagagctgagatgagagatcttaagtatgaatctcatatcccacatattttttagacttagtatacatcttttgactttagtaccagttaagatcgagatctttagtcttgatttactaaagagaggttttgaccggtattcgtttcttccctagtggacttatgtcgagccttcagatacttcgctgcttatagcccctaccatcaaaccgctcgtcacatagcgactctattttttgtttcatactagtaatcgtgcacgtgcaatgcacgttatgttaaaattattggtccaattctattaataattgaaaaacaataaatttattctaaaccactgatgttaacacgaaacttaagtgacaaataagtaagagccatatgtggtcccttttgttatccactgccatttcaaacaaaataaataaaaatactaaagtttcacttctcactacatttataacaaagttttacatgtgccatcacaagttaaacttttgcaactaatttggtctaaaataagcaactataggaccatactctcaccgtaacaatatgcaacctggagattaaaaacaataatccaattaagttgatcaacatgtcagactgtcacttatgtccagggatgaatacctcaatactatacaatcaatcaccccccgttttgcatctgatataaggataagcaaaacattatggccttgatcggcagcgatggctgctgccgcagctgccctataaggtgtaaataccatgtgaaagaagacatgcgtagcactctcatgtcacttggccatataaagttttcaactccacaattatataccctcctctcctcaacatacctgagcactgcagaggtgcacatgaatccatttagattatatatagagaaacaaaccctcttctaatcaagcgattttgaagagaaaatgtataatatatgcatacattccttcaatgtccaaactgaaaattaagaatcaacggtatcagccatagtgtcagccatggaaaagaactgagttagatcacaatatcttactgacgaaactaaatatattgaagccaattttctatcaaccactgagtgcatgcacaattgaattgtttatatattcatataatacaaaattgtaaagtgccagcccgaagaagtacatctcgacgtgtcagacacctatgtttaactgcatgtccatgcatgaaagtcaagaaactgcagtagaaagtgatgtttctaccctcacggagtgacagtaaaatcaaatgcaaatgttacaagtataataccaaaataaatactgatctgttcattttgaaagcaacaaactattagactgaagcacatgtattcacggtaagaaaaaaactaatgactaagaggtcaacttggttcacaggagaaaaaaatatgcttagagctctgactgagacacgaaggagtacctaaaaaatatgcatcatgagcttaggacttagagcctcctttgcttctttggttcgtcctaactactgaagccaacacatggatgtcagtcatgtcactgcattcacattgccatctaccaactcccaagaaactttcttcattctcatccaccaaggaatcaacctataggagcagaacctcttatgtcacctgaaaagaaaaatggaacgttcaagagtcaattattcaagctactactgatcaagggatcgcaaccggcgagcatgtatatccatctgaaccatgttgcagtgtttttgttatacataatgtaactgcagaacacatgcaagaatatgaccccaatgatccataattgtatcttcttggctgttccactgaacaatactgaattcatccataattatatcttcttggctgttccactgaacaatactgaattcattatatggaagtcctgaaaaaaagaaggaaacatgatgattggatctcttgagaaaatgacagtatgatttatgctcataacaggcatcatctatgaaaaatatataatttagcatagtcgtgacacaacgcagcatgaattctaattgcgccggacctcattcttagtaacatataaattaagcagaaaatcactggacaatgggccataccttatcaccagaagtcatacctcggtaaaacaaatatcattatgttgagacttgagacgatcatcacccaaggaattaacatttatcattttgcacagctgtaaactaaatcctagcaatatcttagcaggcattctgatataggaggctcaacaggacttgggccaaacctctgtcgccaatgttgttgtccatgcagccatccccaccctctcccctcctcaactgctcccctctccggtgtcatcatcgaggccaagactggcggtggtgctggtggctagatctggaccctccgcctttgcatggcttggtccgatgcctcagattcagtgctgccgtggccggttagggaggaagaagagagctcacatcaaaggcacataagggaggaggaggagaggatatatcagcaccagcagcagcaggaggatgtgatggatctgcgatgcgggtgaggaggcctcgatgtgagatgcgggtgaggagacctcgatgtgcgatgcgggcgaggaagcgattgaggggagcgatctcgcccccgcccctcgatgtgcgatgcgggtgaggaggcaattgagggatggctcccgttgatgtgagctgcacatcaattgcagggagagaaacaggcgtggatagcgcagcggatatcgtaggacatggatggcgcacgacggcggagtcgatgaaggcgcgtgttaggttggtggggatgggggatgggagggacacagctgtccacttttatctttagccgttggatgaatcttagatttaacctatggatttcacccgttggatttgatttggcctgttggattgtaaggagtgaactcctcctttttatattagtatagatgttggattttctttcactctgcgtatctctttcctaaccaacgtccagaccaattccaatggatctcttcccatgttctgtcttctagcaccccatgcctccaatagtacaatgccacctctctgcaccaccacaaactgagcagtaatagcacactaaacattgagatgttgtgtgttactccttagcagcatatagctaaaaattcatccgaccatctattaacatcctgacatctgttaacatcctgatcaagagggtccctacttaaatcgtgcaacttttttaagcaactttcgtatagaaactttttgcaaaaaatgcaccgtttagtagtttaaaaagcgtgcgcgcagaaaatgagcgaatgaggttgggaaccaggatgttatgccttgtctaatgtggtgcaccaactgttgcgtttgtccatcgcatttattatatattctcgttgcattaatgtgacaaaatagcctataactaaaggtcttgtttttttcattatcatggtgaaaacattgagtccctataggtgggcccagtgtgtagtcccataaaaaggctatatcggcaaacaaaccggcttggagctcgaagggtagacgatgaactaatgattgtaaacagtactttatatctcctggtcagtaaaccctaaagaaaaaaatgatttatcgggaaagaattttcaaatcaagacaaacatcagtaaaccctaaagaaaaaactttgatatcattccaaatcccttgaatccagtattcaaattttgtagtaacatttaaaacatgtctccatcattgatgaattttcataaattttagaaaactagctaattaatgaaaattgagtttgcaacagttgtgtcctctgcacatgatatgcctcctaacaaatagtaaaacaaatattatgagcattcaaatctctaaatgggaaaatgagtcagcttagctccttttgtgaataacaagcctctgccatatgcccagccatgatgtggtccgtacacttgcattcggcagtgcgcaaagagagaaaaactaactcgttttagtgttttacatacgcacgtttcccaaaatattaaacggagattttttttattcaaaagttctatagaaaagttattttaaaaatcatattactatatttttcaagtttaaaagaattaatacttaattaatcatacactaatggttcatcttgtttttcgtatcttctcaatattttcattcctctcctctcaaattaatataatttaattaattcttgtatcaggaggatgagttcaaatgcccaccatagtttaaagctttatgtgtgcatctttttcttcttattccacttcttctctgaccttggtatctcaaatgtagactttagagtcatactcctacctattaccaagtgaatttaatattgtgatacccactgaaagtttcatcaaagaagtggtgggtgagtgaaagggacctggacacggactccatcaattcactgaaacgcaacaaaaatcaggacatgcttcctaattccaagccattgtccatttgtccacagtgatccaactaaacctggagactttggagtaaaaacctgcaagaatgtgtgctaccacactacagtacaactactgcttgcattgcacccagcaggttcaaacatagtccatgacctatgttttgcttttcttttattttgttgggaaaaatgtacttttcatccgttaactcttgatttggtataattttgcctcttaactacaaaaccaaaaccaatatagtcatctactctcaaaatcagcaaaacatgacccttgattgcatttggcaatggtttttgaaccatgtatgtaggtgttgaggtcttcttatatcaaagaggaatgagcactagagaataaaaagtaggcccacatgatcataaaagatgacttaggactcatttgaaacacatgattgagagcacaagaatattagaaatacatgcatgattttgaaagaggtgaaagtgtaaaacagatgattatataaataaatggccaaccgtttggttagccacatgaaatatttcacgatgttgtttgatctcattgaaatttcctccaaaatttgtatggattgaaacatccaatagggttctatgttgttcaatcctatgttcaaagtgtgtcatttaggggagggggattcctataggatcgaaatcctataaactactttgtttttacttcagatcaaagtaggtcttagataattgtggggtcttgatgaggcacagctatttggccttagagaattgtgggccattgatgaggcactgctaccctctatgacaagaagggtctcacctattttagttaaaactactctcaaatatatcaaagtggttgttttacctagtttagataaatgaggaacgaattttaccaaactacaattaaaagaaaaagactaaatcaatcaagaatttagggaagagaaaaaagacttttactttctttttcagatagtgttataggataaatgaattcatacatgcacttgttcacattccagtcacatatactaacaggcaacccatgtttttcaacgggcattattggtggtaatttatataaatattaaaaattggaaagcatgataacatgttggttattaatttttgaatcatccctacttaagttattaatttcaaattttcaattaaattagtaaaatactaaattgagagtttaattatgatggttataacttcgtatttattaattttgaatgttggaactattagcttttgaaaaactaaaactaagggaaaaataatttcttaaattccatgtttctttagcatgaactcccaacacaatctatggtcgtaataataatatgatcctatgatggtgcatatctacttcataactttgtatttattaattttgaatgttggaattaataattttggaaaactaaaactaaaaagagaaaaatatatatatttgacatggacttccaacacgttctactgtcatattaatattactatgatccatatgattaacatgggagctccttcaaagtgccacaacacgatagatccataaggtgtagataagatacatttagcttaaaattaaataagcatatatatacacacatccattgcaacttgcttgagtatcaatccgttcagcaaaatattaccacaacatgcacgaacaggggagacaaaaccacaccacacgcaatggttcctacggtccagaacagtttgcagcttcagcaagttactgtctgtgtaaacacttatccccagcttcactctgcttcagcaacagacagacaaatggctccggtccaacacacagttggagccatcagtttgttgcattgtgtatgcggttaataagttaatcctggttgagtgcaagcttatgtgtaactaaagttgaaaatcatggattcatctttatatgagcttgtaattatcagtggatggcaccagattctcaagtgtacttgtcactagacttttggagctttcatgctagcagcacgaaaccgtctcccattagcagcctttttcccaggaggattagcacagagccactgaccactttgagaacttttaagatagtagaagtaactttcggtcttaaacttttggagtatcatgcatacttcctatatatcatctttgttgtgtcagctttgatcacaattctttttctaaataatttggtgatgacaagtaaaatttgcaatgttagatttgccatgcaaaacacttcaaaacttaattaaatattgagctgtgcgttcattaattactaagtactaaccaaaatgtcagtaaaataaggttgtatgtttttccccggaccgtcgtgggactgtcccaagagaaattctcttggagcaagtttaatagtatagccaactaatagctgtcattctctattttgcggagaatctttgcagtgaaaactctattagggtttatctagatttgataatatcatcatttatttgtcaatttttttgttgaaagtgttgtcttagagttgtctcggttgaaagtggtgaaaatccgccactgattgtgattgatttggttggatcggtttatatcggcgaacacaaacgtcatcttgaacattgtgtttgatcatgagagcaaattgctgcatgttgcattagttttttttttatgtgtgcatccttggttgagtgatcatagacttactcctatgtatttcattaattaatgaaatgtcctatccttgattttttttcttcttcttgcaattataggatgcatggatcagtttctgaagagtgcatacttgtcaatggacttctccatcatgcatgcggcccaaaaccaacttgcattagcagacttttatctctgaccgatatgattagctgagtatcatcagacgaaggagcaaaacgttgtacttttcctcgatgctctctttctacttgaacctgcagtttgttgtacttgtctgtactgattcactgaaggacagtgaagttcagaagcatcagcaagctagtagcaagcaggcaaaaattgactcgagacgatatgatgctgaggtggcggctaactaaagctgaaaattctactacatatgaccgtacgtgttggcaacagtgacttgcgaaatcaaggctaaaattgtaagtttggttgaaattggaacgatgtgatgaaaaaattgaaagtttatgtgtgtaggaaagttttgatgtgatagaaaagttgaaagtttgaaaaaaaagtttaaaactaaactcggcccaagttgaactccaatccatcagttaatcttctacgggagcagatgaactgctcctgccaaaacacaagaaattgacagcgctgacgatgtaatcgtctgatgcatgatgtatactagctaaaatgatgataagaaatcatcgcaactggtaaatagaaaacgatgatgatgatgataaaaacagagcaatcacaattcacaaacagtagctcttaaacagaggaggttggtcagctcaatttggggtaaaaaacaaacacatggtcaaatattgcttgattgattgcatggctgcgatggtttttcaataaacacacaataaaatttattctgatttttgtttcaataaagttatagtcacttattacataattcgctcaacagagagcatatacaatctagaactcacgatgcaatgactaatgctttccagcactaaaggagacacgttattcaagtctgtttgtgtctattctaatcatggaaaactcaaaacactaactgtaattgtttcaaaaaacactcattataaaaatctacaactaaagcaaaatcatgtcgaccaatcgttcatgttgtacataaaaatatgtgcacaagatttagccaactaaaaatatctcttaaaagaaatttccatccactacgtctattactcacatgatgcacgcagaacaacacaccacaaaaagcatcgatcaccattctcctccttaattactttttaattaggagcagaatgagaaattagattaaatcatgacgactcatggggggtcatggctgccaaaaataaaactaaaaacaaaacagccgctagtagctaagctaagcaagcaaaagaacacaacacgggcggtcaaggtttatactgaagacgattacgcgcacgcgagattgtgggggggggggggggggggtggcttaatcagctcgctcgcgccatccgcgatctgacgattaattctctcttaatctgcgaattaaaagttgccttcaggtcgcagcttaacaaccattgaactgaaccactcgtcttcgctccactgtatactgaactacttgtttttgcagcgatgatgcatgatgagctttcaagtttcaacaccaatgtcgccatcgatcgacgatcgactggccacgacgcgacctaaatgcgatgcaatttgatgaatgcattccatgtcgtgtgagttcgacctcgacttggcggccggcaaattaagcatcctagtcaaaaaaataaaaaaagtaccggccgtacctagtcaagattaaattaaatgatgatggcagaaagaggtaagttaatgatcagtacggaaaatgaaatcttcggcaacatagtcgttgcgttttgggctgtagtagattggtgaagactattctgcatgcagagacttggtactgtttggttcaacgggaaaatttactatttgttaccatgcgctcaagtgttactttctcggattttcattttcatttgtcaccccatcatcaacaaagctttctgtggagattatggataccccatatctacacggcggttatattccagctgggtacatggtaccgaataaagatagaatatcttcatgaggacttgggttagattctaaacttgtatgtcaagaaaatacccggaatcctagtcggttacgattgtattttatctgtaattccatgttcctttgggatatggattgtattttataaagcggatcccttcccctatataaggaggggtccggatgcctctcggggcgcgatttttctcagatcatacaatcaataatacattcggcggaatcatccccggacaggagtagggtattacttcttgaataagaaggcctgaacctgtatttctttgtctccaaacctatccactttccaagcttgatagccacccccttttagtattgctgaaaccttgtttcgacagttggcgcgccaggtagggacagcgtcaagtttttgccgactaagtgcgatgggttctgtctccggcatcgacgacttcgcctttcctcccgggcaggcgttccggttcggcagcctcaacttcatcaccaatgacttcggcaagatctctctccttgactcggattcgaaccagtcggggagagaccaggtccccgcgccgttcggtattccgaactcggccgaggcctactccaagaccatctctcccgagttggtttcaaaccactcggacgagatccaatctactcctcagcgaccagatcaagatgacgggtcctatccctcaatcctgatgagacttcctgatgatttggccgctgtcttcacagccaaagcatctcccactcgaagatctagacaagccccggcttcggccccgatccaatctagatccagggaggttggcgttatactccaacctcttgggacagtctcgacagaagagttggatggctacctcagctcccctggtgtcagttctcgactaatcgaggtcctcgactatgacgacttcggctaccactatgactacggcgacttcgacaactttgacgacagctatgaggataattacacgcctatctttttcggcgtattcatggctgacaacgaaatggaggaacaacgccgagcccgagaagcggaggaagagcgcacacgacaagaaactgaacgtcgccgattggaggaagaacgacagcgacaagagcgagaacgactacagcgtgagcaacaagatcgcgagcgagttgcaaaggaggctgaagatcgacggcagcgcgccttggaatctgggcgacgagcgagagagctcatcgggcaacaagacgtcaatggaacagcggtttttcgcaccccccagcagaactcggttgcagcaatcactctcctcgacaccctcctcaaggaagacgcactcaatcaagctgatcatgttgtcaacatcttgaaccagacgaagaccatgattgctgcctcggttccagccaactccgcaagcacccgcaccctgactggtagccgagtccctcaccttcgatctcaggactatcaccagccaagcctcagcatagccggcgccggatctagtcgcaggagcaggggacatgatgaacgatctgagtcctggctcacagtctatggtctcgtagtccgcgcagcaggaggagacagcaaagccatggcgaattatctacctgtggccctagcagattctgcccggtcatggcttcacgggctaccccgcggcacgatcggatcataggcagagctacgcgaccacttcatcgccaacttccaaggcacttttgaacggcctggtacacagttcgatctctacaacatcgtttagaagtctggagaatcccttcgagattacatccgacgcttcttcgagcaacgcaacaagatctccgacatcaccgacgacgttatcattgccgcctttattaaaggcattcgccacgaggacctagtcggcaagttcggacgcaaacctcccaagacggtcaaacagatgtttgaaaaagccaatgagtatgccaaagccgaagatgctattacggcatccaagcagtcgggcaccacttggaagccaaagaaggatacaccgaccgtaggagggagtggaagtaacaaccacaaggatcgcaagcgtaagcccgaagaacttgtggcaacaacctctccattttccctacaacgttcccgcgtcaacaccttcgacaagataatgaactcccaatgtccgcatcatcccaactccaaccacgtggccaaagattgcttcgtctacaaacagtttgcggagcaatacgtcaagaatgcacgtaagccctcagacggagatcaagtcacatcaaagaagaaagatgatgaaaacgatgccccgactggttttcaagatcatcgcaaagaactcaatcacatcttcggcggacccctggcttatgaatctaagagaaagcagaagctaacagaacgggagatcaatgcggttcagcctaacacgccccaataccttcggtggtcagagatagcaattaagttcgaccgctcggatcatcccgaccgagtggtccacccggggcggttccccctggtactagacccaatggttcgcaatgtcaagctccgaagaactctcatcgatggtggcagtgcactcaacatccttttcgctaagaccctggacgatatgcagattccttgcacggaattaaagccgagtaatgcacccttccacggtgttatcccaggattatcagctacaccactcagccagatcactcttccggttactttcggcactcgggagaattttcgcacaaaaaacgtttgtttcgaagttgctgatttcgagacagcgtaccatgctatactcggatgaccggctctaaccaaattcatggccgtcccacactacacctatatgatgatgaagatgcttggtcctcgaggagtcatatcactatggagcgacatcaagcaagccgtcacatgtaacaaagaaagttgcgagatggcccaaacccgcgagatcactctcgctcgcgaagagatccgactggctgcgaccacggcaagcgaaggagaagtgcctgcgaccaagctgtcaaagaccgaagaaggcgacgacaaaactaagaagattccactagatccctccgatcctaccaaaactgctgtaataggcgctgagttagattgtaaataggaaagcgcgctcatcacctttcttcagaataataaagatatttttgcgtggaaaccatccgatatgcctggtattcccagagaggtgattgagcactctttacatgtcaaggaagacgccaaacccatcaaacaacgactccgccgttttgcacaagataggaaggatgcgatcaaagaggaattaaccaagctgttagtagcaggcttcatcaaagaagtcctccatcccgactggctggctaacctagtactagttcggaagaagaccgggcaatggcgcatgtgtgtcgattacaccgacctcaacaagtcttgccctaaagatcatttcgggttacctcgcattgaccaggtggttgactcaacggctggctgtgagctactcagtttcttggactgctattcgagatatcatcagatccgactaaaaaaatccgactgcttgaagacctcgtttattacaccctttggggcctactgctacatcaccatgccctttggattgaagaacgcaggagcaacctatcaacgcatgattcaaagatgtttttcaactcagatcggccgcaatgttgaagcttatgttgatgatgtagtcgtcaagaccaagcagaaggatgacctgattgcggatttagaagaaacttttgaaagcattcgtgctttcaggatgaaactaaaccctgaaaagtgcatcttcggagtaccgtcagggaagctgctcggatttatggtatctcaaagaggcatacaggccaacccggagaaaatcaacgccatcctcaacatgaaaccgccgagttcccagaaagatgtccaaaagctgactggttgcatggcggcgctcagccggttcgtttcgcgactcggcgaacgggggatgccctttttcaagttgctgaagaaaactgacaatttccagtggggacccgaagcacaaaaagcctttcaagacttcaagaaacttctcactaccccaccagttttggcctcgccacgtccgcaagagccgctattattatatgtgtcggggacctctcaggttgtgagcacggtcctggttgtcgagcgtgaagaggaaggccatattcaaaaagttcaacgaccaatttatttcgttagcgaggttttggccgactccaagacaagatatcctcaggttcatgtcacaccctaaaaattcaaaatatataaattgttgtttaattggaatttttagaatttattttaaaagcctagaagagaagatctaattttaattaataaattccaatataaaatggggccagataaaatttcattaaatactttgcttaattctataattcctagatttttctgggatttatttgagctaaggaagtatttttaataaatggaattgcatttcataaataatttaaattgaaaaaggttttaaaaagtcttcttttggctttgggccgaaagtcggcccaaaacccttctctctctcctcggctcagtccggcccagtccgccgccgcgcgcgcgcgtccgcccgctgacaggtggggcccacctgtcagggtcgtcgtcaacctccggccgccgccgcccgaaaccctagtttcgcgccgccaccgtttccttccaaaatccggccgctcctttccgtttccggtgaaattgattgaggggaaacaatctttgggatctcctctaccttttcccctttggaagggtcggctaattcgttttggaagttcgtggaatcaagttcgattcggatcggtctctttccttcaaaccccgatctttccttcccgtcgccggccgccgtgggccttcgccgtcgcctcctagcccctttaaaaggttccccgagctcttctctacccgtcgccaccttcgccttcgcctctcgtcgtccgtagtgccctagcgccgtgtagcttcgagccgccgtcgtcgccgccgctccagccgtgcgccgccgtcgtttcagccgtcgccgtcgctcgggaaggtcgccgtcgtgatcgtcaagtcgccgccgttctcgtccgccgcttcgccgccgccgaagaccgccggagcaccgccgtcaccgtcgacccgatctccgccgccgtttcaacctcgtcgccgtcgccgtccgttgctcttccgccgcctttttggtcgccggtggtgacgtcatcgccgacgtcatcgtcgcccttccccgtgagccggtcgtggaccgttcgatctcggccgtccgttttggatcaagtcgatctcggccgtccgttcgtgtgaaccgccgccgtgcgcccggtccaccgaaaccctagcccgctgacgcaataaatctccttttccttttcaaaaataattcattattgcgtcataattcaattaaaatcaatataagtgttttaatccgatttaatcttcaaaaattcataactaattcatcttagctccgatttagttggttcaagtctctaaatttttctaaaattgagatctacatgttaaaaatatccacatgtactgttcatgcttgtttatgtgctgttttggtgattttgctgttttctgtttagattccgtcgtttccggagagtccgttttcgcaggagaagagtttgaagagttccaaggccagcaaggcaagtcacacagatcccaaacaaccctttgagcatgttgatcccgtttaaagctattgtttctattcaactattgcatttattttcgaatgtcattgggtggaattaacctattctttgttatagcccttttgttcttggttactttattccttgataccttgggttattataacttgactagttgagctttatatattggttcagctagatattagatgtgattgcttatccatacttagaaacattagcacactattgggataacttatgactcactattattttaatgatggcttaatgattgttcacgatggtcaatcgtgactggttaattaattacttgccaactaaaacctgataatggtgggttgtgagcacatggttttgatggtcgtgctcatgacaattaaggaccggttcacgagtttcggttgtgaaacattaaccgtgccaaccacaagccagcgtgggcaacggctttatcttttgtatagcatggttcattgcggagcaccagactgagaagtggccgagataagcccacgggggtcgctggggagtccatgccttgtttataaggggtgattatgatccaggaaaggtgcgctgtagtggattgtgttatgcaaggggtattgtcacaactcctttccgaggtaccgtggtggtattgaggcacatggtgacatgatgtggggttgtgtcttgtgggtacagtggtacacctctgatcagagtaaaactattcgaatagccgtgcccgcggttatgggcgggtctaacaatgtctttcgtgattagtctcacacttctcaccatagtaaatgatgctataattggtaataatttgattagctcctggtttggaatggtatattcctggtttggagatagaactgtgcagccgggatggttgttcagaatggttgggcctatgcaacagggtatgttgtatagcgttgggttaatattgtttaatacttaactgttttattaaattctcaaatgtttgctgaatgctgcttttgcaaaaagatgaaaccctactatgccatcctttgttatcctgtgcacttgcatatttgctgcgtggcttgctgagtatgtcatatactcaccttgcaatcattcatcagaggaagagttctacaatgatgctgatggtgtggaggattaggtgtagccttggtcaagctgcttgtggagtggagccgtctgcgccgtttattttattttccactgcttagatctttattgattgagaggaactatctacctctgtaatgacattttattcgcctattaattagagtaataattgtactctattatcaatttgttattgtgtgcctcggctgattcctggacgagggttcacacacatgtaagcgtttggaattttggatagaaattccgggcgtgacagttcaaaagttattatatggtgtcttaattaccgtcaggaaattatctcactattttcaaagtcactcggtcacggtggtcacgtcgtttccactcggggatatacttcataaccgcgaagcaaacggacggattgcgaagtgggccttagaattgatgcctttggacatatctttcaagccacgaacttcgatcaagtcacaagctttagctgatttcctcgccgagtggaccgagtgccaagaagatatgccagaggagaagatggaatattggactatgcattttgatgggtcaaagaggcttacgggtgctggagctggggttgtcctaatttccccgactggagaaagattgagctacgtattgtggatacatttttctacgtcccataacgtggcggaatacgaggcgctgctccatggattaaggattgccatctctttaggcattcgccgactaatcgtccgaggagactcttagttggttgttaatcaagtcatgaaagaatggtcctgtcaagatgataatatgaccgcttatcgacaagaggtacgcaagttggaagataaattcgatggacttgagctcacccatgtccttcgacacaataatgaggcagcagacagattggccaattttggttcaaaacgggaagcagtcccttctgatgtgttcgttgagcatctttatgaaccaaccgtgcccagaaaagaaaaaattgaagccatgaatactcaaggtgtaagcatgattgaagcagactggagagaacctctcataagatttttaaccaaacaagaactccctcaagacaaaaatgaagccgagcatatttccaggcgcagcagactctgtcattcacgagaccgagttgtacaagaaaagtccatcaggaatcctgcaacgctgcgtatctttggaagagggaagacaattgctaaaagacatccattcaggcatctgtggtaaccacactgctgcacgaaccattgttggcaaggcttatcggcagggttttttctggcccacagctgtttccgacgccgacaaaattgtgcgaacatgtgagggttgtcaattctttgcccgacaaactcacttgccagctcaggagttgcaaaccatcccgttgtcttggccattcgcggttttggggcttgatatggtcggtccattcaaaaaggcagtcaggggttatactcatctctttgtagctgtggaaaagttttccaagtggattgaagccaaaccggtcgtcacaatcaccgcagacaaagctagagatttcttccccaatattgtacatctgtttagagtaccgaatcgtatcattactgataatggcactcaatttacgggcggaatatttaaagatttttgtgaagactttggcattaaaatttgttacgcctctgtggcacatcccatgagtaacggacaagtcgagcgcgccaatggcatggtacttcaagggatcaaagcacgagttttcgaccgactgcgtccctatgctggcaagtgggtagaacagctgccgtctgtactttggtctttacgcaccacccctagtcgggctactggccagtcgctgttcttcttggtttatggcggagaagctatgctaccaagtgaggcagagtttgaatccctccgatttcgtaacttccgggaggagcgatatgaagaagatcgagtggatgatatcaaccgactggaagaagcccgtgaagtagccctaatccagtcggctcggtatttacaagggttacgccgttatcataatcggaatgttcgatcgcgagcctttttagtcggcgacctggttctgaggagaattcaaactacacaggatcggtataagttatctcccttgtgggaaggaccgttcataatcgctgaagttactcggccaggttcttaccgactcaagcgtgaagatggtactcttgtcaacaattcttggaatattgaacaccttcgtcgattttatgcttaggcatttcgtttgtatctttcctctttgactgctaacttcaagtttttccttgaagttttcagtcagggggctactataataataatggaacatgatttttatcaattcaatttgcttacttgatttatcattgccctgcttgattttttgacttagacaataaggactgaaagttttttaataacttttgcgagttttaggctcaataaggtttgacaaaagcttttaagaaatcagaggctaagtttgaaatatctagcatagcataaattcatcagtattgtacaaattgatcttccatcatcatcagaatcactgttactaatcagtgtcagttttttcatcgtcggaattatcagacccagtcgaccgaaggtcgacatcttggaatctctcaactacgtcagcagcaatcttgtcagcggctttttgtgcatcattgatgaggttgagggctgtttcttcgcttgtcccgtctgcaaacccatcaacgacgtcaatatcgattttggggtataaagatttggtcatagctaatgccatacttgctcccatacttccagcctccctgatattcttgaagtaagtatccggagcgactctcagtttgtcgaagatcttggaagtgtcaagtgtactcggaccggcgttattgaagaacatggcttggatgagcggggtagcggcattaacgactttatccctggccccttcaagcctattgatcttgttgactaagacatcaaactgtgcctgggacttgattttgcgatctgcacgaatagattcgtatcaaaagtggctataagaacatggggaatcagttatcattaccttcaacatcttttaaggccaagtccctctgctttgctagttcggccttgtccttctccagagcctcgacctgcttctctaggtcggaaatcctggcggcttgcactgtaatgcttttcggttaatcgatatgacaaggaaggcttcacgaatacgtcagacatatatggcatttacctttggatgaaccacttaattcatagttagattcttgaagctcggagattctattcctcagatcatgctcagttttcctcgcgagctctctaacctcatatagctggcttctggtagcttcaagagttccaagatgagggactaatttctcaagagttgcggtcttcgcctcattcctgagatggattctctgcaatacgaatttactggcgtttcagcaagacatgaaaggggacaattaaagccatgcatgaatggacttacatttacaatgcgagtagcctcgctgagtgcctttttcagcaagcatacttcctcatcttctttttgtttgtttattacgattccttgaggttgcctatcatcgtcccaccacttgactaggatgggagggcacgagtcttcagctgcttgtatacggggaatttcttcttcatcaccagtcattggtcctaatgtatccattgacaaaggttagacaattgatcagagtcatttggatcaacacggtttcaggcaaggtgtttacctgtgaggatttctggacggggacgagttgactcttgcgccttaacgggggaccctggcatcgggtcgttgctggcgtcttgtctacgagggctgtctgcccgagctccaacttctggaatctcttggcttggcctagtgtccgactggttttcagtcgggggctcctgattaattccggctccagcttcggccgactcgtttcgagtcgggggttgatcaccagatcctacattatcggttgctggctggttgtcactcggctgatcctcggcagttggcttggtttcttttaagttcatttccctgctggtcaggttagagtcttttccagaaggatctatatcagatggtttcctgcaagtttgattatcagtattatttccgcactaggtgcgcatcaatgcaagggagatcgttatatgatttgtacctagaagacttcctgatctttggcacagggcgactggatgttttcttccttggagtagcctgcttcggcagtttcttggttgcctctcggtctccaggctttctagcagtatcgctttcgtcgtcacttgacaccaacttccttttgcgtgaatatggctggccggctggattggaggtatttggccagtcttcagaacggatcttgggacccccgctcccttgactggtttggtggtggggtgatcggcgttgaacgactgggggatccgacttcatcaaagcaaattcctgggcataatatccttcattgttaattgattcaacaaaaagacaagactatattttgtgaaaggttggaatgtttgattacataccagtggaggaggattgaaaacattgaatggcacgactggcagcaagtgcgaatagctgacgacgatagcattcgagaagatcttgtacatcctctccttcataaccttaaagttaagagagtctggatcttcacgatttggatcatgtttgccgtcaaactcaaaagctgtgcgggacctctctttgattagctagccggctttttatgaagtgccgagtgatctgttctccttgcaaaccttgctctttcagctttatcatgcgctccatcagttccactacttgggccgcctcatctcctgtaggcaatgaattccatgtatcttggtagaccggagggagacaagagtactcgggaagggctgattcaggattttgaacatagaaccagttggcgtgccagcctttgtttaaggtcttgaagggcatggagaaatatttttggcttagtgttcccctgagttggaagccagcgcccccaacaacgcacggtctgctcttgtttggctggggtttaaggaagaagatgcggcggaacaaggcgaaatgaggcctaatgcctagaaaagcttcgcaggcgtgaataaaattggcgatgtgcactaaggagtttggattcagatgatgcaagctgattccatagaagttcagaattccccggaaaaatcttgaagtgggaagagaaaacccgccatagaaaaagtgagaaaataccacgacctcgtgtgtatcgggggtcgggaatgcctcaccaaatgccagccgccacccgatgatctccttcgttggaagaacgccgtgcgccaccatctcttttagattttcctctgtcacatcggagggcgcccactggctctcgaaactttccctctcctccgccatggatgtgagctgaatggtttgatttgaaccgaggtatagctcgaggggaatggggaatcggagcggtggatgcgcggagaagtttcgtgggattttgggaatggattgaagcggattgatgaactctagcttcgtcggcgcggttatgtactgtagcaaggagtggggaaatggtgaaagtcttggcggggaagacgaagtgacgcttagacttcggagtttttagggtatcgggagtactaatgggcttgggcctgtatagtactttggcccaatattacaatcagcgtggcccgttgtgatccctagggatttaggcactttttgctttggcaatttgtgctcacaatgatgtggcccgatgctgttaaaatcctttttaacgcggttcaataattctttggaattattatgatgaaataaaaaggtgcccggcagaaaggtgttatgccagttttgtaagctttattaggctgcaaaagctgtttgggtagatttgagatgactagtttgctaatagtcattctcttagcatgttatatgcttattttggttgtggtgagggtcatagcctaggctattagactcgttgattaccatgactttttatcatatttggtggagtgtctttggagtttttactcggattcctgtcaaataagtctgtttgagggccttttgagcgtttatcacacgggtcttcttatattttttctcgatatattaaagctaagaagcagtcggctgggagttttactgtttaccacgagtgctttgttgtataatgtttggttgtaaaaccactcggttcttgactttatgtttagttttttaactaaccacatagtcgggggctacacctaattaggtgcatctactcgatgcaccatgttttattttcgcccttcacagtctttggttccagtactcggcaggctgaagcaggaagagttgaagtactcggattattgttttttgttttgagatggctatttcgtcgactgcaaaggtctcgggggctactgtggagattatggataccccatatctacatggcggttatattccagctgggtacatggtaccgaataaagatagaatatcttcatgaggacttgggttagattctaaacttgtatgtcaagaaaatacccgggatcctagtcggttacgattgtattttatctgtaattccatgttcctttgggatatggactgtattttgtaaagcggaccccttcccctatataaggaggggtccggatgcctctcggggcgtgatttttcccagatcatacaatcaataatacattcggcggaatcatccccggacaggagtagggtattacttcttgaataagaaggcctgaacctgtatnnnnttctttgtctccnnnccctccncctcttccngcttnntngctgntggnctnagatgcatctgttcaatcaaaanacacgggggggnngggggnggttatgnagatacanttgcactagttcgacnctttcagataccggccgaaagagncnggagngaaaatgacgcgtcttacaggttagtctaactccagtcg

SEQ ID NO: 28935 - DNA, 6135 bp, Oryza sativa
  unsure (1)..(6135): unsure at all n locations
cgcgcgactgactgcacatcgccatgtgcncatcacaaattccagcacaaagagagggagagacgacatgcgagatggaggtcaaacgcggacgcgtccttttcggcggcgaccaccgctggccacgccatactagagctacgcgtagaggcgggaagagacgagggcgagggctatgcagaggcaagggagagctctccacctcgcactaccatcctgtgacgctagtggccacctcccttcacgcagcggagctgtaatacccccgagttttaaattaatatatctcgcggaatattagagcaaacgcgcaaaagttcaacttttaaaccattgttcgtatagacgatcgggaaccgtggatgcgtagagctcgccgagtagtgcaaaatagactataaatttatagtaatcggagtccgaacgaagtcccgaggattgaatagatgtgagccgttagatcttatttagtctctttatataaccaaccaaaaaaaacaaacgaaaaaaaaaagaaacaggagcgattctcctgtagccctagccgccgcacctcctgcgctctgccgccgccgctgctgttcctctcttcgccggcgccgccgctggtgcagccgtcgccggtcgccacagccttcgtcgtccgcagccggtcgttggtgagctactgttgtttctgttaatttccctgctgctgccgaaccctgctgttgccgatctgatctcttccttgctggtggtgcacggcttgctgttgctgccgatattcgtttctgctgctgctggcctgcaatgaacaggaaggagggagagaaggcagagaagaacaggaaggaaggaaagaaggggaaatttgatagaagaagggaaatttggggaatttggtgaatatttccaaattcttcatttttcttatacattagtactgctaggtaatccgttttagtctatagttgtttctaatttatatttaagacgatctgtttccggttttttcgaatttattttatatcgaacgctaggctgaaaccgtattttcaaatctggtattaaaccatcaggaatcaggttagttgtcctaaataaagtttgtagtcattgtcaatatctttccaacggtgctagtttcactcgattccgataaacggtttaggagaaacagcaaaaacagtactgctgaccgggtccggaaatcaggacagcagttcgtttttccttaatctggaattttcagagtcataatctgattttgtgctcaacatgaaagttgtagacaattttgtctagatgtccaaagttgtattatttgctagtttccattagacggtttgtgagttactcataaaacagtaatggaacagctataggttatttaatacaaatcgataaaaggtttatatgttctaggtttcgattttagtaaatatcccttgtaaccatcgttagttgaatatagtggtttatgcgtagttttgctccacaggtgtggagggttccaacgttggaggagttgagtcggagtatcgaatgagttaaggcaagtacaagacggacttatgtgatggacaaaactgagttgttttgtttggctttacttgcataattattattcaattgcttgttattactgattgtatggctatgacgttatgctacttattcgtgttttgacccatattcaaattcatgacgttattcatgtttcattattccggatgttctgtttacattatttaagaaccatgcgtagccatgggagtgcaatttggatctttattcatgatccttgagaagcgctgatcacgcttgctcggcttaccggtaatgctaagaggatattcacacctgcccgggagggaactactatcttttgacttctttggtttaaaaataaagtaaatccaacccttcatgttggtttcttaatgcataaaacatgcgtatgttttactagttcaagattgtatttgctgagtattctttactcactcttgtgtttaatttggtttttaggtacctaatgacatcgatcggcatggggcgggagtagcacccttggactacacattattattgcacacaattgaaattagttttagactatgatttttgctcagcataagttttgcatagaacttgtaaaggtcatttaaggttctgatccttatttttcacgtgggatttgtggagctaggatggtttggattgtgtggtttatatcggtattgacctttcttataactgtctgtcgtgatgtccgtatttttaggggagactctaccaaaatttctaataattttaggacttagtttttgagtgtattttggtgtggcattctatgtacgtggttacctggggtattacagttggtatcagagcgggcggtaggtccatgggaagtgactgggtaatgagatatataaatcaacataaaattttgaactagagttcctaaccaattaaaaaaaatactttctcttagggtaggaaataataagagtagaacttgggttatatataaacatctaaaagaacttgacacactggtgcacaataggaatgggagcatgggtcattcctagcatttatgtttctgctgcatatatatgtgtatgattgtgtttccttgcatgccattgtctaacctattgttaaactaataacgtgtaaatgcttgtgtttgatatagctatgccgcctagagtgagtgtttggttggctaacagaggccgcgggagaggcggaggtagaggtcgtggtaggggccactataatgaagaagttgaaaatactcaggataatgaagaggttgggaacaactcggttgctgaatcccctattcctaatcgtggaggtcgtggtaggggccgtgctggaggccgtggaagaggttgtggtagaggtcgccataatgaggcagcatcctcgaaccagaaggaggatgagcacatggaagaggagggtggtagccattcagctgctgtctctgatgatgctcctcgagctgctcgggggatgacactcactagatggacatccatgcgcttagacacatttgatgggtctggtactcccgttaatgctgcagactggttacgcaagatggagaagtatatgaggggatctagaatgactcctgaggagaaggttactttcatgccttttcagttgactggtcaggcggacatttggtgggatggagttgttgaagcgtggaaccctgatcgtggtgctattacttgggaagtttttcttcagcagttcagagctaagtattatccagaatcatttagggacaagatgagtgatgagttaaacaatatccaacagggaagcaagactgttgatgagtatgaacgggagttcagcagtattgtacgctttgtgcctagcgtggcaaatgatgagcgtgagaaggctaggaagttctttcgagggctcaatgctcggtatagagaagtgatgggaagaaacccgcctactatatacctcaatgcagttgaggaggctcaagggatggaggttgagctccaaattactactgcgcagaagaatcgttttggcaatgtcactggtaatgagcagaagagagctcatcaggaagggggtgagaactcgcagcgaccacctttcaagaagtacaaacaaaatcaggtcactcaaccatcatctaaacctagccagtggggttctcagcctaatgcagcttcacgtccaacggagtcttagttgattcgccctgtgccaaggcaagggctaatttgctttaagtgtggaaagaatcaccattcagcagagtgtgggtttactggggcatgtcgtgggtgtggcaaagctggacacatggagttggtatgtaagcgtaacccaaattctatcatcaagtggcaaaagccgagctcctattcagcaacctcttcaacagctagctatcctcgaggtttaggttcatccactagtactccccgtggtgccgtttagatgatgacaacttatccacttccttaccagcagttcacacataattacccaccaccaccattaccaggacagtattggcccatgcctcaatcttttgctccacgtgctccactccagttgcctgcaccgcctatggcgcatccttctgcttcagctccacctcaccagcaggtctcagcctctactaccccagctatagctggagtctacaacatgcctgcagcttcatcccttggtcgcccggatgtcgttacaggtacacttttagttgattcgcatgatgccctagttctgtttgattctggtgctacattttcctttgtttcaatcgagtttgcgaaaagagctaatctatttagtcaagaggtctctcgatctgtccaagtcagctctccagggggtataatctctagttcagtagtatgtctaggttgtgcaatctctattgatggggaggaatttgtggcaaatctaattgtgattcccttaccgctctttgatgtgatcttgggcatggattggttgaaccgatatcgtgctgtaatctcttgtttctggaagactattaccttggaagctccatcaggcgaggagatggttttccaagggagcgcgcctccgcattctcttttcgtgatgtcaaggttatttcctgggcagcgtgctgtaaagacggggttattatgggccttagccgagaagtcatccaagcctttagtgattgaagatgttcctgtagtgcgagattatcctgatgtttttcccgcagaattgccagggatgccacctgagcgtgatgtagagttccgtattgatcttgttcctggtacacaacctatctccagagccccgtaccggttagctcgtcctttccaagaagagttgaagaaacaattagatgatctattatctaagaagttaatccgacggagtgtgtcgccatggggcgcacctgttatttttactgagaagaaggatggaagttggcgtatgtgtgtggactatcgggccttaaatgctgcgacaatcaagaacaagtacccattgcctcgtattgaagatttgtttgatcagttaaagggagcgaaggtgttctctaaaattgacttgaaatctggttataaccaaattcgagtgcgagaagaggatattgagaagactgcattttccacgaggtatgggcattatgagtatagagtaatgtcctttgggctgaccaatgctccggcctattttatggaggcgatgaatagcatgttgcatagttttctagataatttcgtggtggtgtttattgatgatattctgatttactccaaagatgtagaggagcatgagcgtcatctgaggatggtactagggaccctacgagaaaacaagttctatgctaaactgaagaagtgtgagttctggcttcctgaagtggctttcctagggcatgtaattaatcagcaaggtatctcggttgatccaagcaaagttttaagtgttgtcggatgggaaaggccgactaatgttaaggatgtgaggagttttttgggtatggcggggtactaccgacgctttgtgaaggatttctcgattatcgctaaacctatgacgatgctcacacataaggatgtgaagtttcagtggacggaccaatgcgagtgtagtttccaacaattgaagcagaggctggtaactgctccggtgcttactttgccccaacctggtaaacgtttcactgtctattccgatgcttcacgagtaggccttggttgtgttcttatgcaagagggcaatgttatagcttatgcatctaggcagttaaagaagcatgagcagaattaccccactcatgatcttgagcttacagcagtggtctttgctctcaaaatttggaggcactacctgtatggagaatcttgtgatattttccctgatcataagagtctgaaatatatcttcactcagaaggatttgaacttaaggcagaggaggtggctagagttgattaaagactatgatcttaacattcaatacacaccgggtaaggcgaatgtggttgcagatgctctaagccgtaaggtcgtttctccaactgtgagttgtttgataactgattttgaacgnatgnatgntnngctaaaggcgagtgcngacgtgtccgct

SEQ ID NO: 28936 - DNA, 1675 bp, Oryza sativa
tactgattttggacgggaggaatatctcttatggtatgttgaagtggcaagtaccgagtcacgagtcattcttgagtccgtcatacccaacgagtgctagaggcccaacaacacgatcggctgctgcaacaagttaagaaacgtgtaaaggaaggaaaaactggagatttcactttggattcctcgggagctgtgcgattccatgggcgtttatgtgttccacaaaaagctaaagtcaaggaagagattttgcgagaagcacaccgaacaccatatactgtgcatcctggggagaacaagatgtatcatgatctgaagaagatctattggtggaagaggatgaaagtggatgtggccaagtatgtggcatcatgtggggtatgtcagcgagtaaaggctgaacataagagtcctgctggaaagttgcaatcattggaagttcctgtatggccttgggatgatattgctatggatttcgtggttgggttacctcgaactccacgaggaaaggacgccatctgggtggttgtagatcatctgagtaaggtggcacatttcattcctatccgcaccacttattctgcgagtgacttggcaccgatctattcacgcgaggtagtgaggttacatggtgtgcctcgctcgattgtttctgatagggatgctaagttttcttctaagttctgggaatctgtgcaagaggcatttgatactcaattgaaattcagtacggcttttcaccctcagactgatggtcaatctgagcggactattcaaactttagaggatatgttgagatcatgtatcctttcatggaaaggcagttgggaggatcatttgccgtttgtagaatttgcttacaacaatagtttccatgctagcattcaaatggcaccatatgagtcactttatggaagaaagtgtcgatccccattgtgttgggattccataggggagagagctattttaggacccgattgggtacaacagaccacataacggatagcagaaatacgacaacacatgcttgcagctcaaagtaggcagaagagctacgccgatgtcagaagacgagaattagagtttgaagtgggcgatcaagtacttctaaaggtatctccaaccaaaggtgttgtgagatttggaacgaaaggcaaactcagccttaggtatattggtccattctcgatagtggaaagagttggaatcctagcgtatcgccttgagttaccagagtccatgaaaggtgtacatgatgtattccatatttccatgttgagaaaatattgaacatcatattaccgtagagccgatgaccattgagcaagatttgacatttgagtctcatcctgtaagaatattggaggaatctgagagggtgctcaggcatagaactatcaagtatgtcaaggttctctggacgcaccagaccgagcgagaggccacatgggaacttgagtcacagatgcgggagaagtatcccgagttattcacgtctggtgagttatataagtcctacctatgagttcctttctatacttgtccgaggtataactggacgaattcgagggcgaattcgattgaaggagggaggaatgtaatatcccgtgttctagagtatgattaggcgaattcgagggcgaattccatcgaaggggggaagaatgtaataccc

SEQ ID NO: 28937 - DNA, 3820 bp, Oryza sativa
  unsure (1)..(3820): unsure at all n locations
attgataatcgatttacagnagtncatcatatttaagaaccatgcgtagccatgggagtgcaatttggatctttattcatgatccttgagaagcgctgatcacgcttgctcggcttaccggtaatgctaagaggatattcacacctgcccgggagggaactactatcttttgacttctttggtttaaaaataaagtaaatccaacccttcatgttggtttcttaatgcataaatcatgcgtatgttttactagttcaagattgtacttgctgagtattctttactcactcttgtgtttaatttggtttttaggtacctaatgacatcgatcggcatggggcgggagtagcacccttggactacacattattattgcatacaattaaaattagttttagactataatttttgctcagcataagttttgcatagaacttgtaaaggtcatttaaggttctgatccttatttttcacgtgggatttgtggagttaggatggtttggattgtgtggtttatatcagtattgacctttcttataactgcctgtcgtgatgtccgtatttttaggggagactctgccgaaatttctaataattttaggacttagttttttagtgtattttggtgtggcattctaggtacgtggttacttggggtgttacaggagcggaggtggatgggaacaagggagatgtatgggtgctagctagtctcgttgaccttgtctcagtggctttactgctgcaaagttggagactcgttttcagatccaacgccctgctccacctccatcatttgttgggaccctcagagaggatggaggtggggccgaatggctcgaggtcatataccctgtggcccgggttaactttctggtctgacatgaagatggcagtgccgaagctaggtgaggaggccaccggtgccacaaggaggatggcatgctccaaatgtagatgacacgacctaggtggtggtgatggcctcaagtttgttcgccatcaccaccgctcggccccttcaaggggagacgacgtcgagcgggcctatgccaagatcttgcgcccatttgtgcgaggttcgagcaaggttggggaaagaaagaggggaaaataagagtaggcgttgatatgtggaccttataatttttaaattttttttccttgtcacttacatgtgagcagttagtcctacatctactttttaatacctggatgctgcatcagtcaaatcaccctaaaaaaagcctcgaagagtttgttttgtactggattttaatatttgagaaggcgatatattcggttttgcggtggtgtacaatcatattcggccaatagtccagggagtcaaaatggaccttttagtaaatagtaaattcattaaccgggcctatgcaatgtaaagcggaataagttcatttgaggtcccttaacttgtcaacgaatctgattttcgtccctcaaccagaaaaccagatacaacgggtccttcaactatcaaaaccggtacagattagatccctcggcggttttgactgacgtggcgcctacgtggctaatttgactcagtcttcatctgacgtgacattgatgtagcgtttacgtgacaattctatccagaaaaataataaaactcgtgggatccacacgtcagtttcacacacaaattaataaaaaatggtatcatcctcacccctcctcttcctcctctctccccatctcccctctcttcagaaaagctggtccattcgcgggatgatgggctcccgcgctagcatcacgaaccgcaccatgttcccggagtcgtcctggatgccgtcggcgagcacctggagcccgtacagctcggcggcacgggatgatgcgatggcggcggtggacgagccgccggatattgttctacacctcccgcgccttcttcctcctcatcatcctccagatcccgctcttcatgtcgcccccttctccctcccaatcccctctgatttagctctgtttccgtgtcgatcgtgtggtcaatcttagcaaacgagcaaacaatggttgcctcaaaatagatcctgtatgcatatcactacttgtagctagtaggtttgattatagtgcatatgtgcgtgtgatgagttctcgacgagcaggacggcgcggtcggcgatccagagctccacggcctggaaggcctcctcgaactggtcgcaggggatggtgttgcaggtggtctggcagtgggcgcgggagaacggggtagcgcacggcgggcggacggccgtggatctggggatttgcgcggggcgcggcgctggcgaggtttcaatcctccagaggcgaggtgttcgtggctggaaagggcggcgttgcgcagccgttttgacgatggtttccctggcctaccggcgagcgcgcaagagagagatggccggcggccggtccactccatttcgtcgtcgccggccgcatctggtgcccatccccccagcgcaagagagagatgaagagaggggagatggggagagaggaggaagaagaggagtggtgagttggaccgacatatggggctcacgtgggcccatctttttttaattatttactctgtgagactgacatgtgggtcccatgggttttattatttttccggattaaattgccacgtaagcaccatgtcagatgaagaccgagtcaaattagccacgtaggcgccacgtcagccaaaaccgctctcaaaaccgccggaggacctaatctgcaccggttttgatagttgaggggcccgttgtgtctggtttttcgatcgagggacgaaaatcggattcgttgacaagttaagggacctcagatgaacttattccatgtaaagccgtaaagcccatgaggtccgtgaagagcagaactgggcctcctccattccatctcggcccaaatcgcgactcgactagctcccccctagctagggtttcactacataaacacgctcacgacgcctctcccctctctctctctctctctctcctgcctccgcttctctcccccgcgccgccgccgcctccaccgaaagcagcagccgccggcgagccagccagcagcctagccatgtcggaatcgaaggccgccgcggcggtgaccctccgcacccgcaagttcatgacgaaccgcctcctctcccgcaagcagttcgtgctcgaggtgctccacccgggccgcgccaacgtctccaaggtgcgtttcgtttagggtttcgcccgcgtgagggtgaggggagggggagagagcgaggctgatccgctgtattgtgcgcgttgtgcaggcggatctgaaggagaagctggcgaagctgtacgaggtgaaggactccaactgcatcttcgtgttcaagttccgcacccacttcggaggcggcaagtccaccggattcggcctcatctacgacaacctcgacgccgccaagaagtacgagcccaagtacaggctcatcagggtacgcacgcatcgctcagaactttgtgccatcactctgcattctgaatttgggattgagctagcggaatggtggttgttcgcctcagtgctcggttgtgtatcctatcctgatgcgcgaattgacgcgcgcacactgtaccagtaagtccttgttcggttaggcttggattcaatccgggctaatccaatccgagccgggaatgacaagtatagtaagaaatttatgatagatacaatgagagaccgggatttattccgggccgggaaccaatttacttatgatagagacaataagagatcgggaatgatganctnctgtnccantagatangccattcatggccac

SEQ ID NO: 28938 - DNA, 6983 bp, Oryza sativa
  unsure (1)..(6983): unsure at all n locations
agataatctggcctttgtttggggcgcccccgccccccaaatatttttggtttttttaaaagcatccttaacagctaacaatattgatcctccaaagcctatttaatggtcattaaaaagattaatcctttatatttctctaaactccaccagatcatccatattacatcctctaaatcttaaccctctaaaattttaagagtaaccttcacctaccatccatatatattaatttttcttttttcacctttcccttatcttattattcaccattcactcgaattntagaaaagnggngcagaagaagcgggaggaannnaagnanaacnnnncnanngcnnannnnnngannannnagnnnnnntcttactatacttggcattctcggctcggattgaatccaaacgtaaccgaacaaggcctaagctggtttgctagcatttaggattattttactttggattttgtgagaagcagttaggaagttgtctcgtgatgtttagattagttttctgatgtggttaataggtgcagctactgtccgttggaaacggttgctttgtttcgagaggtgttctgggcattccgtgtgaagttaggtttgggaatttggtgcgattagtcaaatcgtgtctcgcttagcacttgcacaggtagtttagccaaggttacatgccagttattactccctccgtattttaatgtatggcgccgtcgattttttttatcaacgtttgaccattcgtcttattcaaaaaatttatgtaattatcatttattttattgtgacttgatttatcatcaaatattctttaagcatgacataaatatttttataattgcacaaaaaatttgaataagacgaatagtcaaacgacgttagaaaagtcaacggtgtcatatattaaaatatggagggagtacattttagtgcaagtgaagtgatagctgagtgagaatcttagtgtcaaagtaatggaggatttgggaaataaactgcgttcatgctgaattagacctagtgggcatttatacatcacaacacatggtactgttgccctttcctttttctagccttagtgttgtgatctatatatgccctttagggctaattcagcatgaacatagtttattctccattcctcaaatcatccattacttttgacacttaaaagtatatcaatgtataactgagggtcggtttggtttgttccttgctaaaattttggaatgccaaattttggtgcggcttattttggttgcaaccgcactcttaagacaaccttaccagaattatgggaatgcccatgatcctatgttgcataccaaaattttggtggcaaaccaaataatacctatcccatctctaccctaccaaaatttggtagtgccattacctgacattagcaaattttggtatggtagagaaccaagccagccctaaatcagctacaacattccgtggatttcatttgggataattggtgatatcatccatgattagattggcactctggaatttgccccatactagaactactcccttcgtttcatattataagacgttttgacttttttctttaagttgtaacttaaagaaatttgacttagaaaaaagtcaaaacggcttataatttgaaacagagggagtaattgataattaggtctagaaggtggcaaatcctttgactacccaatgggtggcatagaaaatggacgcgactccctgaatgttgtgtagatggcccaagtagattcttagggcgagttctaaacagcaaggggaaacagctacttcctcgtcctctgtgagcattgcttcccaaactgctaaataatgtgtttcatgcaaaagttctctatatagaggtttcttcaaaaatcaaataaatcctttttctttctagtttttaacaattaatattcaactaatcatgtgccaatggcttgtcttgttttgtgtgccataaaaaacactaggctcagttcggaatgagtgttggcttgaatttttgatggcacgcaaaacgagccaagtcattatcacatgatcagctgaacaagctgtagaagagatacttctgattagcttatctagtgatatgtagtttgggtgcattgtatattagtatatactctattcctttaataaggtgtattataaagtcaaaagactaagtgtatactttggccactagttactcataaactaatttgttaatgagtacataactaaattatatgaaaatacattgccgtataattctattcgtatagtttctacatgttaaatatacttgtaatttgagtaatagtggttaatgtttataagcttcacttatataaacttgataatatattaatattccttataagaagaaacagaggaagtaggtgatttgtttaatcagggcttgttgtatttcccttgggatagtgtggcttattgttttggatgttaatgctatctcaaattcacactggtgatacaaactttttatctcaaaacaaaagaaaattagcactctagtatgatggaatgcaattttttatggtgattatctattgatttaagataacaatatactatggcaaaaacgcaaaatattttagtatggaaaaccagttttagtgacagtcattatcagcatatgcacttctcctgcttggtactgaagtgttgctttggctacttgcttgaactgtattgacattatggtacacaaaatacacattatacctttggttacttgtttcatattattgattgattcatgtgaaataggaactgcacatgcaccgatgtatgtggagtcattgacatgtttgaatcactaatgttttgttattctccacagaatggtcttgccactaaggtagagaagtcacgtaagcagatgaaggaacggaagaacagagcaaagaagatccgtggtgtgaagaaggtcagtaccaagtatcaacccagcattttgagcatttatgttaacaatattgcaatagtatttaggtagcttcaacttcagtcttcagtgcgtgacctaacttcgtgttatctgctaattttgtagacaaaggctggagatgctgggaagaagaagtgagagatgatactcatcttgcagtcttgatgtgttcattatcaaaaccttgctttgtttagagctgtctccttgtggcaatattactgaatgcttaattataactagaaaaattttgccacttatgttcttgcaatgttgaggcatctgtagtgttcttggattttgaggaaatttgtcggactctagcatatatagtactttaatcacggcgcatgttctttgtgtcttctaattcagatttgggttatcctgtttcaacaatgcaatgcgtggcttgggtacgaggcactgcaattaagtcgtattttgcaaccaattaagttaccgtgattagtttacataattaaatcgacttccgttcggtaaaacaaacgaatatgaaatactccgtctctaatctcaaaatatgtgcagttttgtattattcacattcttatttgaaaatattttatgattattatttttattgctattagatgataaaacataaatagtactttatgtaaatatttttaaatttttcataaattttttaaataagatggacggttaaatattagacacggataactacggttggataactacggttgtacttattttggaacattttaggacggaggtagtaattgtttcgtgtcggcatcagataacagtacgttgtctctagttacacgagagcaagtgtgttgcttgaacattaggaacggtactgtcctaataatactgcaagttctcatccactgttgcaaatcgtcccactgggatgattttacagaaaccaccgtcgtatcattaacaggttaataagcagtgccagtttgtcgattaacctggtatgagatcaactccaggttgtttgtcagtgaaatcccaagggcaatttgcgactattggttccccatatacactagcagttcatcagttgacatgaaaaactcagaaaccagagcttccctaactgatcggaacacatagatgcatcttgcaggggataggaaaggaaacaactgatcaggatccacaagactagacgtaaataaactacgtcaaacaagaaaactgttccttctcgctgcaaaggaaaccatagacctgcttcaagtttcctctagatggtcttgcattaacagcatatttgcaaacaaaaaccagcctcttcctcatctccaacttcgtgacgtctcctttcagaaatgaattgccatgatcaaagaatccttggaacaaagagcaattaattaaagatacgtaaacttgatgtcgtgaaattattaaattgttggaacatacctaatcttctataaaaataatttgatatcgagagcattattatgttttgacatgatttaagatgagtagaaaactgataaaaatggcacaacaccacaaaattacctttttaattcaagagaagcaaaattgatacaaagataagtcatcttctaaaataaagaagttgtataaatatgcttaccatcgcaatcaaataatcgtgtaattatcgccaaggccacacagatgcttatatcctctcctgtaagggaaataaaacaacaatgaagggctcacttgtacaaagaactgtcaggcaaacttatggttttacttattacagcatgatgaagaaagcatgtgtaagctttttcagatagggaaatgtgctagctttaccattttgacagcatattagtagcttcttccctgctatcaaattcctgtttgcaaagctaactgcttttggaaggtttttcatcaacgaaaaccggtcgtcctttgatccctaatagcataaaagtacaaaatgatgacaatgtttacatactgggaaaactaaaatggtcagaaaaatttcacttaccaccataggtagttcaaggtaagaattctctgatgaagtcaaaggtaaatttgatgtgctgtcacagttcagtatacaatccacttcagctaaggaatctccaactgcatagatcatgcatacagaaaaaaaaaaactatcatcaacagtacgcctgcatcatatgaaactttgtatgtatcttgaaacaacaaatttgattaaaggaaggttctaactagttgatatctatgattctatccacatctacataatacaaaaacttgtagacaggctagcacacttttttgcagtatacagagatatgcataaaagaatgataaacagacccgctaaagaacaaaaaaaaaaaatcaacagatcaacgcagtacatgacaagatattgacaagaaagcacaaacaataataaaacaaatatgcaactgtataaataatcatgttttgtaccttggagagttgatgctactgcaaggtttgatgtcccaatccagaagagtatatggccatcactggaattttgtttgtccatagcagtaacggtaggaggatccgagtccattggttgcacaatacttgtatgatcaccattactgaaaggaccatcatggcttgaacacttcaaaggcttagctgtaatttggggagaatattcgcctctctgtgcacgatagaccctatctttttcaacaatatctgcaactaactgattacaaaggtctggtccaccatcaagcagatcatatgagtgcttccagaataatgtaggagtgagaccacgtgcccaactctcttcatcatctccagctccaggaatatagtgccagctgaactctgaagtcatcctttgtgtagctactgcaccagatgcagatgctgaaactaatatgataggggtgaaatcccatgattcaagctctggaacttcatttaaccatatccgtgtcctttgtgatatccacaatggacgtagtggtttcttcaaacttaacgcaagagaacgaatgtctgcaccacatgattcaaattgggttgtccattcctcgatacgcccctctatagcatttttctcagtctctagaacccatacaggaagatgcactgagttatcccagtttgatgattcagagatcttttcagcgtctttgttggctacagcagctgactaacatgcaaaattacaaaatatcatgaggatgggtgaacatggaaagtttgaaattcaaacaaagggacaaatgagaagaacaggaagaaaggatcatataacaggaagaacaggagacataaatcacattgtgaatttcaacagccttatttctgttgtttgcctttggttctctatagtgatcacttgggcccagattttggcatactctaaggatagtagttactagttaccaaaacaggcatcttatgcatttttactgtacaaatttaactatatcaatggaaagccgtgaaatgaggtacatgtgcacaagggttatttactgtataaatttaagtattaaactatagcaataaaaagccttgaaatgaggtaaatgtgcacaaagggaaagggtagagtgacataatgccgttccagtagaactataggaagccgatataccaaccacatccaaatccactccacttaccttgttgttagtctgcagccgatacctctcaattgctcggttgaggacacaacaccaaatgggtatggtctttgacatgctgtcagggaaacgtttccctctccttgttgaatcaacaattatgcaccctcctctctcccctgcccagagaaaaaatagacaaaaacaaattacttgtgttaaaggcattttgcactcatcaagcatcatatttagcaagtgaaaattcttgaaaaaaatcacaattacatgaattattaagctggatattacacaaccttccgagaattcgaattattcgcacagccacactgatattatattacttccttccgttaaaaagtttgaaacgctaacttttaatattggttgccat

SEQ ID NO: 28939 - DNA, 22320 bp, Oryza sativa
  unsure (1)..(22320): unsure at all n locations
gtgtgaaaccttgacnatgactgaacactggcacanagcnncataatgtgtttgaccattcgtcttactcaaaaaaattaagtagttatttattcttttcatatcatttgattcgttgttaaatatactttcatgtacacatatagttttatatatttcacaaatttttttaataagacgaatggtcaaacatatgctaaaaagtcaacggtgtcaaacatttcgaaatggagggagtattatatactgaaatgttcgaactatttgaccatggttattcgaaataactgaattagcaaacaatttaattataccacctgcttcgacaggtaaaacggattgcagtgctaaactctagttctagacgcctggattaaacatatagcatagtttagaccaaatacttcaacaatgagtaagggggggaaccaggagcagaccagcgaggagggcgaggtggaggttgaggcgggcggtggaaaaggcccagttgcccgcgtgcccatcggtggacttgaagtagcaggtggcggcgacggcgcggggcggcaagtaccagagcccgcagcggaggttggcgaccagcggcagcgccggccacagcgccgcgatctccgccacgaacgcggcgtcgtccgccacgctccgcagcgcgttgtacagcgtgctctcccgccgcttgatgcgccgcgccgccttgtagatgctcagcgtcgacggcccagcggcggcggcatccgctgactccgacgacgccgccgccgccgccattggagagacgagaaagagagagacgctggcttgtcctaatttgggctctctaaactggaaatagagtgggccaaaacccattaataattagcaaggttatgggcctaatttcgttctatatggtgggcctctttaaagtcatggtccaaatacggcccattttctgctgatggtggtcgttaattaggtccattctggatgatcagcctaacttcggctcgtcagttggaagacgaaatttttggggaataagttcactttatatccctcgagatagggtcgagtttaatttgtatccctcaaccactaaactgggtattgaacgtcccccaacatttaaagccagtgcaaatccagtgagaaaataataaaacaaatatgtgaaggacacatttatgtgggtatatggctaaaaaaatggatccccatctcataaaatatatggttcaaaaaatggcttgagaaattcacgcaacggttcgctgaggtgattgatgcagcccccatctcgttctctggcgagtgcaaggtgcagaaggcgcaccctctcctgctggtcaccgttgtccaactcctctcttgctgcccaccgcccacatctatggagggagaaggcgatgcatggaggcacgctggccggaggtgaaggaggtgggatctcccactgacatgtgggttttttatctttttatttgactgatgatatatggccccacatattttgcttaaacttttataattttgcttttagtgtcatgtcaatgtccagtgggatgaggaccaagtcaaaccagacatgttgatgttacgtcagttaaaatcgtctagggaccgtgtttgcactggttttagaaggacatgattcaaactcgacgtcaagatgagggagctgaaatgaacttattcgtagttattgcccatgtaaaattagcggtaggcttaatctcggcctgttgtttgcccaattttgtttttttaagagcatcctcagcagctcatccatattcgatcctccatatgcctatttagatggtcattaaaaaagattactcctttatatttctctcaactccaacagatcatccatattacatcctctatatcttatcctcttatattttaatagtatacttcaactaccatccatttatattaatttttcttttttcacctttcccttatcttcttattcaccattcactcgaactctcgagaagcggcgcaggagaagcggggaggaagtgaggagaagcgggcgaggggcaagcggcggaggaggaaggcggcgggcaccgggcgacggcggcaagtgaggggtgatagcggctggcgaggggcggcggcggctagcgggcatagggcgacgacggcaagcggcggccatgcgcggggcgacggcggcagacgagggaccacgcgcacgctggcggcaagcggcggccacgcgcggggcaacgcggcggacgactgtccaaatctggtatgtctctctccacgattcgctgaaaaaaaaaagcaaaaaggggcaagggagctctccttcgctagctggggatgacgacgatggaggtgaggtcgcgccagagggagatggtcactgaagtccggattagagcgggagaggcggctgttgcaaaatggcgtgaggagagagacactccatttttgcctcttctctcttctaatttggcacatccgctatttttggagtgcctggtagcgcatctgctggaagccggtttttccccttctatacgccaaatgaaagatggaggatcggttagagtagctgttggggatgctctaacatagccgacggtcatcagcccagcgccccagctcattaacatcaagttacgggtccaatttgtggcctcattcgggcccatgctaaattgtttgtagggcctcattcaacgaagaagttggcccaaatttctcctgtcaacaatctcgatgggcctaactatttcctcatattgtcaggcagtttgaaacagtttagtatgttattttgatcgattttgatcagtttgcaagagtggcatcttgattcaccttggatgctttaagcaggtctaacggttagccatttcatattgtctgtgcccatggtatggaccaagaaatgtgtttgtcatgctttgaaacattgcagagggtctatgctgtagcatatttttcaaaagttgaaactgactctaaagtccaaacattgacagcctgagacaaagatgaaaaaaaaaagcctcaagaagtcattagaccactccatgtgtttcaggatgtttgtttctgtccactacctcagctactctaaaaaaacatcctgctcacatattctaaaccaattacactgagttattaacatctagctagttaattacttccagcagaaattaagcactcggtaggttatcaatgttcgctcactgtcaccgaattgtcagcttgtcggctcactccctgaagttgctaggcagtccacctcacgaatttcctgtggttttcagaatgtgatttcctgtggttttatctgactgattttgaattgtttgtttatagcatttgtcctgattaaaggatactgctggggaaaaggacacattggagcaaattggttcaaccatatgcaattcagtcaaatgaggttatatatctgctccctatatcagttacagcttgttgcagagaactactggctcactccttatctaaaaaaaaaaagaattactggttcacttgttagacttaagtagcagttgattgatatctattttcagatcatgcctactacaaattagtttaaaacaattcaaacatggtcctcgttttaattgattttcaagttttgctgcgctttcttgcaatttatatgcatatatttaccagtgtgttggatgtcactatccaaaggatcttattaaataaagtgcatgcaaaatgatggccaatattaatgataacagcatgtttataagtttagtagctagactaaaccaccgtgtaaactgcactgattttattttaaagttgtcttaaattaaacaagggagttattgttcaacttactccatatcttggccaaatttggttacctgaatatttataaatctagctaagtttaaaatatccatttattcatctgcttaattttttttcttgatccatagatttttattagataatatagatcaagcatcttctgactcagaatcaataatcaatttgcaatgaaaactgcaccagatctgcttgatggccagtccatacgtccatttcccggttgccattttttggcgccatccaagctcgtcaaaataaagctaataacaaatacatacgtagatgcgtgccatcaaaattaagtcacattatacaacgaggaatcatttgtagttgtctaagaaaaagaatcttttgtattccttcatacagtactatactttataacagagagctgatctgtttagaattgtgttccatgtttctttatgccactcttctctgaaccgctatttattctagatctgattttcttcagggattttagggaatttttgtacaggacaagacagcagggatggcacgagatgcaactagggacaaatgcagtgaaaacctataaattatcattagatttagaaatggatgtatgagatttagccacgtcacccagagtgaaaaaatttactccaagatttaagtatgaataatttttttaatggctctttttttttattcaacgacagtttctaggttttcaatacatatatgatttttcactgcatactttcccgtaaaactttattatactatgatatccttgatataactagcttgcttgaataaattttcattatattttaaaaatccgtgtagtatggccaaactacgcacgcgacggtgtgaacttgaccgtccgtctaccacagaaattcagagagagagagagagagagaataaaaaagagaagatgtaacatgcatgttgcatagatggctacgtaccttgttctatccggtgtcctgtgctaagcttttgcagtccagattctcttcttgttgttctaaattctaatcaatccgtttgccacatgcatatgcttcacaggctgcgactctctcaattggtccaattatttggtcgatcgatcgacaccggcgctggcaaacggattataaagaataatcgaattgtgttctgtactgctagctagctgttgtgtatagcctttgtataggcttgtagcgcggggttcctccacgatacgttttgagatgtatcgcactaggcaaaagtctcttcattatctgcctctcaataatctacgtacttgactcggataatcccatgtttcatggtcagcaatgtaatggaagtggcaatctttgaacagacaaatcatcacaaaaagaaattgagtatattgggctttataatttttaacaccacacatatatcttgacaacatggtttgtcccctttacattagtgacttaattttcaccggatgggaaagggacactactaaaaaaccattttcccatacagacaaaacctatttttccatgcggttgagctagccgtctgcgtcaaaagttctacgaaaatagcgatttttccatgcatatggcacatccacgtgtgaaaatcatattttcacatgtgggtgcttatgtcgttcgcatgcgtgcgaaaacaaaatactgtgaaattttttttccaaaaatcgaaaccccaaaccctagcccgccgccccctgcttcttcgtcgatgccggccgtcggaggctgagcctgccgtcaccgaggtcaccacagccaccgccagatccgcgcgcatggggagcagagcgatggctggatccacacggtaggaagagggggtgctggatccgctgtcgtcgcacccgcagccgccctcgctagatcagttgcgctacaaccagaccgcacacgtggggggggtgagcggaggccggatccatgcgggagggaggcggtggaagaagaggtggaaccgcccagcagtggaggaggtggagtcgtgcctctcgcccgccggctcccagtcgcctcctcgttggcagtggtgccactcgagatcaccgagccaactgccgccactgctcgcccgcccatccgcctgctcggaggaagagagagagagagaaaggagaggagtggtaaaaaagtttgaagtgccttagaggaaaaaagagaggaggggagaaaaaactttgtggaggagggggtattttcgcatgcagatcactcaagaggtccgcgtgcaaaaatctattttttcatgtgataccttaagaggactgcatgtgaaaataactcattttaacacgtagcccattaacagattcgtctgcgaaaatagatttttgcttgcggacctcttaaggagccgtatgtgaaaataaaagtcgatttttacatacgtgaccaatttacggtccacctgcaacctataggggtcctcgtacagaaagaacgccattagctctgtcatgttggatcacgttgtcagggttacagataaggcataccttctatcctatgacttatcaaatataccggattggtatacctcatatcctacgatatgtttccgtatgcagtaaggaaatacacaagatattatggaaaatatcctcacgggctagatactatcaaaatcctactcggaaaggataaggactattctatattgtgcagggttcgttgtctccgagttctacttagagactaaggcaactcatagtataaaaggcacacccccggaagggttcggatcatcaaatcatagcgccgacacacccagcatagtttacgaagccgaaggactcaaaccaaagccaccgggagatctcgtcgaacaatctcgacaaggatctcgccgatatcaacgagttcatttgtccctttgtactatgtggttttccatatcaattccatattaaactggattagggctgttaacttacgaggggcttgaaccagtataatctttgtctcttggctgcttcgatgtcgtattatgtagatcctcataccaacgtaccccagtaccctatttatccggtctacgaatattcccgtcgacacacgtcgtcgatgatattggcgtcacaaaaatatccattcatagaataattcttttaaggatctatttgtaaaatacaatttttaaaacgaccaacaggtgaaaaatccagcagcaccgccgcgtctgaggctttactatttatttatttttgttttttccggggttgtactactttgtagcgcgtgtctgggcgatggcgtacgggctcgtccatacacggaaaaatcaaaacgatccaatttcggaagcgtgccggtttgatgcaggcgtagctttttgtgctgatgtaatttgtcgcattagttattagtcatcgctctacgtacgtacctgacccgaacggtcacgtactcacgtatgtatgcgcgggtgccttacgtacttcctccgtttcacaatgtgagttattttagcatttttttatattaatattgatgttaatatatatatatatatatattcaataacatcaatatgagaaaatgttagaatgacttactgtggaaggaagtagtactcaacgtgacgaaagcaacacggtgtgatctgcggtttagtttaatttgcgtcgtgtaacatggttattaatttgtcacaacagtactacagaaagacgtataaaaatgatactatagataccgaaacaaataaaaccgatatgtatagtgctgttctcttccacatgaatatccgtgacaaatacatgtatctttcggtataaataggtgttggtttttataaaaccgatatcattcttcttcctttagtgggaacaagatacacatgtccacaattccacatgtagtttaattaggttgagttcgagaggtgaggtcgggaactcacctttcgcgcacgtaaaatggagtgacatattttctcatgattaattaagtatttactaatttttaataatggattaatatgatttttaagcaatttttatatagaaaatttttacaagaaacgtaccatttaatagtttgaaaagtttgaagagcgtgcgcgtggaataggagggaggtgagttgggaactcactagaaagaacatagccttaggtagggcaagtgctataagcatctaagtacaatcccatagatgccacctaagcttaaatgatgaggtggaggagagaagaggggagagagaggatgaatcacccctcatgcaaggaacaatttcttaacaaattttaaggaagaaagagaaaagagtgagactgattggatgagagtggataaaataaatagttatgtgcattaaggctagtatattagaggcaatgtggtatatgagatgtccactaatattatatgtgacaatcacatctaaacactactacacaaaagggattcggtgccggttgggaatcccctttggaaaaccggcaccagagaggcggtactaatttgaaaatcaaaaaggtgctggttacttagaatagacaccttttaggttcaacgaattaagaaaatgccggctcgatgcgtcggctcgatcgagccgatcagccctccttccacatccgcaagaacagaatgaacaagaaaaaaaattggcaacattcatcccacaacattcaaagatggattcatccacatatcaaattttggcaacattcatcccacaacacaaattttagcactcaaatttatgcaataaaaaaaatcacacctcttcagtcatcgttgcacggtcagtcgtctttgagacgtcgcgccacctcccgtcggtgaacccgccgctgcatctcctccacgatcccgtcgcccatgctgccgcctcccctctcactagatctagcggaggggagggctcctccctgcaggcaagccctctgttgcctcccctcctcgagcccgccacctgccgccaccttctcgagcccgccacctgccgccacctcctcgagccctctgccgcctcccctcctcaagacaccccgccctccactgagccggatccagccaccctgccctccgccgacctgccggccccacctacagccgacctcgcccgccgctgatgcctcccctcccgccgcatctggcggaggggagggcgcggtcgccgctgccgcctctgtcggccagccgccaacaacgggagagaagggagggggagagagagaagagagcgagagagaagggagggagacagagagaagaaaccttatctcctcgcgtcgcctcgtcgtggtggggcccaccggctcggcttgatttatgtgggtgtgtcagtttttaattaaccgacatctataatatattttaggtgccgtttttttttaaaaaaagacacaaaatataataggtgtcggtttttatttagaaccgacacctataattacttaaaagtgccttttttgtgatttcaacccgtggaggtgggaaaaggcctataggtgctggttttagcactaccgatacctatagtggcgatacctatttgatgttttgtagtagtgaaacttgccttagcccactcccatccacagttacttttttccttttcttttttgcatgaaatagtttcaatcctgtatccaacattgtcctccaatattgctgtagagctttaggccggattgagaggatacggtgaattggaagatgttggagatcaatatgctggtgcggtgcagcagagtagtagccagcctaacatactaagagcaagtttaatagtacagcccactactagctccaattcatttatagccaatctaatagctaatttatacaatagttgcttactatactattaatatatggtcccacatgtcatacacacattgcgtcttggagtccatgctgcagctggctacagatctatagcctgctactcttctctctcatccttatctcattaaaatatatttacagctggctaatagcctgctattgtacctgctctaatgcacgtagcgcgtgtgctttttgcatagttgcatcggtaatacgcggcactgtaacgaatgcggctggtgatgatagatcaaccgtacgtgtaggtcctctcaaaaaaaaaaaaaaacgtacgtgtaagtgtaacttgtatactcaaaatctctatctcacatgtacgttacatataccctataaaaattcaatataatacaataatccctcattttttataattttatattataagttgtttgactttttttctgttaagtttaactaaatttatataaaaatttaacaacaactaaaataaatctaatattgaatatattttaacaatatatatgtttctttttggttgaaaataccactatattttccacacaactggcctggatcggatagatacgatcagatccggacgggccggcctctcaacgtgtaaaaaatcactggttcgacctacccaaaattgggttttgcagggagccatccagctgcacataccggacgacccacgtatggctctggtcccctcccccaggcgatggacgacggtgactgcacagtgatctcatccgatcccatcttctgtgcagggatagatggaggatgatagctggtagctgtagtacgtggccaagttgcacttgtttgtactgcacattgtacatttgtacccacacacatacagtatatagtgccattgttgatctcgatttctcgaatagtagtagcaacatatatacgcattaacgtggcacgaactatttggccaatctttgatggagaggcgaactttggctccttcattccttggatggaaaaagctctcgcgatcgcgacgctgacattctctccggtagtggtagcagtactagtactgtgatgcgcagtctggcagtgatagatcaaggggtgctgccaaacagctcaccccgcaattttcctggtaaaacagtactccctccgttttaatttcaagtttgattaagtttacagacaaatatagtaatatttataatactaaattagtttcatcaaatcaataattgaatatattttcataataaatttatcttaaattaaaaatattactattttttcttacaagtttgatcaaacttaaagcagtttgactttgactaaagtcaagacgtcttataacctgaaacagaggtagtacatacatgcatagcgctagaatttttattgattattctaagaaattgatgtgtgcaaagtttggaatgcacgtagcatcagattcgtattttctgttgtgggagtttttaatttatcttggtggacaaatatggatgtggtcgtgaaggagggaggaatatggtatggacacatatcattcaatcctcatgcgaaaatggtggaataattccacatgatttttaaggactagaaatgaattgaatgaaaatcttgtaaaattcttgacttaaagaaacccttatccatatgcataaaatttgatctcatagctagaccaaactcatttgtttgaacagagttcaaaatctttaatgagaattgctcaagcctatgattcacttttcgaaaaaagtgagagagggggtggggagggggcagtgttccaaaaatagccgtcgcctttgccgattgttaggtgctcagcggcgagtccctacccgcgatttgcccctagtcggcgtgctaggcggactagtcgccctggcaagggtttggtgctgctcggcggacctcgtgcggaggtcacacatggaggcggtggggcttgatgcttctcagataagctcgtggaagtcttctcgcacgtggcggcgtatgtatcgatcaggaggagactagaaagaagaattataatccaatgacctttatacatcatggcccagttggcccaggaaaacacgtggaacacgagggttttctcttaatctggtccacccctcctgcatggaacacaaggaacacgaggggcgtctttgtcttcctcttgtagcgaagggcatcgacagcggtgagcacggtaggcatcctcttatgtcgttcaaatcgtcttctttccctcttcttataccctctttctctctgcttttctccatctccctccccagcatggccgatggtggtgtcgcctccactagatttgcccctctggtcctccttctgcaagtctacatggtcttttcccctcctagtcgctgcctcgacaggtttaggcgctaggcactggttagccgtccgaataaaaaacagagaggaatttcaaaggatttaaatcctattggaaaaaaaaatcatatgaagtcctctggaacaaaggattgggtcactagaattctgctgaaattcctatggaatggcatgtttttttgggaatttctctaaagttcctatcaagagctccaaggtcttggatttttttccatttgtgtctatctctcttctaaatcgtgtgttttttcttaactccatccaaacattttcccgtgtagttttcatgtgtttttctttccataggatttaaggtgcaataatattcgaatcttacgttcctattcctgcattttaagaatcctatgtccaaaggagtatagagtgcttagggttagttcaatttactagttcataagccattccccgcacagaaaaatggtagctcattagtgcatggttaattaagtattaactaaaaacatttcaaaaatattaatatgatttttaaaacaacttttctatatatatatttttaaaaaaacaccatgtagaagttcagaaaacaatcgtgcataaaacgagagagcaaaagatgggaaaggggagtgcacaccctaataccacatactttatgtagtatcaaatcattaatggttcaaatctactacagattacaaaatagacaaatatattatacaagttgattccacatcatctagatatgatttgaaagattatatatatagacattagcattttgaaccactgtttatgcccttaaagggtatcatttgctcgctttagaaaggtgagagcatcccaatttttttcacaactcccctatgttaaaaggatggttgtggtatgtgtgcttcttgatctatggtatactagcaatcatagcatcccatgagctgttttagagaccaaaccatgttctggtgattgcaaaaataattctacttcattcgatttcaaatgcaaatcatgttagccattaactattttctaaataaaaaccatttacagaacatctagtcattctttaatcttttttcttggtaaataaaatgctacctactcaccggtaaattttttgaataagacgagtggtcaaacagtacaagcaaaaactcaaaatcccttatattatggaacagagggagtactatagaagcaattatattttaggagcgagggattagtgtaaaagaacgacaacaaaagccactggattaattttcttaattcctatgagcaaaattaaaatggcaaattatctgtaatcatgacagttaaaatagttatcaaatatattaataggttacaattgaacttagagttacaatagatgctatgaggtggagtaaaaagtcaaactttgtgactcaacaactctttaaatagagaagggaatgtcacaacgtaaccatgtcaactggaatacaatatagcgtagacatgcaggaagataatgacgacaaggccataaactcgtagcggagatgctatgttgatttagaagaaacgcctatagttagaaccatgagatatgggttcggttgaaccccgttaagaaatatcgtgcgttcctatatcataatgtagtatatctgaattgaacaatagttgcagtgatcggaaatgttagttgtcattttgctatatcttgctatatcaactaacttttataacaattattattttattggcaactagttatagtcccgtgcagtcaagtgcattgcaacgatttctttatccaatttagtgaaaagatttgaccagagtgggttgattggttttttatatcatgatcggattcttttaagaaatcggtttttacatgaggaaaatggtttcttttgagaaagtgagggaggggatgaggggtggatgacttctttttaagtactccctccattttaacaatgtaagtcattctagtatttcccacattcatattgatgataatgaatctagatagatataatgttagaatgacttacattgtgaaacggaggtagtagtagagagacagtgataatggttggattttagaaatcaggttttatatgaggaaaattttttttaggaggaagtgagagagaggatggagggatatactatagagataaagataacgatagaaataaagataatattctgccagagattccacttcattaatacttcggttccacattccacaggaatcctgcaatgaaaaacaaaaaaaactgaatctctccaaccaccattgatttccgatttcagagcccatatttgacctccatgcatttgcaatcaacaggttaaaacggaagccgcgtccattcaaatcgcttcgataaattgcccaaaaacaaaaaaccgaaaccaaaacagaaaaaataaaaggtgaacgagggaccctgccgccatacgcgtcgagtaccattcacttgtagtgtatatatactgccaccattcactcgttccccccgcatcgcatcctctccccacacaatccccacccggcctagcgagcgagagagagggaagggttgcgacttgcgactcgcgagcggcgagatggcgaaggacgtggagatggcggtgcggaacggagacggcggcggcggcggcggctactacgccacccacccgcacgggggcgccggcggcgaggacgtcgacgacgacggcaagcagcggcgaaccggtacggatcaaacccgaccccgacccctcgtgattcccccgtctcgttaaccctcctcttctcctccctccgccatggatgatgatgtggctgtgctgttgtgtttccgtgcggtgcgtgcgtgtccttgtggtggattggattttttgcggtttttgcttcctatttttgggcgcatatatgcccgctttatcaatctcgcttagagtcgagtggatcatcctactcatcaaaagggaggtctagaaacacggtgcacgcgagatttctggtagggaaaactccacgaaaagttggttcaaattcgagacaaagtagttcgaattcaaaaaaaaaaaaccgaaacgtttcaagggatcggaaggcgtgaacaaccatggtcctagctggacccttgtcatctcctcggtttctgttccaatctagcgagcggcgcggcgccgcctcggatggatttttggttggtgctgactgcttgacttctgcgttttcttcctcccttttcccggaaactcccatggattttggttggttggtggcgctctggtgcggtaggcttcgtccatagccaacaccgccaattaagccgccatgaatggacatcgttgtgcgtatgtatcgtggtaaaaaaaaatcgaactacagtgttctctgtgaagtgaaaccctggagaatttttactgcgttcaagataaacggtgtgcgcttttttttttgtgtttgtgtttccctttttgggttccccaacggagcgcatgcaagcgtccggcgacgtgtacgctgggtttttttttccagcacttcgtctagatctgtctgttcctagagtccaaaattaattaattaattaattaagtatgtagaggttcaaaattaattaattagttagtggaagcacgggaggtatggtggtggagtcgtggacacttcacacattaggattaaaatccgtgcatgaattttagtgagatcaactatatatcgcttcacccatcaagactaaaatcccgtgttaaggcttgtttagttcataccaaaattgaaagtttggttgaaattgaaacgatgtgacagaaaaattagaagtttgcgtgtgtaggaaagttttgatatgatgaaaaagttagaagtttgaagaattattttggaattaaacacggcctaaaattttaatgagatcagggatatatcgctagtttattagttttcatcttttagggcatatattagggaacatatttataaaaatgtgtgggttttcgagtctatttgaattgtttccctaccaattttttgtagtgccaaaatctaggcaagttttggcactaccaaatatttggtaaggtaagattgttttttatcatatttggtttgctacaacatagagtcaaaatgtgaaattgtagtaaagaatgttcataatgccaaatctatattaggtaggagtaccaataaatgggcttcaattcaaatcaaacacaagtactatttaaattaccaaaatattggtagggcagtttttggtagcaatccaaattagcccttcatcttttagtgtttcatgtgtatgtgtatgtgctatctaatcgaaaaaaaaaattagttaatcaagaattaactaatttttatatcacgtgaataatttggcttgcgccgttccgcgtcgtgcgcgctgtcggatgctggatgcaagaggccagagccaaccatccacagcacctagcacagcagggggtcgcgcgctggtcaacagccgcgtacccccacggtcaacgcgcatcagccactcgatctgaggcatgcacggtctagatgatgccacgttcgcaataaaagctccccctgatcaacaagtgacgtgctgtttcacggagtgtgacgtggcacgggcagtatagtacgtgtacgtgtgaacacacgcgcatgcgacagcgcatttccacgcgtgcaattctgactcgcaaaaagcgtatagtagtactagctgcttttttgcaatttgtattccttgaacggcacaacgtgtttggtggaaaattcataaaagtcaccgtactttttgacgaaaaacggatatatgcttggttgagcggtccactttaagctaccaatatcgattatcttatcgttagtcagcttcagtgagatcatatctaaagtaactggtgctgaactcgtcaaggaatcattccggcggcctgaaagcccctctttggatggctctgcgcctctgcctggccgcttccgatcggccggaatctatgtcctcgtaccttttacgcagcaccaactgatgattgcgtgctttcaacatattttggtttggaacgcagtgatctcgtattttattcgaaatgcgtaaaagctttgttgattctacggaaacgctctttggtttgtagaaaaaaaacccttcatatatcttttcctttgaaattcctttgtaatgacaatcttgtaaatagtttggaatttttttcataagataatatcatccgacgtgactagggattttaagtttttgtttgcgaccacttatcttatttaaaaaatttgtgcaaatagaaaaaacgaaaagctgtgcttaaagtactttggataataaagtaaataataaaaagaaataataattccaaatttttttaaataagatgagtggtcaaatagtgcaaataaaaactcagaatagggacggagggagtagtttctaaggcctggtggtcggcatgaaccaatctttttttttttctagctgtacctaaacacctgttttaaagttttctttctcgtagaatcatactgtatgtagaattgaagaaactatgccatcctattcatgtgcttttacatactcttccctattcttatgttttgagttttcttccttctagagggcccttgtttctctgtaatgtgaagttctttagtgccaactgccaagaccttaatcacggactaagggtctgtttagcggagtttaaaattctgatcaacaaccagctggtagccaacttctaagaatctggaaaaattagattctataactacagcttctcagaatttataccaaaaactgatctatttaggggagattctgattctggaaaaagctgcaggagctaaaatctcccttaaacgggctctaagtggatccactatatatatagtggacttttgtcttatctcagttctttcaacggagtactaggcacagcccatattgtgaaggagaagaaaatggccagaccttttgactgcgaggcatgggctggatagtctttgggatgaggtgaccgatgcgagggtaatagatgcgccgtagacctgctgtttctgaccttttggcgcacagctctacgcacgacaactctactccgtgtaggatagtgtaggctagtgtagcggtactgagtattccgtattcgtgctgtacaaccgtggtgtgctccctgcgtacggtggtttggggattttttttcacaaaatatgtggattttttaaaaataaagctatctaaatcttgcggagttattggaatggtattttttgggataatttttcatgacaggtattgtgcattgatataggtagtgggcctttttgaatggttaaagtgaaaatatttttcactgaacgctttctaaacgtcaatgcatttatgaatagagtagagagtactatggagtctgaccttctcagatgggagactctctagctaccgggatgatactagacctttgtgttcatcaagagatcacatgttcacatgtgtaggccctttatatatgttgagttgttgacttgtgttcttcagagggtgacagtctccatggctcaatgatttgtttggaattgtctattctgtttcagttggcatgggacatgggtcttgtactctgtcccaaagtgtgcatgtgtcctcatccgattaatcaaggcactgtgttaatcattctttagaaactcattaactgtatgcatacatagactgattgaggggctacagatcataaaccatggatgcatgtgggtattaatcattttttaccctcggtttggtgcatgctgtcactaagtggagtgaacttgttcacagttgagattatgagtaaatatcaaggagacaagaactgaaattcgaaaggaattaaagtcataaatgaaatgattgaattttcagaatgttgaaggactgaaaacttgtgcaattcgttgagcaggtaacgtatggacggcgagcgcgcacatcatcacggcggtgatcggctccggcgtgctctctctcgcatgggcaacggcgcagctcggctgggtggtcgggccggtgactctgatgctcttcgccctcatcacgtactacacctctgggctcctcgccgactgctaccgcactggcgatccggtcagcggcaagcgcaactacacctacatggatgccgttgcggcctacttaggtaaatactattccttccatttcaaaatatatggagctgttgactttaatataatgtttgttcattcgtattatttaaaaattatataaatattatttattttgttgtgacttgttttatcaatatagaaactagtcttaacttatacttttacatatttacactaaaattttgaataaaacgaatgtcaaacgttatacgaaaaatcaacaccgtcatacattttgaaattgaaatggaggtaggaataacaagctgtgtctacatgaacatcgatatgcatgcgtcagagaatttagaattttttctctgaattcagagatgtcatacgagccttgttgctgttcttaaatatgcaggtggctggcaagtctggtcctgtggtgttttccaatatgtcaacctggttgggacagcaattgggtacacaatcacagcatccatcagcgcagcgtaagttctgaagaattgatctgttcataaatcacaatggcatactacaattctccattgctttcacaactcaatgctatgcacggttctgacttctgaggttaatttgaatgatcttctacagggctgtgcacaaggccaactgctaccacaagaacggccacgatgccgattgcggtgtctacgacaccacgtacatgatcgtctttggagtcgtccagatcttcttctccatgctgcccaacttcagtgacctctcatggctttccatcctcgccgcggtcatgtcattctcatactcgaccattgccgttggcctctcgcttgcgcgaacaatatcaggtgaagaaatctttctgaagatggtatcagtgtcactgcatatatagtttgtaagctttctcatcatctccatgtgtctgtacaggtgctactggtaagactactctgactggcgttgaggttggagttgacgtcacttcagcccagaagatctggctcgcgttccaagcgctcggtgacatcgcgttcgcctactcctactccatgatccttatagaaattcaggtaagctgtgcacagcaaagttcagagtttgagaaacatttgagcaacagtcacaaacatgtctcagtttgtttgcttgcaaggtttttaagtaaccgatgatgagtctgaaaaaaatggcatttgaaattgcaggacacggtgaagtctccaccggcggagaacaagacgatgaagaaggcaacgctgctgggggtgtcgaccacgacggcgttctacatgctgtgcgggtgcctggggtacgcggcgttcgggaacgcggcgccggggaacatgctcaccgggttcggcttctacgagccctactggctgatcgacttcgccaacgtctgcatcgtggtccacctggtcggcgcctaccaggtgttctgccagcccatcttcgccgccgtcgagacgttcgccgccaggcggtggccgggctcggagttcatcacccgggagcgccccgtcgtggccggcaggtcgttcagcgtcaacatgttcaggctgacgtggcggacggcgttcgtggtcgtcagcacggtgctcgccatcgtgatgcccttcttcaacgacatcctgggcttcctcggcgccgtcgggttctggccgctgacggtgtactacccggtggagatgtacatccggcagcggcggatacagcggtacacgtccaggtgggtggcgctgcagacgctcagcctcctctgcttcctcgtctcgctcgcctccgccgtcgcctccatcgagggcgtcagcgagtcgctcaagcactacgtccccttcaagaccaagtcgtgatcccgatcacgacggccttttttttttgcttttgcatcctgatgaaaaaagatttcagaaacatatgcacaacaaatgccggaagttagccaagagtttggtcaccagctcggtgcgttggtcggtcaggaggaggagggttcaacttgtgtaggttaagaaatgctagagagtatggagaccatcttcgattgctgctcatgtatagaaaaaagaggaagcttcgtattcatgtaatgaatcggaatgtttaacaaacaaggcttgttctgaactcttctcagggacaggcatggataacagattaaagataaatgaatgtgttagacaagggcagattagaagcggctcttaagcttcacacaatggttttttctctttcttttattaatgaaaccaaagcagttgaacaattgagcaatatgattaatgagaaacgactggaggtctcactcctctttataaaattcgatacagaagttcttgctctcatatctaaccttttttttatatatatatattttgctagaaattgctttggcagtgtagaggattgtaccaacccaaaaacatgtcactagtgtacttatgcgtgatgatgtcacgctctcaagttttccccttcttctttccttaaaatttgttaaataaatcatccgaagaaatggtttgaattaacctagagctaattccctaattaataaatgcaattaataattggaattggcatcgtgggatttttcttgggttccacatgtcgcaatgcattaacatgatttttagcggaattttcagagccctataaataatttttaaccatttaaaatcatcaaggtgcaattttaatcccaggaaaatccttttcctttttcttttttcttttccttcctttttttctcttgatggaccgtcggcccatctctctcccgcgcccccatccttcttgctgggccggcccaagccgccttccttctcttcccgggtcaccgacaggtggggcccacctaccgccgaaactgcccacgccgccgcggttttccgtcctttttcgcacccccacttcgtccccaacttgtgcccacgtngttggcctcttccctctttatttacacccccacgtngccggacaaataaggggacaccccacccgtttgcgcccttctctgcctataaaaagaaatccccgagtgtaatctcttgtttccccaattggcgcctctccatacttctaccgcgccacactgtacagttagttcttcgaccgacgcgaccttcgacgtcttcacatgatggaccccaccggctatgaaacaccgccttaacttgggggttgttttttgcat

SEQ ID NO: 28940 - DNA, 1777 bp, Oryza sativa
acgtcccggccaaaaagggggccaccccaccgttttcggccttccggcgcccataaatccactccccgaagtcacctctttggttccccccattggcggtcctttccaatgccccctacggggcccaggatgtcacaccgagttccgccgcccgcggcaaacctcggaccgcgcgctgtcgttgatagcttcgccgcggcgttatgcaaccacggccgctacatcggcggtcgctggtttgccaccaaacatcgccgaagcgccgcttccctcgcacgccggtgagctctccatttccgcccaactctggccggccgctctagtcgccgtggtcatcctccccttctcctaacccggtcatcgcttttcccaggttgtgcccgaccccgtccgccattgtccgaagcgccgccgccgctcgtctcttcccgcgccggtcatcgtcgcctctccggtgaggacccccttttcctccccttccactcctctctcgtgcgcgccgccgctccccgcatgcgtgccatcgcactgcgccgccgtccgcgttgccggccgctgccaccggccggtcgccggtcaccggccgccgttcgccaccgtgtgccatgcccgggttggcctcggtgtcgcccgtccccagccgcccgatcggccctcggccgatcgtggccgtccatcccatggcttgggtggccagccacgtggtgccacgtcggcgccacgtggtacaccaccaccccggccccgtggacccggtccacggtggaccaccccctttgagccgctgacccgtgaaccccgcctgccaagctgccccccctttcgctgacatccgccctggggatttattgcgcaataattaattaaggcctttttctttattagtaaaaacatagtttatcttctaaaattcataagtaattcatccgagctccgtttaagtctattcaactgtcagtaaattcataaaaatccctagaattcattaaaaatagttttgttctctgtttcagtagtcttatagcatgttttgcttgtgtgctttgtttgtcgcgtagatttcggccgtttcgtcgatccgcggttcctcgaagacattgctgtggtctcatcagtgctagagcaaggcaagtcatgcattacaattgatcatattgtacccaatttacaaatatcccacatttctattaaatgttgcattcttttacaatgtcatgtgggatgggtcctattactcagccatatattgtttaccttatgccattgatgacttgggtatcaaaatgactagatgttggtttaggaaatgcttagccatgcctagctcaactagtacacaaatggggatcacattattacatagactttgactattagcatagctttggattggtgccaccgaaatggtgttagttaattaaaatacactgaatggtgggctgtgggtgcatggtttcgctggtcgcacccatggcaattaaggaccggttcacgggaaaccctgggagacttaccgtgcttaccacaagcgggagtgggcaactgcttgatctgaagtatagctcgaccctttcctatgcaccggtggcgagggtgggcgtgatggagttgggtcagccggggtgtcccggtgtccaactgccggattcaccgcggcgcaagaggggaccacccactgtcttttgaggggtgagggtgaaaccctaacgtggtgtggatgttaggggagggtattccgaggtcttgtcacgatttctctcctttgcagtatcatggg

SEQ ID NO: 28941 - DNA, 16041 bp, Oryza sativa
  unsure (1)..(16041): unsure at all n locations
gttacacgcacgatcngcacaaatattgcaggtctcaaaaatgcaccactcaattctctttggggtgtattggttgtatcgtactacgacacgacctccccngcggctcccnnnncnnnnncngtggggtttgaancccngtttgattgactnccctgcaagnagnncatcagtcttacattgttacattgcgttcacataactttgcacagagagatggatatttgtatgaataatgaagaaaacaacattcttacatacttgcattacatccatatctataccccttacaaaagggagtagtcgtgggggttgttctgcccccccaccccccacccccccaaaaaaaaaaccaccaccaccaccaactcccaactttcttttagagtaaaaatgacatgcggggctagaggacccacatgtcaaccactcccactaaccctctactctttatagcaaggaaaaagaatagtgtgggaccaaagggcccacatgtctgtaacaaacatatacaacaattaagagatggtaataataggttaaagataattttctttaattaattaaaatcccgttgcaacgcacgtaaaatatgctagtaacctataaattctttagctaagccttagcagcattgtgtacctacattttcatgcatcttttttctgtgattgttggttgccaacccaaccatgaaaagagaggaaggtgtcttgtgcagcccatcagggccccaagagtagtccacctctctagggccgccggtactgtacatgaacagtaccatgtggttactgtccatgcgtggtactgttcaaattgggtgttgcaacagagataagattacatttatttgttatctatttccttaatctgagacataggtttcctaagggtcaagttctcccatctatgtaagggtgggtatgtatcttatttgataagtttgttatgggctttgattaatggatagggtaaaaggtccaaagaccgcgataaaggtgggattgcactggttggcgtcatgtttgcctgttgtgccaggagcccaggacctcaggagactctgatcaagttagccgaactttatggttttttgcttaattcccgatggggtacatactagccacatagggcctgtagggagaacactttacatccaaggaattaatgtctactatcagagaaaccaatccgatctctatctctaatttgctaacaaatctcatccattggctaactagataatctcctatctttatttcatttattcttaatttgctaattgacctgctaagtatccgtaaggggttaccacaagcccattacagggttactgtaatcttgttggcccattggaaagattggcttgtttcaagctgacaagtgctagtgccattcaaatgataaccccgtactatctgcaaaaaaagagaaacttgcatgatctctagggtcaaatgcactatctgtagcttacaggtagattagatgggtgcatgtagatgataatacctgagagcgtcaattagagtgagtacacgtgagaggtgtctgcatgtgttttcaagccacagatgatgggatttgacctagagctagcacaccacttcaacaagattagctgttaaaatgagcagttacattcattcacccagttagaagttttttagacccagtgatgatatatttataatacatcgttagggcttatgttttagatcaaactgattgttgaaggcaaagggaacatcctgtaagtaaaatgccctagccaaaaaaaaaactgtgaaaatgaaggattcctgcatttcaatgtccctttccatcaatagatttttcttattacttttatatggacctttttcggtgcttattgtatcttgttcatgtttatacaggttttagtttcgagcagaggaaataggctcgttgattgttgagaattgtgcccctgaatctggcgccacgaagctgctggcttccacgtctgtctatcaagatcatgggtagagtgacattcttaggaactagtagtagtagaatgagcagcctgacttgcttgttgggactagtatgtttcgtgtgaatatctgatggcacatggcatgtttcttgtgcttccttctgattaaactcattcatgtttggtaatgcctggagaaattgtgttaatatgtgctgttcttgagtagaagctgaaactgcagcctgaactgaaacactgctgaaacttgtgtgtccaacagagctctatgttgccttaattttggactttattcggaattactatatggctaagcagagcattaaatttgacccttataatatcgtctaaaattacccagctgttaacaccataataatacttatacgaaccacacttaagctaaatccttctcataaaatcttcagataaagctgcacctcagagagtccaaaacgactgtagtaaatcattattcccccatatccatatggaatcaaaccgagagtatacactaacgcactacggcgaggtcgaatcaggacctggtcttgaagggcacgtaggtcttgagcgagtcgaggacgccctggatggaggcggcgcaggcggcgacggtgacgaggaagcagacgaggctcaggctctgcagcgccacccacttggcgctgaaccgcggcagctgccgctgccggatgtacatctcgacggggaagaagacggtgagcggccagaacgcgatgctccccaggattcccaggatgctgttgaagaagggcatcaggatggccagcagcgtgatcaccggcacgaacgccgtcctccacacaagccggaacacgttcacgccggtgggcccgcccgcgccgccgccgagcagccccgggcaccggcgcgccacgccggccttcacgggggcgaacagcggctggcagaacacctggaacccgccgacgaggtgcaccacgatgcaggcgttggccacgtccaccagccagtatggctcgtagaagccgaagccggtgaggatgttgcccggcgccgcgttcccgaacgccgagtagcccaggcagccgcacagcaggtagaaccccgtggtcgtcgagatccccgccgccgtggcgcgccgcatcgtcgcgttctccggcggcggcgaccgcagcgtgtcctggatctcgatgaggatgatggcgtaggagtaggcgaaggcgacgttccccagcgcctggaacgtgagccacaccttctgcgtggcgtcgacgtcgacgccgaccaccgtgcccgtcagcgtcgtcctccccagcgggtccatgatggtctgcgccagcgacaagccgacggcgatggcggcgtacgagaaggacatgacggcggcgatgatggacagccaccagagctggtggaagtttgggagctggcagaagagggcctgcaggacgccgaagccgatgatgtaggcgctcgtgttctggctgcagtccgtgccatggccgcgccagtggtagcagttggacttgttgatagccctgcacacgcgcgccacgccatgacattgtacgttaattaagctcgatgcaaagaacatgacgtcatcaatggcgggaaggaagggaatttttttgtttgaactttttaaattttcttttattttaaaaaataaaccttataaaaacttatttccaaaatctggcatggcgtggcaactgtcagatacccgtagtgagcgtgatagttttgtccttaccacgtcagccagaccggcataatcaaataatgagggttattttgtcacgttaatccggctagcatgatcaaaaggtttagatcttaaaaataagtcttgaaaagatatatttttaaaattattcttttaaaaaaataagaagaaattgaaaaaaaaaagagagtggctaagcttacgcggcggagatggaggcggtgatggtgtagccgatgccggtgccgaacatgttgacgtactggcagaagccgcagaaccagacgtgccagccaccgaggtaggacttgacggcgtcggtgtaggtgtagttgcgcttgccggtggccgggtcgccgacgcggtagcagtcggagaggaggccgcaggtgtagaaggtgatggcggcgaagaggaggagggtgatggggccagccacccaccccagctgcgccatcgcccacgccagcgacagcacgccggacccgatcaccgccgtgattatgtgcgccgtcgccgtccacaccgtccctgcaaattgcatttcatatgcgcccaaaacacatcacttgaaatcgatcgaatattttgcactgtccgttcaaaattcagaagaatttaaaacgaacaaattattcatcagaaaacaatgcgattgaattgcaggccaggtttgcaatttctagaatttcaggctaccggcacgaaactattacgcctggaaattttattttcgttctttctttcacaacctaagttagctctgttaatatataactagtttttagttttcacaatctacaattcattgcctgacctatcatctaccagtagctggttcataagttaagagctagtatgttaattgtgcatatcatatcagattcctgctctatcaatagaactttgcaccgtcgtttaaaaaaattgtgcataccagataatcagattcctcgtttttgattttaggggaattttcgaattctcaaaggcaaacaagcattcaaacagcagctagcttaacacaacaatgtcgccaaccttttctttctccctttttgtaaacagaatgtcctgaaacattgattaagaaaacagatgatcaatgatgccaaaagaattcgatgcagacaaaacagtcgcagttcttgacttggacatcaaacggccggctgcatatataacagaatcaccacaggacaaaacctagaacagcaaagatcaatggaatatcggattggagttgaacacggaaggaccttcccatccggtatctccttttgttttcccatgcacttatatatatactacttttactcgcagcgcgtgtttaagataattttttttaaaaaaagaaaactgtataatagcatcctacaaatacgcgagttataaaataccatcatatttttataaaagggcagtatataaaagggtaagtttagtatttttaaaaatttaataaagggctgtcaaatcatttgaagttgagatttatttccattgggagtaaattattttggatctcgtcgtccgtttgtgctagcgctttatttttggacagaccgagtacgtagctagcgtacatgccgacctatcaacgacgagacgagcaagagactaagactagagtggatttcatctgagccactctctctcgagcgggttctggaaacgcaaaaatacaaaaataccctcacgcaaaaagatggaaagacaaatataccctttccgatttatactgcaaaactaatatgaaggaagatcaaatgaatctacaccatctatactgttagatcattacttgtagtatactgtaccataaaaatcctcttcgactaagcataagcacaatctgattgtcatgcatccataactctactactatatcaataatgtttttcaaagttctcaagtgcaatgtatctgaagtcaggagtatgtctttctacgagaaaggtacaggaaaccagcacaaaagatctcaaaggctagctagctagctagagcagctgctaactgaactagctagactgctatatgatcatgtatgagcaggagtcaatgcatggtgcagccgccgccgccgccggattcggtgacatcgccggcgtcggcttccatggagaccgttctttttcctgctgatcatgatctcctgtacacctaggaggctatggctaggagtggagtatatgcctatccctgcaagaggcaactttagggagatgtgccagtttttatgggcaaaaaacccaacccaatcacaaggacctctattgcatagcataggcggcgatgctctgtggcatggtgtccaaatatctgaacttgcaatgacatcctcaataatcaaggtcaatagcctcactacaatgcatatagcctcaataatcaagatcaaagaatacacattcttgtattctttgatctcactacaatgcatatagcctcttcttggtctttaagttggagcccacaaaggaaataaagaccctattcatccaggattcaaataacaacatgtatgttgcataggaataaaatgttttagccttaagcttaagattggccatagcaatattctctcctttactcatctcccaagacaaaaagatagagcaaatacactattttatttttggctctctcatttgttgcaaaataagtttatttttaagcaattatcgtatcggagcttgtgaaactaggaaataaaattgtgtgagtaaataatgcggagaataattgtattaaaatttaatagagtagaagtattctagtctgtttgattttgtattggcatgtgtgggacatgtgaaaaatgaacttattttgggatagagggagtacaatactacatctacagtgaattattttttgtgataacttcaattatgctagagagatttgaactctaaaattatattttttgtgataacttcaattatggtaaatctataatatagttttgtggcaaatttattgctaaatgcatagttttctgatataatgcgttgtattgttcaatcaaagtatgtgtaaactcttataatgccttgtattgttcatccaactatggacaggggacaagtaagtgtaatttaacaaattccatctgttctaataacagggtcaattaaaccaacactaatatttcctcacagacaattagacaaacatcaataggttaaaaaaagtagtaataaataagtgaaaaacgtgaaattttgttcctatttttgtcatcggtccaaaattaattctgaaccaattcatgcatgcgggggcataagcaaggcaacaaatagccagaaattctttgttttttttccttagctagcaaaagattcaaaatagaatcattaattctctctaaatccaaaggatcatggtgagcacagctacagttggaggcaatcaatactagccaattcgactgatcgtgcaacaaagtaaaactaggatcaaaccatatgcatgacctggacacagagattattacatgcagataatgcaaggttggtgcaattaacgtagcattaattattatttgatcatctacatctacgcaaagcaagctttgataatccaccaatctgttgcgagaaatacatagaggaaggagtagcagtagctcggatatcgtagggaggaagagggggcccgagtttaattcccatggggaatctgcatctgcttttaatgacccccgtttcacgaagcctgacggcctcagtcccaacaatttcaattcaggttttcaccaattattactggatatatatcagatgcagaatgaatctccaatcaacatcgaccagaaagaggatcgattaccatgcatgataaaaacaaaaaggatcttttccattgcatggccggtgatcatcatcagcaagaggaggaagaagaagaagattgaagtcttgaagagaagagtatgtacctgtcctcctctccttgccgtcgtcgtcgacgtcgccttgggtccggggaaggtagacgtccatagctgacgccgctccgccgccgttgccgttggtccctcctcccatgcgaagagagaggcttctttgtctctctctctccccgagctagagagctagctagctattcgatcgatcgtacgtctctccggttgatgcgcggggtggtatattgatcccctctccctagctagctcggcgcagggtagcgaagcaaagctgcctccgacgaaggcggtgggttgggggagtggtggtggtggtcgggagagggaataggagaggccagtgaatgcccccatatatatagcgaggagggacaccatgcatcagcgctctctcgctagctactcatagagagtatagtaggctacgcgtggaaacaggggataccccggcgccagtgcgttcaaattaaattaaatccaatccccgtttttatatccatataaacagcttaatgaagtagtagcatgggttatctaaaaaggtaaaagaaaaaaagtatccataaagagcacaactcgtgttttgctgttttcatcttatctgcgattaattgtataaatgtgtcaattcgctttgatttaactcgctgggtttctgtcagatatttttgttcaaaattatttgaaattttaatgaaatttggtcaaaatttaaacaaattatgctaacttcaaaaaaaaatggaaaatttggacgaagtagtttcaggtggggtccgatggactgttattaaagcatgacttttgctattgtttcgtgcggtttctgataatatacggtacggatggattaaacaaaaattaaatagccattatatgtccaaatttgccatgatcattgaattctatatgtggtgtaggatgccatgttacaagggggtacacgggccatggtcaatttcatacagagccccttaggatccaaatcctcttcacaatcaccaagacagaactaggacaaaacaaaaatatcaaacgaagtttcatacccctccgtcctccgccgcaatcttgatgatgatgagctgaattcactattcatgccactcattttgggaatgttgtgtgcatagtataagcagatacaaggatatgttatgtgtggtagcttcaaggaagagaagcaactttagacaactgcaaagtattgtgggtgacgaatggcaacatggaactttagtgtgttggattcacaggaaagagagacggctgcgaacaaaagaaaagggaaaccgtcgacggtgactagggggacaaggtaccttcgaggaagatcaacagatgtggtgaaaagcacaacagcatggtggcatgaaatgaggcacacgtagatcaccaatacaagggatttgggaatattaacaattgtgaataagatttcgatcaagagagattttttgcgaaattggctatgcccaaggaccccttgcaatgagaatacacctggcatgccacatctctagactctaggatacaatcatggcaaacttggaccttcaatggtacatttaataaaattagaacgactaaatttgcaattttaaagattagagattgggatgagaccaccaaacatgtgttgtagcagggaccccgcacctcctccgatctagggaaagccgaaactaccatgtatgtcctatttgatttgaatatatattcaggagtcaagctagccatcacacacactcgaatcaagaagttttcgaatatcatttggaaacctagtcattcgagaaagccaatagggcacagttttgaaggaggtacttcgaggagccaagcctaagtctggggaatcaagccggctcaaacatgtgtttccagggaccacgacaaaaggagcggcaccagcttgtaggtgtggccctgagctcgacaattggataaatgggtcccctcataaaggccagaatatacatctgtaccctttgcatgtgacgtcctttctaggcactaatgtaacttcctaaagggggttggatggcctgtaaaagggcagcttgtcctatcaggaggcagatgcattctgaacttaaaaaaaaggctagcagcgatatactaaatatacccatatacctttcggatacattcattactcaagataggtaaggtcaccttatttcctcctctatcttctacttgttaacgaaattttgtcacggcatatattggcatcgttcgttgggagcgtgagtggcctcgaaaggtagatgaaaccaagacctcaacgaagataagtggtaatagcgagatatgctgaagtgttcggaaaatcaccttagtcacctgaattcaatgttgtagaagcagaggagccgaatttgagaacatgaatgatttcgagtaaggtgcaactgtcaaagatgaagagcagaaagctgaggaagcaagagtcacaactgaagtggcaagtggagtgctagcattgagaatggaagcattagttagtatggtgcaagaacaaagggctctaatgataaacacgacatggtacaaagcaacgcaacaagaatacaaagacttcttacgacaaaacatgatttgtgcaagtgcagatgttgatgtggctacacattcttgaccaatcgacatcaagcctttgatctcttagcagaatgaaaaatggtctactaagttcaatttagtttgttcagttgaaccttctgaactcaaacatgaatagtgcttcggctcctgatttgaatacaacaacctaataacaaccattcactgtaaacccaaaccattctattccatttcaacccacccaacaacattcaaaccacaataactcaatgagccaaaatccaaacatagtcagcaaagcagtctttcatgcacatcaaaagaacatcagcccaataccttatacaaccaacctaataccccaaatacaaatactagtcaatatacctcaaccaacccaagctataccaatacaaaaccaaacatcacaatagaacatacaaaatatcatcgctcagttaatccatcaacaagacaaatcgagcttcacaatacaacccatcccacaacaaaacccacaactagtctcacatcaaacgtataaaacattgaactttgcaaaacaactttatcaccaatagtatcagtacacattgttccaaccttgtgtgccaacatttttgaaatagcaacagtttgtacaatcacgaggagttcgatcaatcaatgaaaaatactctctaagtccagcattgcaaatgaaaccctagccaatgaaattcaaactttcaaacataagaaagctcaacagcaacacaggcgcaaatgaattcttgagagtatatgagacaacaataaaagccaccggtgaagatggcaacacaaatgcaaaagtcttgcgcacggtgctcaaagagatagttttgtcctagctcttcacaataccaacattattgctacactcatgggaacaattgagggagatgtttgaaaatggatttcaaagaacttgtgaggagttgaaaggggcagaagatttgatgcaatgaagtaattaacatggcaaatgattagagaatacatcacaatattcttaagggttcgatgatagattcgaggggcttgtcatagtagggaccccacacctcctctgatccgatgaagccaaaactaacatgtctatctaatttgatttgaatagattttcaagagtcaagcaggcagagccaggctcccatggctggtcgatggcggatccgcgctcccgcagtcggccagcggcagacccgcacacccgaggccgaccaacggcggatccaagcaccattgaagttgtccagccgctgtagtcgttagcggctgactacaaatccaggtgtcgtcgttgtcatgacctgcatgaagctcgaaggtggaggaaggctggaggaaatgagaagaagagatggatggggacctgtgggacttagccaaactttaatagcgcctccacattttgcaggcggaccactgaaggtcccacctttgaaaatcgtatttttccaagcggaccacttaaggctccgaccatagttgattttcataggcggggcaaaaatctagggggtctctagatatttttgcaaatggttatatgagggggtttttttttggttctagaaaaataagaaccagagttagtaaaaatcattttctagtagtgcctactacccccgttgcctcccctccaccgcgttgttccgttccaccaattgttgcacggctttggaggcggcggagccgacactgtcgccgtcttctgctacgacatcttgccgcccactgccgtagcggcgtcgacagtcatccacggcatcgacaagtagtatgccagttcgaggggtaggcgcgaagctgccagtgaggtgtggggcgggggacaaagcaacggcacagcgaggtcgtcactgcggtcgggcaggatgtggatcgaccgatttgatttttttccttgagagaagcagtctatctctcttcctatcctgacatgtgggcctatggataaatccgtctggccaagttgggaagaggaaagaaaatatgagaaatttgagaaactcgggaaatagataaaagtggcatggaacgaaggaattcacgcttctgattgcatattataaaagcagtcaaattgagtggcatatcctgaaatagtgcgaattatatggccttttttacccactaatgtaactttctaaaggaccacacttattacagtacaacattcttgcacttttgtcagggcatctgtcacgcccagaaattcacgaaccagaatttctaagctgaatgtgcattaaacccctgtctaggaccagccagggtacacaaacgataattgttgacatacaaatcaacgtcttacaaaaatagaaaagattacaaatgcagcggaaaaagataaaacgagctagacttggaagcttgaattctgcagcggggcgactccactccacaggcatcccttgatggcagcgacgaaaccaacctcaacaagacgactccaactatgaagatcttcagctctggtgtgggggaaaagagagcaagactgagtattacccactgtactcagcaagtcataccggaagaggaggtatgatgcaggatatatccaaaggaggctaaggggttcctttgcaataaagtagtcatttaaaagaagtagttgaaagcagtaaaacaattgtagtaattaagcagtattaaccaatcactgtccaacgctacaccacgttgcaacaggcccaaccaaccacctgaactacaccagttcattaagctaagctagagttgagactaatcacggtgaatctggttgatcgcccataaccgcgggcacggctattcgaatagttttactctggccagaggtgtacaactgtacccacaagacacgattccatacatgtcgccatgccccgaagtatcaccatgatactgcaaagggggggaaatcgtgacaagaccctccgcataaccctcccctaaccatccacaccacgctaaggtttcacccctacccctcaaaaggcagtgggcggtcccctcttgcgccgcggtgaatccggcagctggacaaccggacaccccgaccgacccaactccatcacgcccaccctcgccaccggtgcctaggaaagggtcgagctatacttcagatcaagcagttacccactcccgcttgtggtaagcacggtaagtctcccagggtttcccatgaaccggtccttaattgccatgggtgcgaccagcgaaaccatgcacccacagcccaccattcagtgtattttaattaacaaacaccatttcggtggcactaatctaaagctatgctaatagtcaaagtctatgtaataatgtgatccccatttgtgtactagttgagataggcatggctaagcatttcctaaaccaacatctagtcattttgatacctagtcatcaatggcataaggtaaacaatatatggctgagtattaggacccatcccacatgacattataaaagaatgtaacatttaatagaaatgcgggatatttgtaaattgggtacaatatgatcaattgtaatgcatgacttgccttactctagcactgatgagaccacagcaacgtcttcgagaaaccgcggatcaacgaaatagccgaaatctacgcgacaaacaaagcacacaagcaaaacatgctataagactactgaaacagagaacaaaaccatttttaatagattctatggatttttatgaatttactgagacttgaatggacttaaacggagctcggatgaattacttatgaattttagaagataaactatgtttttactaataaagaaaaaggcctttattaattattgcgcaataaatccccagggctgacgtcagcgaaagggggggggtggctcggtaggcggggcccatgagtcagcggctcaaagggggtggtccaccgtggactgggtccacggggccggggtggtggtgtaccacgtggcaccacgtggctggccacgccagcaatgggatgaacggccacgatcggccgagggccgatcgggcggctggggacgggcggcaccaaggccagcccgggcatggcgcacggtggcgaccggccggcgacgcggacggcggcgcagtgcgacgacacgcatgcggggagaagcggcgcgcacgagagaggagaggaaggggaagaaaaaggggtcctcaccggaggggcgacggcgaccggcgcgggaagagacaagcggcggcggcgcttcggacaatggcagatggcgtcaggcacaacctgtgaaaggcgatgaccgggttaggaaaaggggaggatgaccacggcgactagagcggccgcccggagtcaggcggaaatggagagctcaccggcgtgcgagggaagcggcgctttggcgacgtttggcggcaagcgagcgacggccgaggtagctctcgcggcggcggaggtagcggcggtggttgcgcagcgcggcggcgagcctagcagcgacggcgcaccgccggaggtcggcggcgggcggcggagctcggtgtgacggcgcaggcgcggttgggggcgtgggagaggacggcgaatgggggaaacgagagaggggactcgggggagtgattttatgggcgcggaaggagcggaaacgggcggggtggccctctatttggccggcgacgtgggggtggagagagagagggggtgggattcaaaatcgaatcccgcccattatcgggcgcgcgtgcgcgggagatgccggggaggggagagggcggtgacgtgggcgcgaaatgcatgcggagtgggggcgcggagaaaggccggaaacggcggtggcgtgggcggtttcggcagcagtggcggttgccgccggttggaggaggaagacgggtccgacaggtgggccccacatgtcggtgacccggggagaggagggaggcggcttgggccggcccagcaagaaggatgggagcacgagagagagatgggccgacggcccatcaagagaaaaaaggaaggaaaagaaaaaggaaaaaggaaaaggatttttctaggattaaaattgcacctcgatgattttaaatggttaaaaattatttatagggctctgaaaattccgctaaaatcctgttaatgcattgcgacatgtggaacccaagaaaaatctcacaatgccaattccaattattaattgcatttattaattagggaattagctctaggttaattcaaaccatttcttcggatgatttatttaacaaattttaaggaaagaagaaggggaaaacttcagggcgtgacaaacctacccatcttaaacggaatctcgaccccgagattcggaagagctggcgaagaggtgcggatgggcggccttcaactcatcttctctttcccaagtggcctcttcttccgagtggtggctccactaaactttgcagaatctgattactttgttcttggtccttctctcactagtttcgaggatacgagtcggcttctccacatacgtcagatcttcctgaatttcaatgtgatccggacttgcctgttcctcaagaactctcaaacattttttcaactgagagacgtggaacacattatgaatgctaagcatgttggagggaagcttaagctggtaagcgacttcacctctacgttccaaaatccgatatggtcgcacaaagcacggtgccacctttctttggtttagaagcggtgtacttccccgtgtggagtgacgcgaaggtacacatagtcccctgctttgaaagcaagctccctttggcggtgtctacatatctcttctgtcgagattgcg

SEQ ID NO: 28942 - DNA, 5922 bp, Oryza sativa
  unsure (1)..(5922): unsure at all n locations
ccgccttgagtgactcgtctgctatgcaagnagcncatcacttcttaggtacaccatgtaaacacatgattcttgccagataaagctctgctaacttcttccctgagtaggtagtgtgcactggaatgaagtgagccactttggtgagtcggtcaacaactacccaaatagaatcatgccccgatgacgtcctgggcaaaccggtgataaagtccattgctatttcttcccacttacattctgaaatctgaaggggctgtagcaaacctgctggcctttggtgttctgccttcacacgctgacagacgtcacagagtgcgacgaattcagctatttcccttctcacgctgacccaccagaatttttctttgaggtcttggtacattttggtactgccaggatgaatggaatactgagtttgatgagcttctgtcagtatcaagtcttttaattccttgttttcaggtacacacaatctttctcccatccagattgttccgtgttcatccttagtgaaacctcgggcttttccaactctcatgttctttttgagctctgctattccaggatcacttgcttgagctatgcgaacctgctccactagtgtgggttgtgcctctagggcagccacgaatccgtgctcaactataccaaggttcagctgttcgaaatcgcgttgaacctcacaacatagtttttctacccatgcaacattgtagtagctcttcctgctcaaggcatctgctaccacattagccttgccgggatggtagtgtattcccatatcataatctttgattagctccaaccatcttcgctgtcggagattcagatcaggttgggtgaagatgtacttcagacttttgtggtctgtatatacctcacaacggttaccgatgagatagtgccgccagatctttaaagcatgaacaaccgcggccaattccagatcatgggtcgggtagttgccttcatgaggacgcaactgtcgtgaagcataagaaaccactttgccatcttgcatcaacacacaaactagcccctagcgagatgcatcacaataaacctggaaatctttcgtctgatcaggcagaattaaaattggtgcagacaccaaccgtcgtttgagttcttcaaaactcctattgcattcagcagaccagataaacttttcttccttcttcaatagttgtgtcattggcttggcaattttagagaagttctcaatgaaccggcggtaatagcccacaagtcccagaaaactccgaatctgagtgactgtctttggtggggtccacttggtaactgactccacatttgctggatcaacggccactccttgagcatttacgacgtgaccgagaaactgaacttcctttagccagaagtcacacttgctgaacttggcatatagctggtgctcttttagcttttcaagtaccaaccgaagatgctgctcatgttcttcctcggacttggagtagataagtatgtcatcgatgaaaaccacgacaaacttgtccagaaattccataaacaccttgttcatcaaattcatgaagaaggcaggtgcattagtgagtccgaaagacataactgtgcattcgaacaacccataatgagtaatgaatgctgtctttggaatatcctcttcatggatcctcaacttgcgatagcctaatcgcaggtctatcttagagaacacagtagctcctttcaactgatcaaacagatcatcaatccttggcaaagggtacttgttcttaatagtaacctcgttgagtgcgcggtagtcagtgcacatcctcttggttttatctttcttttccacaaagataaccggagcaccccaaggcgacgtgctcgggcggatgtatcccttctgtaactgctcatcaacttgcttcttgacttccgccaactcgttggctcccattctgtaaggccacttgtggatcggtgcagttccaggtaccaagtcaattcggaactcgatatccctttttggtgacattgttgtcagatcgtccggaaaaacctatggatactctctaactacgggaatatcctccaacttcttagtggttttctccattgctacctcttgttcttcaccagcaacctggtttaaactgatcccttgcttctgcagcactggagactggaaggttaccacttctcctttcgcattggtcaacttgatggtgcggctagcacaatcaatcactcctctgtgccttgtcagccaatccattccaagaataacatctagatccttggattcgagaagaatgaggttggctggaaaaatcaacccttgaatttcaactgtcactgatgggcagtagtgagttgtggtcatgccacctccaggagtatgaactcgcattggtatcttaagcttcactaaagataacccatgtgcaccagcaaaacgcttggaaatgaaggaatgagttgcaccataatcaaataatattattgccggtgtcgagttgacgggaaatgtgcccaatatgacctctggagctgactgcgcctcctctgcagatgcatgattgacacgggcctgaacgaacttgagtccggcacgtcttggcttcaggcacgtacgtaccatgtgtccgggctcgttacaattgaagcagagttcgggcttttctccaaacttcttgggctgtcctagctaagctggcagagctgactgagctggaataattagtggacttggagtagggttgaggctgtgttgctcactgttgctgtgactgccactgttgtagttcttgctatagctacccgggtggtaaggacggtgctgccagataatcatgctggaaggtccaccctgatgtcccatcgtgaaaggaagcttctgactgatcccctgggaagtcctgagctgagctggcttcctcttacgattcatcttgttgcactgctcttcctgacggatagccttgtccacaagcttctcaaggtcctcataatccttggagatcagttggttggtcaattcatcatcaagaccagacaaaaacttctcttgcctctcggcatcagtgcgcacgtcctcaggagcgtagtgtgcgaggcggttgaactcatgcagatactctataactgtcctagttccttgctgcaaagaacggaactctctcttcttttgtgccacaattccctcgggaacctatgccttattgaaactctgacaaaactctgaccaagtaacctctgtcccagctggacgggtcaccatgtagttgtcccaccaaacagaagcaggaccttgcagctggtgtgtagtaaaagcaacattctcttggtcgttgcattgcaaaagattcaacttcttctaaagtcgcatggagccaatcgttggcctcgattgggttggtggtgcttgagaaagtgggcggcttgacacggagaaactccaacagtttggactgggcaggtggaagaccaaactgcaggttctgctgctgctgctgtgcttgctactgcacctactgttgctgcatctgttgcatcatcattgtcatcatctgagtctaattgtccaacacctgagcgattgttgggttctcgggcggtggagacagactgttgtcagacgtatcgctggcacgtgctccactgatatgctcttcgctgccactggtgttgttggattcacgggaaccattccttgtcttcaccatctgaagggggataggtagaaatatgaggaaaggaagaaaaacagggggcttagaaactaatctttcttataaatttaagtgcaattatcttaatctttattaaaacactgaaaaagaggcacgcaactcctaattaaggcagccataccactgacacatgatatcgaccgccgactaacccacaagcaacaaacctaaaacatggaaactagcaagcaaatagactaagcagacgataaagctaagggcggcgactctgaagctcggagcggcgcttgcgatcgaggaacaggtctaacacctaagatggacaagggataggaaccaatgcatgctcaaatccaaataaacaaagcaacaaatgactcaaacaaataactgagcatggtgatttttatgcatggaacatttttcatgaacccagatgaagatactaatgcaactgactaaacaataaattaatgcataaaatagatgcatagttataatgatacgcacaaaattgccccatcgaacatagacacgacttagtgcatatcacccgatatattcccgactgactgttgaataaactccaaataaaatttttctaaaaccctagactgagctaattttaaagatccgatctgaacgaccaagatttttcccacaaaccaaagaggcaaaaccccaaattttcccgaaacaaatccaagtgcaaagagcatatgcagatgaaaaaggggttcagagggctcttaggtttccagttggcttgtcctacggtcaaggtcggctctgataccaacttatcacgcccagaaattcacgaaccagaatttctaagctgaatgtgcattaaacccctgtccaggaccagccagggtacacaaacgacaattgttgacatacagatccacgtcttacaaaaatagaaaagattacaaatgcagcggaaaaagataaaacgagctagacttggaagcttgaattctgcagcgaggcgactccactccacaggcatcccttgacggcagcgacgaaaccaacctcaacaagacggctccaactatgaagatcttcagctctggtgtgggggaaaagagagcaagactgagtactacccactgtactcagcaagtcataccggaagaggaggtatgatgcaggatatatccaaaggaggctaaggggttcctttgcaataaagtagtcatttaaaagaagtagttgaaagcagtaaaacaattgtagtaattaagcagtattaaccaatcactgtccaacgctacaccacgttgcaataggcccaaccaaccacctgaactacaccagttcattaagctaagctaggggtgagactaatcacggtgaatctggttgatcgcccataaccgcgggcacggctattcgaatagttttacgctggccagaggtgtacaactgtacccacaagacacgattccacacatgtcgcaatgccccgaagtatcaccatgatactgcaaaggggagaaatcgtgacaagaccctccgcataaccctcccctaaccatccacaccacgctaaggtttcaccctcacccctcaaaaggcagtgggtggtcccctcttgcgccgcggtgaatccggcagctggacaaccggacaccccggctgacccaactccatcacgcccaccctcgccaccggtgcctaggaaagggtcgagctatacttcagatcaagcagttgcccactcccgcttgtggtaagcacggtaagtctcccagggtttcccgtgaaccggtccttaattgccatgggtgcgaccagcgaaaccatgcacccacagcccaccattcagtgtattttaattaactaacaccatttcggtggcaccaatccaaagctatgctaatagtcaaagtctatgtaataatgtgatccccatttgtgtactagttgagctaggcatggctaagcatttcctaaaccaacatctagtcattttgatacctagtcatcaatggcataaggtaaacaatatatggctgagtattaggacccatcccacatgacattataaaagaatgcaacatttaatagaaatgcgggatatttgtaaatgggtacaatatgatcaaatgtatgcatgacttgcttactctacactgatgaaacacagncacgtcttcgagaaaccgcgggatttccaaaacccgggaaaaaaaaaaaaatacccgaatctacgcaccaa

SEQ ID NO: 28943 - DNA, 891 bp, Oryza sativa
tgtaaaataaactacgacaaaatacaaacaaattcaacttcaaaattaagttttgaaattttaattttagctttcaagcataagagagactaagctgatattgtttttttattagtgttattatataattgcaccgtagcgttagcacgggtatattactagttttaattaggtaaagaagagctactgcactagtgcaccacaaatgtgaagttgtaaactaactagctgcctgtataaaagtctgatgactttgtgctgctatttccatgaagcatggagatacctttgcagtgagagtctggcagttgttcctggtgcgctcaaagatatagttgtggttccggtccagagagtcacgaacggagatgagaccaaacacatctattggccagcgtagaatacctttaagctccgtcacctcaaaagaaaaaacctctagtaaatctaggagcattgcgaaccagggcggttcctccgtgtaccgcatgggaccaatctcagttgcatccatccaataaaccatatcaatcagtcaagcattattgtttctttttcctttgcaacacaccaaagagacgagccattagatcacattgatgcatatccatgtgaaaaatgtcaatcccaacattttccattttcatgtttccatcctcactattgtgcgcccaggctcccgcctaccataatcagcgagtgaacatgtcgatttgagatgaaaactaaaaacctaacaagaggatgagcgaattcgtatttaccataaaatcatctctaaaacaagaaaaaagaagcttcctcacttcttttggcgatgtcgccggaatcgtcggaccacagattcgtccagtagcggcgatagtgggagagctcgttgagcagctcttc

SEQ ID NO: 28944 - DNA, 683 bp, Oryza sativa
acgttccggctcctgagtgacaatgtattcaacagagaagtcagacgagggaggggaatgcataccatcagtggcatcccaatcccagctggcgccctcgtcgaacaccacgtcgcgcgtcacttgaacacgacccgacttcgggtcgaacaacttgtaggctttggatccctcaacgtagcgaggaagaccgtgggcttgttgcggtcctggagcttggtgacatgcggccgaacatccttgacgtacgcgagacacccgaacgtgcgcaggtgcccaacggccggcttccgcccaaaccaagcttcatacggagtcttgttgtccaagcatttggtcggcgcgcgattgagcaagaacacagccgtagtgactgcctccccccagtagcacgccggcactgacttggccttgagaagactctgcgccatccccagaatcgtctggttgcggcgctcgaccaccctgttttgctggggggaatacggcgcggtgagctgtcgcttgacgccgctctcggcgcaatgcgcggcgaactcggcggaggtgaactcgcccccattgtcggtgcgaaggagcttgagacggcagccagactcagcttcgctgcgggcttggaagcgtttgatcgccactgccgcctccctcttgttctgaagcagtgcgagccacatgtagcggct

SEQ ID NO: 28945 - DNA, 539 bp, Oryza sativa
gttccgattctggtggtcttatgtcagtagatgaattactctatgcgtagacataacttatagcccgcctcctatcagtaaattaattactcacaagttagatttaaaaaattttgatcgagtaaattaatttcggtattacatcaatgatgtgatcacacatgcaatgtggtacatcggtagaataaacagaactaattaaagatcacaacagctccagtaaaaaaatcacaacagcaacaccactgaaggatacggtgatgaagattgatgccaagactaatacgacaatatagatcaaggccaatgatccatctacgcatgcacgaatccaacaagcaagacaacgccaataaaacaaatcaacgttgagccgacgaagtgctgcagattctcaagtcctccctgtcgacagatatctgtcaccacggctctggagaggcattctcatagccatctggataaaaaaaaaaatgaaggttacttctaagtatcacaaatcagcaaaataaatatgatttcacttaaacctagtattt

SEQ ID NO: 28946 - DNA, 752 bp, Oryza sativa
tctgtattgaaaatactattatattttgctataagcttggtcaaacttaagataaatttaactaagaaaaaagtcaaacgacttataatatgaaacggagggagtatttgaactagaagtcccctatgcagtacggtaatgcttaaacataataaattaaggaaaaagtacgaattaccccccccccccccgaactatcgcggtcgtctgaattacccccctgaaccacaaaaccggacattcttcaccccgaactatgcaaaccggacgaattacccccctcgacctaatccgcggtggttttggtctacgtggcatacgcgtggcagtccagtcagcattttatttattaaaaaaatgtgggacccacctgtcatactcccatccaactattcctctctctcttatctctctctctctcttctctcactctcttctcactcacgcgcatggaggcaggcgggcaacagggagcggcggcggtggaggcgagcggcgggggatgaggcggcaagcggcggaggggtgcggcggaggaggtgaggcgaggcggcaacggcggaggaggaggcgagcggcggcgggagctcgcgctgctcgaggcgaggcgaggcgaggcggcggcggaggaggcgagcagcggcggggtgcggcggaggaggcgagcgcggcggcggggtgcggcgaaggagacgaccggcggcaggggcagcggaggaggcgggggagacggcgtcgcgggccacgtggag

SEQ ID NO: 28947 - DNA, 676 bp, Oryza sativa
ccctagcgccgtgtgccctagctttgccgtctccgccgccgctccagccgtgcgccgccgtcgtttcagccgtcgccgtcgctcgggaagaccaccgtcgtgctcgccaagtcgtcgccgtcctcgtctgccccttcgccgtcgccggagatcgtcggagcttcgtcgccgtcgtcaagccgaagagcttcgccgcttcctcctcgtcgccgtcgccgtccgttgaccttccgccgtcgttttggtcgccggtgagttcgccgtgccgcccgcttcgtcttggtgccctccgtttgcgtcctcgcgccgccgttcgccggcgagcgtgcgccgttcgagccgtctcctccgccgagccgccgctgtcggtgacgtcaccgctgacgtcatcggggtcgtccgccgtgagccgccgtggacccgatcgatctcggccgtccgttttggattggttcgatctcggccgtccgttcgtgtgaaccgccgcccgtgcgcccggttcaccaaaccctagcccgctgacgcaataaaccctcttttccttttcaaaaataattcattattgcgtcataattcaattttaaccgatataagtgttttaatccgatttaatctttaaaaattcataactaattcatcttagctccgatttagttggttcaagtctctaaatttt

SEQ ID NO: 28948 - DNA, 626 bp, Oryza sativa
cccactgaagaggcacgccaattcatacaagattatggtatgtgcctctataatctattgcaactatattgttattttcataattacaaataaaattgacgataaaagattttttgatgaaagtaaggtttatttatggtgatcagtgaatgttctattgttatgtccatcagaaatttttgaccgtggaatgtatgctggacctgttggttggtttggaggagctgaaagtgagttcgctgttgggattagatcagcactactaggaaaagtaagaaaaaaatgtagtcagtacgattgatcatataattgggatgtgatgtttttttgtcaaatatgtccatgttgttaccatatcctaagggccaattagttaccaagctgttgtttgttctagggtcatagcactttagtttatgctggtgccggaattgttgaaggtacaaatccatcctttgaatgggatgagcttgacctcaaagcatctcaggtattattggtctaactcatgatggattactgctatatttctttttttttaaatgctaatgcatcccatttccaattattttcagtttgcaaagttactgcagtatcaagaacaacatatttgcttgcaagaggct

SEQ ID NO: 28949 - DNA, 688 bp, Oryza sativa
ctaaaaattgatttagcacacacttcaatgaatactaatcagcaagatactggaatataaagtattatgcgtgtagagacctcttattccatcctcaatagcagaaattgcaccaacatagtcagtattgtagcctacaagttttccattaggttttctgatgattgtattgacagctccaatgtcctggacaaaattattgcttacaaatgttactctggatttattgaagggttcaagaatatcctaaatggaaaagcaaaaaagcagataaaatcaccttggcgataggatcaacttcatcacagcacctaacagcagcttccttatggggaattgtgcaactgcagtccaaataattagatgaaatggataatggttatacacatggagtattagagcatggggtcaagaaataaaactgaaacagaaattgtgtacctaaaaccagcaaactctggtgaagagtatgtattaagaaagttagccaggtcgttcaccaaaaagggcacatatacagcattgagacccactgatctgaaagcttcattatgcaaaattgggcttttactgtggcccaacaggttttccgattataccatacaccttagtatctggaccaatctgttaaatattgaacacattaatcaagtctgttactgtgggctgagcaggcccagattctttt

SEQ ID NO: 28950 - DNA, 5530 bp, Oryza sativa
  unsure (1)..(5530): unsure at all n locations
ccttatttgatctttgatgcaaccaatctccaaacaagctttccttaccgatctttcatgcaaccatctaggggcaaaaaagaaacttgtccaatacaaaaatgtaatacaatttgacaaagtttgagttgaaaccatctcacgatctacccataaatataacggtgaactcaaccagagactcacaaacgagccttgtgtgctgtgatcccagctgccttcattgcgtcaggattgtccaaggaattcgccagtgctcggaatttacaatcaaccactgaaaaataaagatgatgacatttcagttttttttctctccactggcaatgttagatgttcgcaaccattaaattattattacaagcatttaacaggttttgcagccttgataacatataatctctctacgaaggttgcgctagaatgtatctttgttgaacaccaagctaatcagaaatatggtataatatgtgaacatactgatactgaatcttcacaatcaacagggtaattgcaataaaatggaaccaatatccgacatggtttacaaacagcggtttctaaaagttaaggatgaactagaaccgattttgtagacattatgatcgaagggaaggttgctctttggacaaaccttactgtatctttgtcagaacaatatcacgcatcaagctatctggagctgtatgacgaggcatatgaaaaataatgtaagacatactactatagaggagagcttgtgtgctggcataaagaaaaggaagaaacaaatgtaaatacctggcatgcctgtaaaatgctcaaattgacccattgcttgccttatgaacatctccaaaccgctaactactgtggctccacactctgcggcctctcggagaagtctggtctcttttggtgtatacaccgcgtcgaagacaacggcataagatttaagtgcttgctgcaaaattatgatttgtcattacatgtagctatgaaggcagaaggtactgaatacaaatgtcatcaagtaagtctaattcagaaccttggataaaggagtttcattgacatttggatgcattccaattgcagttgtgtttgcaagaatcatttcttcctctggatggtaattttccaactccgccaaagtcagagcaggcgcaccaagtaagttgccaagttcttgagcacgcgctggaaaatagaaggcataaatatatgttgagttcagaacatcatgctcattgtcctatcacacctttatcttaacaaaccatttggcggaaaatacaaatttaagaaaaagaaacactaacaaacttaagtacacaataaatatcaattaaaagcccgtagtgcaaaggtatcaactgttccgtggagcaccccaactagattgctccaaaccaaccaacacatgaatataggcatgggagcttttgaagaaaaaaaaactagtgtaaaatcatatgttctccatcagttataaaattcaaatttgaattggatctacatatccagaaacaaaatcaagtgtgttcgaggaaaaaaaaatccagaaacaaaagggacaaacctcagtgaacaatttccctttttatttttcagcagaatttttcctttttatttcctgatgtgtaattttaaattttgtggagtgatggagtacatcaaactctatgctaccatttttattttcaaatcctcattatgactatttgcgcgtgttttggttggtatggagccccaactaacgtgttcaatggagcgctagatatcttgtcagcatgtactagttatagccagggtagtaattttggacccaaaaggtctgagcatttttacatgaccttgctacgaaaggttctcaatagtgaatacttctcagaaacaacacactttttttttgccgggacagaaacaacacactcaaaattattcaaatggaatggcactgtttatggttaaatttaaatcagtataaaatgaagttatggaaaatgtgcataccaaaagtacggtttgctattacaactcgtgctcccttctcttttgcaccataagctagtgctttccctgcaccaccagctccaataacaacaaaaagcctcccagccaatggtgaagtggtagtatccgttggttgcgaagctaaaaattgatttagcacacacttcaatgaatactaatcagcaagatactggaatataaagtattatgcgtgtagagacctcttattccatcctcaatagcagaaattgcaccaacatagtcagtattgtagcctacaagttttccattaggttttctgatgattgtattgacagctccaatgtcctggacaaaattattgcttacaaatgttactctggatttattgaagggttcaagaatatcctaaatggaaaagcaaaaaagcagataaaatcaccttggcgataggatcaacttcatcacagcacctaacagcagcttccttatggggaattgtgcaactgcagtccaaataattagatgaaatggataatggttatacacatggagtattagagcatggggtcaagaaataaaactgaaacagaaattgtgtacctaaaaccagcaaactctggtgaagagtatgtattaagaaagttagccaggtcgtccaccaaaaagggcacatatacagcattgagacccactgatctgaaagcttcattatgcaaaattgggcttttactgtggccaacaggttttccgataataccatacaccttagtatctggaccaatctgtttaatattgtacacattaatcaagtctgttactgtgggctgagcaggcgcagattcttttcctttttcaagagagccaaaagtaaggtatcctccaaatttggggcagagcactcgagagataaaacctctatcattcatcaccagtccaatgattggcacctgcttttcctaattcattattcaaataaaacatattgtgaattaggaatcatattaaagaacttgagaaatgaagcatgggcatcggcatatagcataatatttttctcaaatgtgagaactcctgaatcaacaagctgtgcattttaagtccattatcctaactagctactctactctatcatgtcttaaaagttatattactgtatacttttgctaacaaaaataaaagaaagatgccttaggggatacactagagtcgacctgcaggcatgcaatcacccgtgatgatttatgtttcttatgtatgggaaattacaccttcattacagtccaactgtgcactaataatctgtgtgtagaagtagcaactattctaaccctggatactggcacaccttattaccgagagagccattttaccgacctgcttttgaatgaagaaatccttagaatgttagcatgttcattaccaattattgtagtgaggatatgctgataatagtgcagatttaactaaagtataattctcatcgacaacttagcgtttataaagctaacggccaacgagagactgcaagctagcgaggcaacagaaaacagataagtggattatattctcaatacaagaaataaataccaagacactaacacctatggatataaaacttgaatagaatcagatggtaaactcacttggcaatgtacaagtatttgaaacatttttgccacatcaacaatttcggtggcggtggttgcaattttcactatgtcagctcctgttgcttgtatctgagccaccaaattttcgagctcctctgttgaaggagtgttctcaaagttatgggatgaaacaataagcttacatgtttcaggtttctttccagaaatgagtttcataaatttgtcagcgacctgcgtaacaagagggttactatcaattgatttgttggtttggaatacacagctaacaagtacagctttttcaatactgatcattttacataagagtttatttcagtgatttaggaacttgacattgtaagcttaaactggcagataaataagtatcagtattgcaaccaaatgaaaaggaacttttgatctgggtaagaaactagacagacttacattgttcattccatttagcttaaagtaatgacaaatactaaatcaaatcgcaaatatctctttgagaagtttgcgcacatgaatatacataatcttatggttcacagagaaaatggagtgagggtaaacccaaccttaagctcaatatcaacatattcagcccccatttccattgccaatagaagcgcctcgaatcgtggctcgtcatcgccttcatattcacctccttcccacttcggcctacacaagaaaaatcaaaaaaaattgcttagctttttaaatgctgcaaacaatccgaaatgtccacaggagtaataaccagatgatacaattcccaagtgcctgtcttatgatgacagattcttccttctccattcagttctggtgaataaaacctattaatatctaaattcccaagatgcaattccgaattgnnnnnnnnnnnnnnnnnnccaccgagaagttctctaacatgtgcagtgcaattccccaccacaccacaccaacctcgagcgagggaggagggggctcacctgtaggtgacgagggcggggagcgggcgcggctgcgcgaggaggacggggaggtcccggcggggcgcgaagccggcgaggcggtcgagccggagctccgccacgtcggcgccgagcgccgcggcggccgccaactccgccgccatctcccgcggcgcccgcgccgtcgccggcacgcagagcagcgtcctggcccgtgccaccgccgccgcgccgacgggggcaccatcgccgacgccgacatcgccggagcagcaggaggaggaggagggacggccgcgtcgtgtggcggctatagtacggtggttggtggagtggtgggaatgggggttttatactctctcgattttggatggttttagacatttttttaagctggttttcattagcgtttttttttcaaactgctaaacggggtattgatatcgtaaaaaactcaattaattatgtactaatagctttcttgtttttgtgtaccgtatttaacaattatattcatcactaccggtgtggcacgaattcgatgtggcatgtgacaacaaagcacaccagatccaacgtgggataggagaggttgacacgtcagatgatgacattgtgagagcatgtttaccatagtaccataataggctcatgtatcatagaggtgtgaaaaccattacattcacattgttgacttattgtaagacaagataactgattttataaagataacgcttctagctaggtttgaatgtgtcgatttttattagatttgtagtatttttctattattaactttgagagtaaaactttcatgatggattgtttttagaaatatctctgttggtggctgtttatattcgtagaactacagccgcctaatgcttaccttgaagggaaagaggcgggctatgattttcttatcccaattaaccccaacagccaagctaagctattttt

SEQ ID NO: 28951 - DNA, 22404 bp, Oryza sativa
ttacattcacattgttgacttattgtaagacaagataactgattttataaagataacgcttctagctaggtttgaatgtgtcgatttttattagatttgtagtatttttctattattaactttgagagtaaaactttcatgatggattgtttttagaaatatctctgttggtggctgtttatattcgtagaactacagccgcctaatgcttaccttgaagggaaagaggcgggctatgattttcttatccaattaaccccacagccaagctaagctatttttgtaacctgttactaccttcatcctgaaatatgagtaattgacctataaatcaatcatgcatccaaatcttatcaccgtcatagccatcgaagccaatctgataaagactacgccacactagtaagggaatattcaatatggggcatccacgaaggttgtgacatctaggatgatgtcattgcattccatcctgaactaggttttacgtggagagctcaccttgagacacaaaggtgatagagagggtgaacaacatctgaaagaaaagtatgtgccatctatagacgtcacgattttggtgcttccactagcgttggcacccttgacctagatcgtagcatgtgcaagtgcaacctcctccaccctctctcgtgtgtgattattatgacgctaaaccaaacgtaccatgacaccatctagcgatttttcttatgcgacttccacttagtatattttttttcttatgtgagttacacttgtacataaatgttacttgtttgtaaacttaaaaaatacatgctacaagtccaaaaaaaatagcaagggaaaatccctacatccattaatagaaaatgaatggttgctcttttcatgccgtcgggaatggaagaggctcacgtccctctgactttacgtcagaggagctccgtctgccgggaatagccctttgtaccccattcttttcctttgtttctcttttgtatttggttgtgagttggctttgtgaggcaatatcctttaatcttaatacaaaaatacgtaaatcatttgcgtattttgtaaaaaagaaatagaggttaccagatccagctaatgagagataaaactaagcacaatttctttttttttcctcatcctaacaaccgatcaagagggtgctagattgggatgaaaacggagcggatagtttccgtccgatccggacaaaaacggatacggatacctttcggatcggataattctcggatagttcagatatggatacgaatacggatattttctcccggatacgaatacaaatatggtatcagggattccgtcggatacggataataattcggatatccggtgaacagtgctattcggatatccgcaggacccatgagacataccccatttttttctaactctataaccttcaatatacctttatagatttttaatagtagtttatctcttaacactagtccatactattaatattatttaaattttaaaaaatatttataaattatacctcattttatataaaatgagctaattatatatgttgatatttgtttctattagaagttgagttggttttcgtgttccgagaaaaaaatgtttccgtattcgtgtccgatcatattcgattcttattcgtattcgagataatccgtatttgtttccgtattcgagctatccatattcgttttcctatccggtaaaaaatatgaaaacgaatatggtatgagcattatccgttcgtatccgctccgttttcatccctagcgctagagactcgaagcatcccagagatagagaagcagagcaacaacttgtgaagcagaagttctccctgaagacctctagcatggcatccatcaacactgcaaaactaaaaaatagattcaacctaatttttttttacggggagattcaacctaatttgatttaaggttcaacccatcccatctatcaaaccaaacacacgattacatctcactaatttcttttacttttttccctcttttttcccctcttatcattttcccattcttttcttgtgccccaccccgagttttcatcatgaagggtgtctggctaggagcaagaagggggacatacaagggcagaataaaaaggacaggaccagacacgtggatgaaagggagagaagaggactggcttgacaaggataaaaggaaaaagaaggagaaaaaggaggaaaaaggagacaaagaggtgatgccatattgcatttagaaatggtgcataggggtgtgttcgatagcacaggttaccaaccggggcaacagtacgcgcggaaaacggagcggtctattaacgtgtgattaattaagtattagctattttttcaaaaatggattattttgatttttttaagcaactttcgtatataaacttttttttaaaaaaacgcaccgtttagtagtttgaaaaacgtgcgcgtgaaaaacgaggtagatgggttgaaaaaagaggtgccgaacacacccgggcgtgttctatacttctcctttttcaaattttactttctcatttttcacatgcacgctttctgactaaacgatgcgttttttttccaaatatgttctataagaaagttgttttaaaaattcatattaatcactttaaagttttttaagttaatacttaattaattaggcgcaaatgaatcgctccattttccgtgtgcaggggagaaatttccaaacggtacattcaaacacagctttagggttaacacagtctaaaaatgcattttttgagtttatcgatcaaatgtcacccgtaaaataagtttaagaaccattagcgtattttactcaaaatcgcatgtgactgttgcaagtacttacaagttacaattacatgatcacatcatctttcaattttctcaaccaagcgcccgcccaggcacacaaagaaacctgatgaactcaattcagtagacaaagatctgagatgccaattccctgctaggatggttcaaaagcaaaacccatctagcaattgcttggcaatgatcagtcatcagatgatgactccatcctctgcgatatcaaactcaccgcggcattggcagccgagaacgcgccgtggaagctctccttgtatgacagcttctgcagatctcccaccatcttcagcaagatctctcccaggtcagactctttcgccgtcagggactcgtagaatgaccgcgcagcggtgttgctgatgtccacattggctggctccgggcagtactcgtcgtcgagccacttgtgcagtgtttccctcagccattcggattcctgttgagaagtagaagttaatctcacatatggtaaacaccaagatttcataactgcaatggagttgtcatataggcacaagggacaaatcatctgtataattcggtatagggcaagcaagctgtggaatcaaacaacagggtttcagctaagaataaatgccatttgtgttaatatgatctactttcctattcaaatcataatataaaggttattcacaagcatcgttatttatgcatacaatgcaaagtttccaattaagcatcgatttcttcggaacaggccataggacatcatagcttgaatcagagaccacagagtgacaggaaaaaaaatgcattgttgcattcaaacagaagataaatgtaagcaaccagatgctcacaaagcgcatacattaacacattgtgatttcaggactagcataacacattcatgtgcacatttgttcactgaaataccataacatttcaagttgaactgcaagtaatctgacagggcactacaactacattatgttaaggttccttcagaaagcatgaatttgcaattcaaaattaaacctactaccgattactgaaccctagattagcagcagcgatatccaagaaaaggatgaaaaccacactaatcacccacaaagtcagctacagaatcgaggagatgggttcttggactggacctgcgctgctcctgcaggggtgagccaagaaccgggcaccctcagctcctgcacgcggctgtcctcctcctccccgccgccgccgccgccgctcgcgcgaggtgccgggagaatccgtcgtggagaggaggccgagaatccggcgaggttgagccgggaagcgatgagaggttgcgcccttgaggtgggagaggcgcggccatgagcgtgagcgaggagaggggaaaggacggaggtggaagatgacattttttttcccttttcttttcgcaggtttgtgttgttcagatattctgcctctgatattttctccttttttttcaattttcattttcagatgttctggcttaggttttggctgtagttttccaaacttttctattcattctggttttatttgcttgaatttgtatgattcaaatggaaattatgtggattcccgcatttaggccatgcacttttctgttttcgtttgcacgtttcctaagctactatacgttttctaagctactacacgtcgcgtttcgtgcaaaagatactaccatataaatttttcacggaatacctctctaaagcaaatttttaactttgtagtagttaatttattcgcgtataccctcaaataactatctagattatccaaatccatcaatttcagctatctagccctcaaaaaagccaattttgtttcctccaacataatatttttctaattttcattcaatcagatgtgtggtggataggtggttgcttaccacaagattgtcatccacatcaaacacaaacccatgagttcaggagctgcatttcctgtccacaaatctaccattacatcatctcattcagattttcatagtttcagaccatgaaaacgctgtagcctgtaagcctcctcagagacccaagagggatgaaccagtgactcttgacaagttattagtattaatttttcttcagcagtatacagtacatgaaatggaagtggcacagaacaagtggtctcaattaatttccctcatgtagcctttggagtacaaaaccctaccttcaatgatcaaggaaagaataaatggggtagcaggaatgactgaacatacaatacagatagaatgcaaagttggccataaattttagaagaacgtattctctcccgaaacgcaattgcgagatcaaaacatagcagcagccctttggcgtttccgaaagggctgatgaattgaggtgcatggtttttatgcagccttctccagcacgagcttctcgatcaggtttgctgcatcttgaacagttgcgatgtcctgcgcacttgtttcgtcgacagtgatgttgaattcctcctcgaggcccatcacaatctcaacctacaaaggagatttggcatcactgtaattgcgccgtattatcggaaatgctgcttttgtttggctgacagggattaccgtatccagtgaatcagcaccgagttcagagaattttgattcaccagtgacagcagttccctcagggagtgccagctgtgtcttaactatgttgcaaaccttgtcgactgtctctttcttagcctgctcaacataatggtgaatatcaacagtattccaaattggttctcactgttttagtgttgtctaacctagcaaattattactagtttccaggaaaaatggtagaagatttgcgctctttatctgactaactagataacacacattgtccatgaaaactttagctacgtcaaagtgtctggttcgtatttatagagtggggttagccttgatgaatctaggcatcaagaaagcacttgatcaagtgcaaatgaactaggcgcctatgcatcaatagaacaataaaagaaccatgccaagaactcaagatgaactcctatttaattatctatttactgctgattcactagatattccaaaatctaaactagtttggaataggtaaacaattgctccagacacctatgaaggttcttgaagaacacatgtgcataacagaaaaatgtgcaaataaactcaatacattggtagaacaattgctaataggagaaaaccttagcataccgagcagcaaatcttaaaacgaagctgacttggccttgaacgaatggacataaaacttattctctggctgttgaaggaaactgagctccgtctcgaaattacattagtcacctgaaatgcacatcaacaaattgctggtgtaactggaatattcatatgcacagaagatgatgagggtactacagtggaaactggaaagtatgaacatatgacatcaaactaacaatttttactttgctcaaacaaatgctagttcgctcaaaacttttgagtgcttgaacacaagattgcaatgcgacaaatatacattcagaccctttggtaaacagattacttcaagttttttttctactggatgctcccactgtcctcacaaaaaaaaagtgctcctactggatgagcaataaaaaaggagagtagattggcaactaggctcatttgtgaatctaaatgctcgctaacctcactgacaagaagctggaaaacaataaaaaaattaacataattaagctctcaaagccaatatatctacagcacaaaacatgaattatcactgacttttgacattagccccctaggaagcaaccagcacttgtaaatctctggtgaacagaacttatctggtctacggttagaaataacttaacatggacaatacacaaggatgccaaacttttcaatcacctctggtttcacgtgttgaaacctaggtatacatgtggaatcccatgaagcaggacactccaggtccaccaagatgcacatgaaaatattagtctacacttgtaacaagaaaggaccgacttttctattcaactgatgcatcaacattgatgtggagaagccaagtgttgataaagaatattttttaaatttcagcaagatctaaagcatgtgctgccatttgctgtccttaagtggtttctcagagcttttacagtgtcttcccaactaggctgcattagaattcataaattttgtcttaaaataagtccaacgggggatccaatccagttacagtgcccgtgttactttaactatgacaatttcggaatctttgcagtttgcactaaaataaagaggaaatgtgagcaattgagctttttttccatgacgcttaacttccatcaatctcaatccaaggctaattaaccttgtagcttatgtaaagcatttgaacctgcacaattgtaaattgtaatcacacttgcgcgataacctactactaagcactgcctatgctatactgtttttgacatgtactaatcatagacagattccccacaataggaataatatatgacatgaaggataatactacaagttttgcaatctgcatcaagcagggaaggaacctatcaagaaatcgagtaatgctacccagagaaactaatccaatcggaagctgccactaaatcatcatcatccatacatcaagccaatccaagccaagaaccaatccaaaagaatgaaaccagttcaccacccctcaaaccctcatgaatcacagcctaaaactcaacaaatctgcagaacaaattgcaaacccccccccccccgggcaaaaaaaaaaaatcaagaaacagggcatacatatgatacaccaggcaagctgaagtactgaacgaaccccaagaaatcaaaaagcagctacaactaaaagaagtggtgggcttagcgcagggcacaaacctgtccgggcagtcgccggcgtgcggcgggcggcgagaaggacgaggcggcggcggcgagggagtgcgccatgggaggctgggctggcagcttagctgaggtaggggctttcttggctcgcgagctagctaccacgcagacgcagtagtggcattatagctcaggtaaggagataaatagattgaatagataataggatagaggagagaacacagtccaagaaagcggtagatgcagcttgcgttgcgttgcctccatcaacgaaaatggcaaaagatgaaaggaaattatgctattactagaacaggggtgaatagtcaaagtggtcctccaaatttcatctgaggctcagtttagttcttaatgtttcaatctatccatattaatccttcaagttttcattttagttcaaatttatccttgaattaacaactctatttataagagaacacttatacccataatcattcacatatataagagaaaaattacatgcttgattttttatagataatacatagtatattatgtaaaacaaaaaaaaattatgtactagcaagtgtacacgataacaattgcttaagtttcatgtgcacatgttgaaataatgagaagtacatctgtaatgtatttattcatgttgactttctcttttatagtatatagttgtatacaaattaagggcaaaaatgatattctttaatagaaatattgactaaaaatagccatatgacatattaaatgggcccaaggatgatttcaagccaaaacaaatatttggaggagctatgtggacaaaatgaaacgtgaaggaccaaattgagcctgaaagggtcaattaggcctagaaggggggtgaataggctaatttaaaacttaagaaatgtggaagcagtaattttcggagctaggctgggaattttcggaacttccgaaaatgcacagagcagcgcacacacaaaatgaaaactctagatctacaagactataacaggaaatacaaggcacaatcagcaactagaccaatagcggcacaagcaagcaaagttagaggagagggatgaagaaatttcaccaagatgtagctcccaaagttgttccccggagttcaaatccttgaggggattctactctctgttgaggagctcactaagagccgggtcttagctaaccctttcctcaagaggttgtattaagcactcctcctttcactaagaggtatctcttcccttgcgaaggcgagatccggccttcacaaacttctcccggccaaccacaagtagatcggtggctcgggagtgacacctagccgtctaggagtcctcaacctccaaaagtaaaagatgatgcaaagaactcccggagatgatgcaagtgctcacaaatcttcacaaagaccacaagaagcacccacacaagctcgaatccacactctcacacacacaccaaatccaaatcaaacacgggtggagagatgaatcgaggaagcaaggctcaaatgaacgagagagagagagagcaagccaagggcataaataattggaatggaaccagcagccctcacaagtaaggggaggtgggtatttatacccacagcacaaatctgcccgttggagtgcaacaaaagggattttcggaacttccgaaacaattttcggaacttccgaaaattccagatttgagaaaaattgaagtcaacgcccattttcggaacttccgaaaatacttctgaaagtacttccgaaaatttccagaacgcttctgtgtattttcggaacttccaaaaatttccagaacactccaaaagagaaaagcttcgaagaaaaattgattttgagcacacgcatcactccttatatgtctatgcatcatcccccttaatagtatggctttcctacgacacaatgcgaggaaaaagatacaatataccatttgatcattgccgcattgcatcgcgatgtcgcattcacgggatatgcattgtattacaacgtgttgaggacttaacaaccttcacatttgcttgaataaaaatgttagtcctctctaatcgcattgtaatcaatcatcaaaatcattaggagcctagatgcacttttagagccttcggtgaaacttgagggactaaattagctattcaccctactagaatactactagtagcttgttgctgccaggcaccgttcttttcggcaacttacataagtacaactattcattaggagaggtcacatcccacatttttttcagagagagactagaggacaagatcctgttaggacgggatacttaaagtgactcctcccctttctttcctctgtatagctgagcttgcacgtcttttctccttgtcttgctagccagatcaacagaaggaaagggaggaaacacattgaggaggggaaggaatgagaggatagaagatggcaacaagaggttcgttggccgggcacgacgacgatggcatgcgctccctcctcacacctggtacctatgggtgttctggctggtacctggtaccttggataccggctggtctctaggtatcagaccttggtacctgggtaccatgcctaatacttgtgggtatgagccatgattcctccctccttacacctggcacctataagtgttctggctggtacctgataccttgggtactagctagtacctaggtatcagaccttggtacctgggtaccaggcctgatacttgtgggtattagccatgatacctccctccttacacctggtacctatgagtgttctggctggtacctggtacattgggtattagctggtacctaggtatcagaccttggtacctgggtaccaggcctgatacttgtgggtatcagccatgattccctaaggtaccaggcatgatacttggtatcagccatgatacctcctgataccagtcaagaatgacttatttccatggtggccgcctcgtctccaacgtcgttgtcgctcccttctccctcttcacaaccttggctcccttctcctcttcctcctcctcctcctccgccaccacccccataaccggacgcttctctagggcgcccacgagaccaccacaaccacctccgtctcccccaccttcgccgggagagaccctcatgaccggggagtagggaggaaggtggaagatggagagaaagaatcggagagaaaggaggaggagaaacggatctgtggagaagaaatggatctcgggtgtatcccgtccccacgagattccgtccactagtttttctcttttttctaggttgttttttttaacggagggagtagttttcttgtttttattatcaaattactataccgtacattctatgtaatatatatatatatatatatatatatatatatatatattgcaaaaaattaaaatcatataaatataaaaatagaatgctctcgatatgtaggttccgtttttgtaaacatatctccaatccgcctagaggagagatgtcttttattttcagatttgctaaaaaaatccgcctagaggagaggtgccttttattttcagattttttgtcaaaaaaatagtcgattttgtgacagtacgatttacattaaggcgccgttacggagagtcgaatggagaccttcgaagtcgcagacagagctcctaaccaaccgagcacggtattggcattcactttattgccaaaacaaattaatattgaattttgaagtacttatacactaaccacacccccacttacattcacttacacaacacttacactataattacatatgtaatttattcacttacacggcacttatacaacacttacactataattacatatgtaatttaggaacttataatgtaaatacatgctgactattttttggtgaaaaatatggtgccataaatatagctactccctttattttttgtttttaagggggaatcggatatagagttggatttttttagagacagaatcggacatattcttttttttttattttcttcctttttacccggtgtcggattcgtacagatccgatttttttttcctttttttcgcccatttttttggtcggacaggtttaggttttttttttcatccgaatttttctggatcggatagatttggttttttcgccctttttaatcggacaggtttgttttttttcttttattccgcctggttttttttttgataattttggtttttttttcatcaggttttttttgacgatggaagcacctcttattttttaatagtgtatatatatatatatatgtatatatatatatatatatgtatatatatatatatatacacactatactacaccctgatacattataactaaaatactccccctcacatcctacccccaccccacccctaccctaccctatacctcggcggcaacgaggaggagaggcaatggcgtgaggcgcccggcgacggcgacgacgtgctatagggatctaatgggtcaggcggcaagaacgggcatgtccgtgttcgtgcgaggaggcggggacggtttcgctcccgttcacgcggttgtcgccggcattcgtccttccccgccggtactcccgttccgctcagccacggcttcgacctccaccgcccccaccgggcctccacctccggcgtcagcttcctttgcgcgccccaaggagctccaccgccactggttagccccgtatcccgtcacccatttcctcctcctattcctccgctctaggtggcgacggtcgccgccgccgccccccgtgcttccggcgccgtcactcgtttccgcttctgtcgtccacgctggtcgtcttcttcgactccgttacctgacccgcgaaatccagggagctctcgacgttggtggacgaaggaagccgatggtacccctccctgacaccggtggctgcgtgaagccgttgtcgtggctctccggcaccggatctggtggctcggtgtagaaactgaacggcggcggtgtcaagaatcggcagcggcgaggaggcgcttccaatggtgtggaatgaaatcctccaaatcgatcctggaagcggcgatggcaaaatcaatcttgctgtgcgctgttctatttcttttttgcctaagggaatatataaggttaacctcttctcttggtcaccgtgaatcagatttgctttgcatcagcagttagaaccgattaaatttgttttttccttcatttgagttgctatggttcttgtggtgttgaatcattcccatcgccaagatgtgaacctgcagggtaaagaaggatgagatctacagataacccacttaattaggtattagcctgaactgaaaattactactcctcatctgatgtatatggcgaacttactagacaatcaggcttttgaatgttacctgaccacacattgttactaacatgtgctaattttagtcagaaataaatattgaatgttcagctgttgctccctgattggtaccccaaggagagcccaagcctgtggggatggccggatgggcgctgcccacgccgccaaccttcctcacacatccacaggagcaggtacgcattgacctggtctttttttcccatgtattattgcctgcgggttgatgagttttcttattgactttgagccatacagacgcatgttatagattttgttaagactatttgaaatgctcgatgagctagttattagtattctggggttttggagctcccagactcatcatataatagaaagatgtgagctttgttcaacagagcaattttcctaagaagatttatcgcttcgggatgttggatagttctagttttcttattttgcatcttactttttgccaacgaacggtacacatcttcctcaaactatggagaattcattggatagctgtacgctgaaatttcctggttcaacataacaacagagtgatgatggggacataatgcattagttcccaacccatatatatttttggtgcctgcattgtcaggtttcaggcttggagatttgtccttctatttatatttttggtgcctgcaaacaaatataatgttacatggtagccgatttgttagcaatttacttatctgtcactgaatcagaaccatgagcttcttgagattgctaaacctgttacaatgaaagttctttttggttagatatgtagtgcacacgttaccggtgtccgcatccattgtctgctggaggtccttgtatatgctcttcatcgttggatccattcgcttcttgggtttcttcgtgccggttcttgttttcttggcattgctttgctcatggaggttcatgttttgttgatgcattgtcatggtggtggatgctgcatctcagccttttgcatgattaatttcagattgtgctttcctttctagtgcagtgctgctgctagcatcttacaaggtcattaaactgtatgatggggggattggttcaattaagtatctcgttgattctcagagttattttctatatggaaaaaaatatgtttgctttcttttatggcaaagcaattcacaacagcaatcttatggctatgaaatactaggtttaagtgaaatcatatttattttgctgatttgtgatacttagaagtaaccttcatttttttttttatccagatggctatgagaatgcctctccagagccgtggtgacagatatctgtcgacagggaggacttgagaatctgcagcacttcgtcggctcaacgttgatttgttttattggcgttgtcttgcttgttggattcgtgcatgcgtagatggatcattggccttgatctatattgtcgtattagtcttggcatcaatcttcatcaccgtatccttcagtggtgttgctgttgtgatttttttactggagctgttgtgatctttaattagttctgtttattctaccgatgtaccacattgcatgtgtgatcacatcattgatgtaataccgaaattaatttactcgatcaaaattttttaaatctaacttgtgagtaattaatttactgataggaggcgggctataagttatgtctacgcatagagtaattcatctactgacataagaccaccagaatcggaacggaattcttgctagattcaatatgttatgtctatagtaatttctttacataaaagccaaaaccaaagaggggaatggatcaatatgtttcgtcgacagtaatttctatacttagaagccaaaaccaccaaggaggggaataaaataaaccgggagtaatttctttacctagaagccaacacaaaggaggggaacaaaataaaccagaagtaatttattttactgaagaaaatttcgtggcagccaacaaaataaaaataaccatcaaaaataatttatttaccgaagaaaaattcatggcaatattaatatgttgattataagtaacagaaaattcgtggcaagattaatatgttgattagtaatttatttactaaaagggaagagaagcagtgggaataaaaaaaaaggtgggaacggaaggggtgggtggcggttggcggacgagagggaagtgggggtgggagcagacgagagggaggtggggtgggagtgccgaccgggggtggggtggggtaggttgtgaggggagcattttagttattacgcagcctgggtgcggtttagcgctgccccacatatatatatacatatatatatacatatatatatatatatacacacatatatatatacacatatatacatatacacatatatacatatacacatatacacatatatacatatacacatatatacatatatacatatatatatttatttatttatttcctcacgaaatcaaataattccacttcctaaatttataataactaatacccaattaatcattagtcatgtgttaattacctgtcttattttacatgcattaaaaactactctctccgtctcaatggttcatgtatccaacgtttcaccgtttgtattactttaaaaaaaatatgaaaaaaatttaaaaggtaaaatttgctacaggacatccaaaagatatgtaattagctgtgggatgctgcaaagatgtgaatttgctcgaagccactctaaaagtgcggtaatttgttacaggacactggacacattaaaatataatatcaactgaattgatgagagaggaaccacgtaaatgacagtcttgcccttatcttcttccccatctctcgggccattttcggcctccaccgcctgcaggtcgtccctgttgctgccttcccccaccgatcggcgatcaccgccgccacgggtattggtggctattaaatgccaattctatgccgtcaatacctgcataaacataaagaataaagcatccaacatattgattaggtttaattctaatatattccacgagtgttggtgtatatgcgcatgcaggtaataaaccaccgaagttgggatgaaaatcagacttaagtggaggtgaaatcctatcatacaacgagtgggccaaaaactacacaaaacttcaacaaatgggccttccactcgaataaatagataagggagcatgaggaggagcaacaagcatgaggaggagcaacaggccaaaaagtgggactgttgggccaggcctgggttaggtcgaaccactcccacagcagtctgatctggggcttggcagggatggtccagatgactccctaatggcggttggagggtagaatggatatttcgccttctcccaaccgtcataactgccctatataaagacttcacctcttcacttcacacacacacttcaagcttgagttgaattataagaggctctattgtactttattgtatactagattagggagagagtagagtagaagaagccggaggagttccggagctgtcggtaatcctcttcttatttcttttgctctgttaattactctgattttaatagaaatatcttttgagtaatttagttttgtttggtgagaattatctcttaggttagttcctaatcagcgcgtgcgatcattgttcactgtaatccagtaaaatatagtgattgctttagtgtgtagctaacattaaagtaagttattactccctctatcccaaaatataagacataaccactcataacacaaagaccaagaaaatatttaatcaccttcttggttggatcaccttaatgcatgcaagcaatgtgattgagaggtttgatgatataagatttaaaacaaatcaatgttataagaccaagagatgctagttaatgtatgcatgcatgcacgccttatattatgagacatgagagaaaaatggctgtgccttatattttgggatggagggagtaattgcttagatgcggtgtctaggtagttgatctctggtgtttgctccgtatcccacagtaggtgtgagatgggtgtagaggtggtgacagccctcaagatcactaaagtcctctctgtccggatacatagtagagcgatatctgagagcggtgagctggccagtgtctgaagtatcacgttaggattaaagttaagctttccgtagacactgtttctcaccggtgaatcctctctatcctttgcctatccttagctttgtgtctttggaagaacctggtgaagagctgacacacacgttcactgtggaaatcgatacctgagactactcccgggtgaagtgttacatcaatatttttcgtgcgcttgcggattttatctgtaaggttaagaaataccaacaacgggcactcctctacgtgccctccaccactaccttccgcactccttggcgagctccagctccaccctcgccatctccgttacgcgctccacatacgcccgcctactgcatctgcgtcagtagtagtagtagcagcagcagcagcagtagcaacagcagcagcacgacgagcgtcgctcgccgctggtccacgttctcgctcgactcagtcgccacctccatgccctcctcctccccgtcgcgctcgcaccacgtggctggcgtcgcctgggcgcccatccgctctgccgccgcgccgcttggcctgcgggacttcaccctcgttcgctgcctgggcgccggggatatcggaccgtctacctcctccgccttgatggggaacatggcagcagctcgctgtcgctgtcgacctgtcgtcgtgcgagtatgccatgaaggtggtggaccgttgccacactcgccaagaagggcaagctggagttctaccctggtggcgacctccactcgctctgccaccgcatgctcgatagccgcttccccgtcgcgccctccaggttttacgccgccaaggttctcttcgcgctcgagtatctgcacatgacggccaggtttaggtccagaggtatacaagcagggatggcctgtaggtggtggaggccgcgaatggcccgagagaacggggaagaagataagggcaaaacaatcattttatgtggtttctctctcatcaatttaatggatattatattttaatgcgtccaatgtattgcagcaaagtaccacacttttagagtttcctcggtcaaattctcattttgcaatatcccacagctaattacatatatttttttaatatcctatagcaaaatttgcatattcttataggtccaccaaggcagttaacccacacaccaggacagaagttagagaagaagtcaacgaaaggggaggaagaacaggaagggagcccggcccaagcgcacaataatagcccatccacgaatcgtaaccccgacccaaaaaaaaaaaatttcctcgctccgagaaagttcaggctagggcaaaagccggagggggatggcggcgggggagggggaggcaacgacttgccacaagagatcggcggcggggcaggaggaggaggaggagtcgaagaggccacgcgatggcagcgaggaggaggaagagctgctcaccgacctctcccgctaccgccgctactggacggatctgtggtccgacgtttccggcgacatcgccaaaagaagtgaggaagcttcttttttttttgttttgttttacagatgattttatggtaaatacgaattcgctcatgctcttgttaggtttttagttttcatctcaaatcgacatgctcgctcgctgattatggtaggcgggagcctggggtgcacaattgtgggggatggaaacatgaacatggaaaatgttgggattgctatttttcacatgaatttctatcaatgatataatggctcatctctttggtatgttgcaaaggaaaaagaaatggtaatgcttgactgattgatgtggtttattggatggatgcagctgagtttggtcccatgcggtacacggaggaaccggtgcccccgttcgcaaagctccaagatttactagaggttttttcttttgaggtgactgagctgaaaggtattctaagctggccaatagatgtgtttggcctcatctctgtccgtgactcgctggaccggaatcgcaactatatctttgagcgcaccaggaactactgccagactctcactgcaaaggtacctctatgcttcatggaaataacagcgcaaagtcatcagtcttttgacttttatacaggcagctagttagttttgcaatttcacaattgtggtgcactagtgcagtactttttcactgcactgcaatctagagatgtctgctgcagttccgttaagaaattggatgttacttaaacagattagaacagtccaaacttatatgcacatcatggttccatttcacaaattatatgtgatagtctggtactagttgtatcacagaagcatattagtaaacaacttgaaatattcaaatgctcatgatttagaatcatgtaatggcatttcttttttaccaaaggcaaaacataaaacctgtgataacataatcaagcaaattttccaatctcaaactcccctacacaccagagcttagcaaattctcatgatatataaggggcaccacaaacatgtgtgttgctaacagaaacaactacagaaacattcggtgtgcaggcgctgaattagtacttcaaaataaaaggctaccaaatcatcaattgatagcacatgcaagggcacttccccactctgatttaattcatagaaactagcgttttgccccatatgaacttgcagaggctatcttttcttgcaacatctgtgctccttgcttcagtttgtctgcaagaactgtattcttttgccaatcattcaagtaggatatttaaacacacccctcatgaatgcgtgaatggtaaagtgagggtcaagaactttcctatggtcaaaagagatgctactctctcggtagtacaactgtcctaactgcagcaagacgaatcatgcatggattcatctccttgcagtacagcttgagcctaagggaaaacattttgcaaatatttaagggtaattaacactgcgagaacacacctgaaaggttgtaagcaggtcacagtaacagcaagtgatcaattgtgtttcaggtttggcagacatataatatttgttatctcatagccatcttcgtttctttattgcaatagccatcatgttttaatgggattgttgaatattgaacattattaatgccaatttccaagagcctaaggagatgcaatggtgatccaccattgatgatagaaaggaaattctttgagatgttttagggtagaggaaaaaaggtagcaccaagagtacagtttacccaacaataaactacaatttgttgtgatattttgacatactatgaatattctttatgaaaagctcctgaaaaaaagtgttaataaataatgattgtattaatactacacttctgtgacaacagtgcaatattaatttgtgagtgctggtcattaaagattcaagcaataaagatgaagttgtcaatacatatattaaatattaatcgtagatcatatatatgcttattttcctatgccgtatcaatgtgttcttgagcaaagggaaaatagaaattccaagttgagttatgcatagcatgctgtcaggctcacatatgtttttctattcataattatatgctcatgtttttattttgttttgacagttcaaatgtgccattcatattgttttgttgagtggaacttaggacacagaacgcaatagagttatgcacgtttgttcaccttcagtctagctagtttcatcttatccaataaatttggaaatatttgctatgttacatcgttgctaccattcctttccaattgttttcatgcagagctaagtggtggattgcgcatcattactattattcttatatttagtaatgtcatcagtgtgtgtaggattcatctctggttctcactggtccaagccgtgcagtccaattgattgaccctgttgaatttgaaattgagctaagagtcaaggggacaagtccctccaaagataagatcttgagcgctgaagcatttgggtataactgcattgctcagagactcagatgtggctcactccgcagtatgatgttatcaggagcacgcagcacattggagttcaagtatgcacacattcctttggcattggaggctacaatcaaggtcaggattactaggggttcaactgatttctgtggaaagttcattgcacatactgctagtatcaaggaagatgtcatattgctggactctggagaagaaatggtggctatctcccatgatggagccattaatttctcccgcagtgtagttgcagttgaaggaaatggcggagttctgactgttggtgttcatgcaaggcagagtggtggtgagaatatgagatgttcttataaagagtttatcccggtaagatgtggacggagtcatgacacacttgatgttggattttgccagatgagcgttgaagttgcttggtcgctcatcttttaatattgaaaaaagtctaggccctgataatatttttcttgcatatgacaatacttaatattcggtattagtagtggaagtaatagatgtgctccgtggcattgtaatacactaatatgacagtactgagtttggaccgggggcctcacgatccatgccattgtaaatttgctactctatatcataaaaatgctattattattcacctatttgtagatagtaaccatgtcattacaattcttttgaaatatgagacgacattttctacactctaaacgtagttggtctcaaatataggccactgcattttttttatatcatccaaaatgcccttatgtacattaggtgggccctacacgtcatcccctccatctctcttggagcaaggagtcgttgttcaccttgttggtgacgccgtcgttttgctccctcgcatgtcgctgactcgctcgtcttgcgccattggcggctagctttcttgattcaaaagcgagtaagcaatcaaacttcgccgcaacaaagagctactccctccgtcccaaaatattgtcctctaggcaaaggatagcgacaaccttagttggatgagggaggacgcgcgtaggggcgcagcgtccacagcaactggcgatatggggcgtgctccgggcggcaatggacgtcgctggtgaggggcggagtcaaattcaaatttgaatcgggtatgtaaactttgacttataaactttgggtctataaa

SEQ ID NO: 28952 - DNA, 4346 bp, Oryza sativa
ccaaaaaaggaaaccaggtggaggaggggggagggggcgcccaggggcgatcgatcgctccttagcatttccggagaccggtatggtatgtatgttaattagaggctatcacgttacaacagttaagacaatacggtctctaaccattaatataccaaaatactttattactagtcatctttcctttattagactcaatacaatgaaaaatttcctaataaatgctaagagttgactctatgccgttgttatgcgtaacaaccatatttctctttccttcttcctctctcttccacgtcaccaaatatgcttgcatgataataaagagagatcgctaataaagaccattgcacatgtcctaagaaatgtttgaatcaggttattttctaccattccattttttatttgcatgcattcatttctaaatgaagtacagtgaattacgttccatggatcatacaaaaaaaatcatgccccttaattatgttgaatcaattgctttccatgtacgcggatttagatgttttacctttttccgtgcgttgcaacgggaaagataagaaagtcgatgaaaaaatagagtgcagtcgacaaacggtgattggaacgaaagagggttagtcggctgatgacagtgagagacggtggcatgtcaaaccctagcgggatagaatgataggagggaacgcagattgtggaggcaagggttgcttaaatccatttgagattttgattatgtgtaatggtttatcgggacaaccatttgaaattacatcttagtagctgatggccatatttaatagttcatgacatatataaaaaataccattagagattctaccaggtaaagcttcggaaaatgtttcctcgactcattttctgggggtggctaatgggcgcgcgcgccggcaacgcgcgcaccagctggccccctcccccgagcgattttttttctttttctgttttcacgattttcttttttttttcgccttcccttttacgtattttctgattattttcttatcttcaacacacgtgttttcaaatgttttgacttgaaaatttttaaatctcgagttggaagtttttaaatctgaattgaaagttttcaaatctcgaattaaaattttcaaatctcgagttggaagttttcaaattctgagttggaagttttgaaattttgaattgaaagttttcaaatttaagttgaaagttttcaattctgggttgaaagtttttcaaatttgagatgaaaagttgaaagttttcaaaatttgactttaaaaagttcaaatttcgagttaaagtttttcaaaatttgactccacatatagatttcttttcaagatgttaaacaaaagctatccgaaaaaaaaatcttatgttaattgtcggtattatctctaactaacaggattagttggtacgtttctctgagaaaaaagtccggccgcgtgcgcgttggcagcgcatacgcgcggggtagcttttccgtcattttcttctatcggcgtgtgcccacatctcgtacctatatctgttgctccagtgtggttagtgtataggcggatctccgtttcgctagatctagtcaagctcaggtctacccgatccagctcgttgaggcagcggtagatttagtgatttaccgcacggctaccctaagcagctccccgggctcccaagcctacagctatcgagttgttcctttgtaagctggtgattttgcatgcaacgccacaccaaaccccaagccaggcaatgacggtcacgagtatcgccgggagtcatggaccttgcaatgcaacacacaagtacaccacatcagcacacctcttgacttggtgctagtttaaaaaaaatgtagacgagcgaagcagaggtgttcgactctagatgaggtctggttgtcaaatctctctctttttaattttttattctactaaaaaaatatctgtacgttgcaacgggtgaaatctattttaatattattattgttaaatggtttagttaagatgaaatttactgtgggagttcgcttggatatatatatattttttagaaaatcatgagctgcagttaggagtccgatcatctcaagttagtatgcgagtttttttaaacagatttcttatatgattccttctgtattatcaaaagtgaacgatattaaaaaccgattcaaatacggatatttatttccaaagcaaacgaacttaaaaactgactcatacacggatgacgtaccaaaataccggtaaaaacatatttaatttttataatagtagagatagagatataagtgacgagttccatggtatgcccgattgagattagtcatctgtgatgggtactataactaatctcgtttgactcatatgctgagccaaacctatctatgacgggccttatacttagtccgattgagataactatcatccgtgccggtcaaatgcccgattgagataacatctcacatcaatgatctttgcttagtgacggtagctcttcctggcactgattgagacctatcccatgctagtgaatccagtggctaacagaaggtcgcatcacaatcgaacctctgcgtcgtgactctgtggccgcgggataagcagcagtcagtcacctccccatcgcagaaggctgctattgatccgatctgatttatcaaaaaatcggagagaaagattttttttttctgaaacaagatggcatcgagtaatgaactgcaggggaaaagttgatgtttcacatgaactgtaccataaaaacagttttgcaaccaaacaagactaaaatttgctcaacaattaactcaccgtacaacaaaatcgcgatcagttccttcaagtaaacaagctcacagccattgcgtacaaggatgaagcagcatgctcaccggaggtcatggactcctaccagggccgatgcagccacctggcctcgtcctcctcatccaatcacgaaaagagaccgtgcgattaatgaagcaaatctgggcgttattatgtggaggcagtgagacgcaagagatccgttcgaatggagaaagaggagacgaagagatcgagtcggagaagcgtgggacgggacggacaggtcaggacgaggtgaagctgacggatcaacgtgcacgcctaccgaccggccgaaccgacgaaacaccaaactcctgaattctgatccgatttggacacacaatgactgacgaaaaactacgacaaaaacatcttaaacttttataatagataaagataaagatcttttatctatatatagatatttatttactatactaaaatgcatgctttcaatttgtcttttacctatcataaaccttagttacgagaacaatttctactcgtgtttgttgttcatcgttaagcttgcctaggttctagatccaccgctgcactgaggtatttattgatggagcttccataccgactacttaagattatagatggtgatatggcctgaggctcacgggccggcccgaagctcacaattttggcccggcccaagaacagcacggcccgactgggatcatgcccgtgccagcccggcccgatcaaagaaaaaaaatatagagatgcaaaatagacttaaataattatatagggaaaggcccaagacaagaagtatacaaaatagacttattttccagccatttaaacacagcccacggagttgaggaatcaaaaatagactttttctgtaaagaagcacgatgaaccatcgtgccttcaggccagcccagcacggcccgagtagtattgggccgtacctaggccgtgtacgccacccatgggctggcacggctcggcctggtgtgttggttgggccgtgccggcccgacaagcctcggcctaggcactgtcgggcttgggccgtgccgtgccgagcaacccacatggccatctatacgtaagatcagtcaatgcttccaactctatataaagcagttgtggcgaactctacatgggaaggtatattaaaaaccaaatagctctcaaacccctagttgggagtatccaaaagatatcgggctcaaaaatcatctccatctctaagaatatccaatacttgattaaaaaaactttaaaatctgtcatgtcatcactggttggccctactaaactgatttttctcgagtgcgtgcaggtgtccaaaactagctactatttggttggattttagatgtacctaaatattggggggcctcatttggaaacctgttggagggttgattttacccttaattcttaaaatttaacttttagggacaagattctcttggagatgctctttaccaatatcggctgtttatatcggttcaattt

SEQ ID NO: 28953 - DNA, 18562 bp, Oryza sativa
gcttgcttgctcccagggcgtgctcggatcagtgctcccgtatacgtggcacaatcctagcgtttccctgttttttttctcttgagtaaagtgtacgcgcggtccttaaacttatatgggtatgtcatctagatcgctaaactctcaaaatacatatccaagtcccagaacctatcatagtgtgtcatctaggtcccaaatcgccacaaccccttcaggatcctatgtggcgttgatgtggcatgccacacggacatgatatggcattattttgactgataaatgggacccatttaatttttttcctttttctttttttcttctctttttttccctttcttctcctttctctgtgacccgtgcagaaaaaaagaaaaaaaaagaagaatgagaagaaaacgaaaaagaaaagaagaaaaaaaaaggacacgtcacgtctatgtggcattgccacatcagcgccacgtaggatcctagaggggatgtgtcaatttgggatctaaatgatacactttgacaagtactaggacttggatatgcattttgagagtttagggacctatatgacacaaccctacaagtttaagaaaaccgaaaaaaaacggcatttaacactccaccgcttacagctacttcctcttttagatttctttatcctgtggcagcagtggtgaagggtagctggctgccggcgcccagaaaccggcgagcagagccggcgtggtggggcggcagcgagggatgagcaggaggaagctgcagagcgacgagtggtggcgcatccacgcgcggccgtgctggtacgggctgagcgatgggtatcgccgggtagtggctgaagacatcgttgctgataggtctgaaagggagcagtacaccaggatgtgcaagaacctatcaaacaacacttcgaagctctaaggtaacatctatgtattgtagaatttcctaagtaaatgaccgcaatcaagcaggggtccttagcagcatgatttgatctaaaacaactgagccttttcaattagcactatatattggtttctgacaataagatctgattgcattgcaggtttcaacttcagagtttacaacccacactctgctccacatttcatttctatcatgggagatgtcaaataattgttgtaatgatttgagaagacaagtagagaataaataaatgagtagccgaacattattcatgtactctgtagttgaatccatcaggagagaaagatatttttctcataaacagggttgatcggaagttaaaaatcaataatgacaaagaacatgagcatctatgtttaccttttgggtttctgctggatcatttatagtctcatccattgcttttaaattttggtgtggatattggtggcttgatggtgtataatcatgtggagatgtgcgggagaaatttgccgggggtgatgcttctgttggcgcgaactggaaataattttcccaccaaaacactgtgatatattgttaattacttgccgttaatgatgggattcacctgatatggttgtgggccaaggagaaaaagcagggaaacactaggattgtgccacgtatacgggagcaccgatgggagcacgacctgggagcaggcaagccgcgtcccatacgacacaagtactccgtatctgacaaggctggcgtgccgaaacgaaacaaaacaggttaaaggcgagtttatatataggaaaatactttacgtcgagcgaccggcgcgagggagccagatcggacgctcctccgcgcgcccctccccccacgtgtgtactgttgggccacccacttctctctccctttttttcacaaaagatgtttcacctagtgtacttataatgtttcactatttatagatctaatgttacagttaattaaaatactcttttgcaataaaaaacccacatattttggaaactctctataagggaatttggtttattttttgttccaccaaaaatgttttacctagtgtactcacaatgttttactatgtacagatctaatgttgcagtgaacgaaacatttcattgtaaaaaaaactcacatattttggaaaccctctattaagagaatttggtttattttttgttccaccgaaaaatatttcacctagtgtattcacaatgtttcactatgtatagatctaatgttgcagtgaactgaaacattctttcgctatttgctgaaacattgtttttatataaggtgaaacaatacccgatttaaacgagtgaaacattttcgatctacttagtgaaacaattccgatatatctggtggaacatcgtgcaacatttaaaaataattcaataataagctaattttttcgtcggaatatatccatatgtgatcttgttttgaagatttaattgcaacaaatttaatgatgcaatcggatcatgatttggataagtaatttaagagaaaaatcagtttaaagtagttttacatgtaaatcggacgctgacgtcagcgcccggttttaccccctccggattgggcgcccgaccgggagtcgtctccttttatatatatatatatatatatatatatatatatatatatatatatatatatatatatatatatatatatatatatatatatatatatatatatatatatatatatatatatatatagggaatcgtagatggattcggattgcgtaccaaaattcagacaaaaacatgtttaatttttataatagcaaagatagagatatagatatatataccatcggtcggttttctaaaatttagaattgagattagatgcttacgtacgtgccttgccgttagtcgttacaccgccggtagtgttgccggattccacccggacagaaaaacagcgatcaacccactattaaaaactagtaatttgcccgtgctaatgctacggtgatatttaatatgtctccccagacaaagtaattaaaaaattgtatatttttaaatttttgccaaagggagtagtaaatctagatggagcaattaatcgcatcttacgtatatgcaaaaaaggtaaattgtgaatatttgcaaatataccaatattataacgtgaattgtctcatttcttctccaaaaggaaacatctaatatatttttttatccacaaattgcatatacaaatacatcccgtcaatctcaaattcctctccataaatttatcatcataacttcaacgcttaacgacctacaactctctgtccatatctctatgtcacagacccccatataacccatcaacatattttcctggaggatatggacaactcccataactcattacccaagaagtgcacctaggtgacacgcatactgttatcctaggattgttgcagcaacatatttcataataacacagtaaatttcaatacatctatgcaacctcatttagcaggctcaccttttatactattataaaaaatattaatatttaacattacattacttattgacatgtttacacaattgtaaaataaatttaaaagcaaagtacaatacaaccatgcatttcacatcactgcacaaaattcttaatgagaaaatcgcacgagaaagcaattgtaataaaaaagcacaaaaaggcatattattcattattggaccatttgcttaggtgaacagtttggtgccatacaaatgtgctcccggcaatatgaaaaagtttggcacaatataattaaagagttacaactttttgaagagaatagaagaaaactcaaacaaccctcatggaatactgcctattcctcttttcgtccagtgccgcagttcctaattattcaattgaaccaccatccacgcaagagtactaatggcctcagcaaacaatgggagactgcaagcaaatcaagaagatagtacacctggtcactgcacaaatgctatttgctcaaaaacagagggctaaaagaatcagtcatatattcagtctaatttatatggtagcaccaaaaatgaaatatatagtacatagatatactgcttatagacgtgcaataatctagaccaaagctacatgacagatttggcactctcttggatctgatctaatatctctgcacaaaaaaattaatatgcaattgatgataattgatgtcaaaaagtggaaaactttcatcatacctctgatgcagtcccatttggcttgctcgatctggtttcagaaagactcaatttcatgattaaacaaaaaataatagctaacacttatgtctcttttcatcaccatgatgcatgggtgtttttatagtttattggagcaacttatctgttttacatggatgtagattgtattcttacttcaagttgcatttagttgcctagaacaaccgagtagctactgtagtgtttttcagaataatattaaacagttaaatagtaagaccatgtactttgtttttcgtggagtaagagcatgaactaacctatattgataatatgaccaggaaagaagagtaaatgagcagcttatgtgtaccattgacagttacttaaggcacattctttctcatacctaaatattgcttgctactaaacagatgaaaataagcatgtccagaaaaagaagcaaaaccacagggattacctcatacctgagttcataatctccctcactggtgaactggagaggcacaagcatttgtaaaagagaaggaaaggtcataggagccttctagcaaggtttgttgtacaggcctatcagtagatggcatcagattaatcaggccttcacacaattatgcagaaacatatagaaataattaaatgaaatggcaacctcgttacttccaagactccagccatttcttcttctccttacccagatcagatcagatcagctgaagagagcaaattaaagagaaaaagaagaaagtaggcagcctacctagatgacagttgtgttcaggaggagagggttgatatttgagaagcacaatccatcacaatatacattttaaaatcaattttctattcaactgaaactgatggttgaacttggacttgaacttgcaccacaaatatacaacagaattcagaaatatatacaatcttacccagctatgcacttggagttgaaacagatggttgtggtggtggttgtggggatcatgcgtcttggaattcaaattgcaatcgttttccttaaaataaatgtgataaaaatatttacactgcgacaattgcttacagattttcctgcaaaattgtagaaggatatgcaatcgggaaaagttaaagagacctacaaagctaacctaaagtaatgtaaatctttgttggtcatgagggaggcatcatgagggagacattgcaattaacattcctctagcagaaaatgcaagttaactgcactttttgtaaatcttctctaacgaagaaaataacttgagctattatcttccttcagaaaacttatcgcatatagcttgacctatgaacatcatatacatcaaaggctacatgtgtttctcatttctgtgtaaatctaatgacagatagtcaaacattcaagctagatctatccactgattccttcacatctgcacaaaaattcaaatatccaaaataaaaaaatacctgctggcgtgctgcagcctgcatagaggtctgctggtggcaattacttgaagggttgtgggcatacaggaggggaagaacactaaggaaacccagacgttcagattctgcatcaggttaagccaaaagaaagttaagttatgcacttctgttctgtttttctctagactttgctacaaatttagaaaggtattacattatttaacgacataaggacataagtgaatatctggatatgaataactgaatcagtttgtctaatgacatggagacatagttcagaaactcaggtaataacaccaagtagagtgcggtcctaggtggtcacacttaattgattcctccatagtatataaatggatctgagtttctaaattacaatcaagggtaggatgttggtaatttgaatagttcagctgcaagtgagactgtcagttctagtggcagtaacaaatggatctttgatccaagtattattgagctcaaatttactgaccatgaaatcgtcaataaccagatccttcatttggatattcataagcttccacaatccattgaatcctctagatccaggttctgtaaataaacatgatagagatatcaaatgggtgcatcacggcatctagtgctgtaagatgaactgatgcatattaacaaatgcaaaaaaaaaaaaaacatgcagagcagtccatctagttttgcgagaaagattcccaaggtaaaattgtactctgcacatattatgaagcaaatgtatcataaactatggcatacaaattttctttgcttatgcacatattgtgaagcaaatgtatcataaactatggcatataaatttttttttgctgaaattcttttgagtgcacgataatagaacattatatgactttcttttttcccagattcatttttaagagatttaattctagacatccagctgcagcactacagttaccacaaatcaccatgcgtaatagatgcatactgcaagctaactgagcgaggtacaatacaagttgatagagaaaatcattttggtgctctgaattcgctagcatgttcctttttaaagaaagaaccggttctgctctagttgacgaggatgagataaagaattaaccaactaaccacaacaattctcacagagattgaaatgatcagccaagcaaacgaagacgatctcaacccatgcctaaagatcaaacggaatacattggaatcagattagggtttctccccacaccaaatccctcaacgatcttgcccaagcaaaacaaaagatcaaacataatacattggcatcatattagggtttctccccgcaccaaatccctcaacgatcttgcccaccccgatctacaccggagttgccgcacgccgccgctggccggcgtacgggcggcggactggacggcggtggcgacaatggttgagcggcggaaggagaggggaggcgcatagtttgttggaggctaagggcggccgatctcgaccggcgtgcagcggcggactggacagcgatggcgacgatggtcgagcggccaaaggagaggggagcgcaacggcgtgagcggccgagacgacgcgcttgatgacgtctccatggtgttccggcgatgatggatcggcagcggcgccggcaggttgaggcggcggccgctgcggcgaaatagggttaggggagggggggagcggcgtgagaggaggaaaaaagcgtcgggggtgcggcggcggcgtgattagtgggcgcaggtgtgagggaacagggaggcgaaggcgacggcgcatgctatgcgggagcgattctggacgttggatatgagtgagataatcccaattccttctagatacacgattcccggcgcccgccgcacacggcctacaggtcccacacacggacgtcacgcgatgccgcgatctcatccgatgattttctctgatcacgcgatcacagagccgcgccgccgccggcccacgccacgcgcgagcgcctgcgcgacccggcgcccccatgccgcacgcccagtcccacgccgccacgcgcgacccggcgtcaccggtcatccacaagcttcatcgcaacaacatcatcatcggtcgcccatgagattcgttgttgctgctaccgcttgtctgcgaggttcttcgccgccaccggtggtcgtcggcgtggttcatgggtaatttagtgcaatctattcttatatatgactcgtactaattaagttttaccattttgcaggttaaaaaaagactaggcacatgagttctctgcttttagagacctttggtctataagcctcctgatgtcttgattcatctaatggtggttttcactgtcacatatgagcatgatgatccaatcatatactttcttttaccaggtctatccaatggtcctaattattgcagctaacatcgctcatcctcctttcaaaagctgctttggctgtgtttttttttttggaggggttgcccctcccctctgcacgtaaaatgatggagtgatagattaacgtatgattaattaagttttacattgtgaaacggagggagtagctataaaaaaattaaaaatgtattaatatgattttctaaaacaactttcctatataaacttcttgcgaaacttaaaaaacaagaaagataagttgggaactcatgagaaagacagccgtacacttgtctgtctgtaaaatgtgcctcaaggacaaatgtgccaacagtatgaagagttgcattcctacacttgtctgtctgttcagaacgaaagtacgttgattggcacattcaggatcgctcttccaaattcagaagcgccgcattacacatcattcttcctaaggagctcctgatcattgtagtacagctaaaaacgtactgcagagaaaccgaaaacgggaggagaaaaaaacagcaagtacgagaagggaggttcccccacttgagtaagtgacattggattaggccgatccttctccctcacaagagacattgctgaaagtacaggaagtaaaagttcatcctctccctccaaagactgttctgatccatcaagctacgttgacagttagattgttcgggcttgcagaagtaagtgttgcctgtagatcttctttgtactggctagttgttgagtgcttacttgcagtcactgcagttgcggctccggcgcatgctgttgcaggccagcaaacgcctcttctctgtaaaggatgagcagcaactcaccatctggttcacccgcgacaagatttgcatcatagatgtcgatcgggtgaagcttgtcaagctcttcctgaagatatccttcaataccatcatgctcccgtctccagcagtgtaatgcgaatgcagatatcaggctccagctcgtgattctctttcttgtaatgaggcttgtgatggttccattcacatataggtccatttggtgatagacaagtgctctgactgatctcaggcgtgcggcttcacaaaacatcactgctaagcgcgcaattgctttcctttggacatgaataagtgggtggtcgcgcggaagaccattgttgaagttcagtagtctgtagtatgaatcaagtacagacggtggccccactgtaacctcatccctgcaaaattgcaatgtttcaagtcattactaacttcttatagatcagaaacaaagacattataacaattttcatgtacaaagtacaagtttttcttggggcggtagccgcggtattcccaagtcattcgaggccatctgttctagaagaaccaatggttgagtatagtaggtagtaatatatgtcatcacttactaaaggataattaaacgttttgacagaatatccgtaggaaataaatgctaaattattatttcatttattaactgcccttactacagaatattctgactgaccatatctttaggaagatgagctttgatcttttacagatattcccttaaaacaaatgtacgcatcaaacattaagaaccgaataatattttggagaattaaatgtagtagaacataaattttgtgaatcttaaacatccaaataatttagaatattagaatataaaaatcagaaagaccccaatgaacttaatgtcgaacctagaggaaaaattgataatgcaaacttgaattttcaacactctcagtgtaaatttaaaatcatgacgaatcaaattcaatatttgaaagcaaaggtttgtatttttctatttctgttatatcaatgcacatatatattcttaaacttcggtttgataattcgatatttgatcttgaatgtgctttattatcattacttgtgtcaatccaatcctgatgcaaaattaatagaatcatttgtggaacggtagagagctagtagaattggtccaatgcacacttttatttatcaggatacatgtacagtgactaactagagctacacacagagagggaacgtaccataagaattaataggacgatatgcacacacgttcacaggtttgctaacatcatttatcatgttgcttcttttttttagctcaaaccacagcccctgtgaataacacactaaacacgattacaattttgtttaccagttgtccgcccctatagagtgttaagattaacctaaagtattgcctcttgaagggtaaaaggagcaacttgaaacaacttaaaagtacagctaggaaagctacacttaccagtcctgcagaaggtgaccatagtctgctttcaggtataagataggttgggcatcgagaatgtctggaggggtttctgcgtcagagaagttgaaccactgaccagctccatctctgatggcactcaaatatgcgtttctttggtcaatgagtatctgaatgttagaatttcaatggttactctaattgagaagaggatggcactcagagtagggcaattttctagttttttttattcacaaactcaaaagccatacctacccgagggaggttggatacatatatatagccatagctggctgctagcctattgttgcaccctcctagtctaaaattcgaaatttgaatgggatgctgtcctagagggcatccaaactgaataaagcataaaggaggcataaaggaaatgctaactgctgctatcctactaaccgcagctgtcctagcaactgagaaatatgctaaaggggtagatgctgtcctgaaaaggtgaaactacccaaaagcaaaaagaagaatcacgaccaaggaccacaaagacttatccatcattctccccctaagtcttgtgcgtcgtcttgtggggaagttgggccatcccgatcctggagtagagctcgaggaacttgatcctcccaagaggcttggtgagcaagtccgcaagctggtccttggtgttgatgtagctcgccttgatgctcccttcctccaagtagcttcggatgaagtggtacctcacccggatgtgcttgctccgttcgtgaaaaacggggttctttgccagagccagagcggacttgctatccaccctgagctccaccgctccagtatctttgccgaggagatcactaagtagtcgagtaagccagagcgcctgggtcgaagcggcagaggctgccatgtactcggcctcgcagctgtacagggccaccacctgctgcttgaccgactgccagctaacgaggcactcgccgaggaagaagagaatcccgctcgtgctcttgctggtgtcgatgtcgccggcgtggtcgctgtcgctgtacccgacgaagtgtgccttgccaggacatctcgggtagtagagaccgtggtcgagagtccccgcaacgtagcggatgatcctcttcacagcctgctggtgctccgctgtcggtcgctgcatggaccaactgacgtagccgacggagaaggccaagtccggccgtgtgtgggtgaggtagcgaaggctccccacaagacgctggtactgtgtagcatccacttcctccgtcgtgctatcacggctcagcttcagtctctcctccaccggagtgagagctgggttgcaatcggtgagcccagccagctcaacgacgcgcttggtgtaggcggtctgtcgaagcgtgttcccggagacatccgggtgcacctcaatccctaggtagaaagagagaggccccagatcactcatctggaaggtagccttcatctcctccttgaacgccgcgacctccgtatccttggtgccggtgattaccaagtcgtcgacatagacacccaccagcaaggcatttcctccattgccccgccggtagatggccgcctcgtgcgggctttgctcaaagcccatccccttgagcgtggacaaccatgtgatggacgccccaaccttcctgagcagccagcgcaagaaggagtcgcacggactccatccgtgccacgggagcgaaggcatcgtcgtagtcgatccactcctgctgcacaaaaccgcgtgccaccaagcgagccttgtgcttgacaatggctccggcttcatccctctacagcttgaacacccacttaagggtgatcgtgcggtgaccacgagggaggtcagcaagctcccaggtgcggttctcctgaaccgcgtccatctccgactgcatcgcggcacgccatgccgcatgtttctcggcctctgcgaaagaccgaggctcaccatcaccgcacgcaaggtgcaactgcgcctccaggtcgcgaggcactagtcccggcaccggctggtcgccgagaagatcctccatcgtacggtaccgtaactgctcgccgtcgtggtacgcgtcaatgcgctccccgtcgtgggagagcggagtagcgaactccaccgggctgcgctcaacacgagctggcgtcggagtagacgtgctcagaggagtggctgttggtgctggggcgcgtcgggtcgccggctgtggtggtgtcggcgaagagctcgtcgcagtcgaagtcgtggcccgagggtgtgttggtgtcggagttggtggaggctcggggactggggtagacacgctcggtgaagaagagctgcctactcccccagctccctcgaagtggacgtactcgacggtgaagtcgtcgtacgtcggagtcgaaccatcgtccaccgccttgtcccatacccaccctcgcccttcgtcgaacactacgtcgcgcgctgtgcgcacacgctgtgtctccgggtcgaggatgtgataggccttcgagccctccgcgtagccgatgaacacccctagggtgctcctgtcgtcgagcttgccgatgtggccaagctccttgacgaacgggatgcagccgaagacccgcaggtgggagacccccggcttgcgcccataccaagcctcgtacagtgtcctgccatcgagggccttggtaggcgagcggttgaggatgtagatggccgtcaccactgcctctccccagaagatggccggcatccccctctgcttgaggagagcccgagccatccccacaaccgtctggttgcgccgctcgacgacgccgttctgctgcgggctgtacggcgcggtgtagtggcgccaaatgccctcatcaacgcagtacgacgtgaattcagccgccgtgaattcgccgccgttgtcggtgcgcagcacgcgcagcttgcggccgcactccgcctctgcagtagcctgcgcgcgccggatggcgtccgcagcctctcccttgctgccgaggaccatcacccacatttagcgggagaggtcgtcgacgagcagcaggaagtaacgtcgtcctcctggtgtggccggtgtcactaggccacacaagtccccgtgcacgagctcgagccgctccttggctcggaaactcatttgctggggaaaggggagccgcctctacttcgttaggacgcagacgtcgtagagctgctccacgtggtcaaggcatggcaggcctcgcaccatctccttggcgctgagccgcttcagggcctcaaagtggaggtgcccgaaacgctcgtgccactgccacgcctcgtcgtcccgacgagcggtaaggcaaactggttgtgcgacctgcgcgctgaggatgtatagtcgattagtgcctctggttaccttggcaagaaggcgatggcggcgatcccaaatcctcatgagtccgtgctcgaccaacacgcatgagccgttctcatccagctgtcccacgctgatgatagagtttctcaacgcggggatgtagtagactccggtgagcagcatgtgctcaccggacttggcggtgaaggtgacggagccgacacccttgatctccacgccagaggcatccccaaacttgacagagcctcggacgctggagtcatgtgatgggtggcgccggtgtcgaggtaccacccatcagccttgtcgttgctggagctgttgccgaggaaggcgtgtactttcggctcctagaggtggaggaaagctgttgcggccggtgccgctgaagatagctcgatgctggcgtgtgccaggagtagagtcggctcttcctcctccacctgtgcgatgtgggcctggccagagtcgacctgcaggcatgcacgcgtcgtggctgtcgacagtctttggcccaatggccaagcttgccacagttgcggcaggcgtcgtctcgtgccggcttgtggttgctagcggcgccgccctgggcgcctctgcgagcgccaccctcggcgtgtcttcgcgtccaccgcagctggacgcctccgcgcgccttgcgcggcttgcggcccctctcgagggagaggactcccccttcttcccatcaccctggctggcctcccactgctcccgagtgagatggagcttcccgccaatggtgataggccccgagagaggctgtggctcatcgccgtcgacgaccttgaggcgacctaacgcctcctcgatcgacatcgtggagaggtctagcagagactcaatcgagcgagcgatctgcctgtacttctctgggacgcagcgaaagagcttctcaacagctctctcctcgtcgtaggtgtcgtcgccgtactgcaccatcttctgcaaaagagtgttgagacggagggcaaagtcatcaacatcctcacctggcttgaaggctaggttctcccactccttgcggagtgcctgcagtgtggacttgcaggcgcggtcactgccgatgtgtgccacagcgatggcgtcccaggcctccttggcagtccgcttctgggaaagcgagaactgcatctcgggcgggactgcagtgatgagggcatccagcgcccgtcgatcctcgtcgtagtcgacgtcgccgtaccgaactgcctcccacatgtgccgcacctggacctggttttggtgaggggccacccaccgccaggaccaaagtccctgaccaccgtctggacgccgtggtgaccatggcgccggtcagggaagggagaattgcgctgcctgggagggccgcgcgcgggctccgggctgccgccggcacgcccgcgcccgtctgggttcccgtcggagggcgcgcggtcccttgggccgccgccgccgccgtggaggtgggctactgcccaccgctctgcccgctccccgtgtccttcctcttgccagctcctcaagctccctgtcggtggtgatgttgccggcgatggagccgttgatgctgctgcgcaaggtctcaacctctacctccgccacacgtgccgcatcttccgccgcctctgcttccgcctccgccctggctgctgccaactccgctgctgccagtctggccgccctcgctgctgctgcaacggtctgagccgttgctcgcctgcgctcttctgctgcggcgagctcggcgtcctgctgacgccgagtgctcgaggcgaccgaacgccgagaccgaacgtcgaacatggcgcacctccggggggctgctgcgtggagaggaggaagggaaaggggaaggaggagtagccggtgctgctgctgctgctggctgagagctcaaccgagcttgggaaggagtggaacaagagatgtttagcctacaggaaagtgtggttctgataccagatgttagaatttcaatggttactctcattgagaagagaatggcactcagagtgggacaattttctggttttcttcattcacaaactcaaaagccatacctacctgagggaggttggatacatatatatagccatagctggctgctagcctattgttgcaccctcctagtctaaaattcaaaatttgaatgggatgctgtcctagagggcatccaaactgaataaagcataaaggaggcataaaggagatgctaactgctactgtcctactaaccgcagctgtcctagcaactgaaaaatatgctaaaggggtagatgctatcctaaaaaggtgaaactatccaaaagcaaaaagaagaatcacgaccaaggaccacaaagacttatccatcactgaacagatggttcctcaggcatgtcaagagatattatgtgccacccctcctcattgcttgttataggaacattcctgaaatcgtgatgtgctctctgctgaaaaagttgtccaatatcgtccatgaggtcattgtagttctgactggacaaatcaaccacgttgatgttgagaactggtatttcctgcaagaagaaggatccatccagtgcatgagcaactgtaaggatattcagtttctgcacttgcacttgttcaaaagtcaaaacaatgtcatttcatttcaattaatacttcaatctttatgtgcactttgggaaaatgtgatacagtttagctacagtgaatagaaccagaaattgtttcacaacaaaatattgcagaactggctggctccccaagaggttggcctgtgcagcaattctttcggtctacaattaaatagaaagcagggctcttgcctttcttaagaagaaaaaaaaagtgcatacgtcaatagaagacacagagtatcattcacatgtgctacttatcatctgttttattctcagtgatgtatctaaacttattttttgttttggagattctcggaacaatgaatcatgcaacttcatttagttttagcaaaggatttcatgttgagctgcacatttggatatgttaagggcttgttcgcttagttcatatgacgaagagattggagaggattgagagggtattaaactattaattccacactcaataggtttgtggaattaatcatctccaaatctcctttaattcccatggggagggattgaccgagctagcaagttaagaaaactatggattaattttcttttccaaaaaacaaattttacttacaatttttagtaacataaagtctctaattattattctcatcatgatattttaagacaaatacgcttgttatagcatggaaaatgctaaagtacacgtattaaacaccatttaacacatttgctctcgataaaagaagttaacaaggttacatacttccattttgagaaatgcccaggagtcttccggctagctccacaaggtggtgggctagacgacctgggtacaaagcctcacccctcctaattatttgatattaggtccttccctaatattctagtttttttttttacatacttccattctgagcagcttagacgcgtcctctcttcacctgcaaaatagagtcatttgtgattcaaatgaacatttttaagcaaacaaatggtacatttttttaaaaaaagagtaatagtgatgttatttatttctttatctttatatatcatgtatctttatgcaaaccaataaataaatcaagcgaacttcgctggttttaacaaaccggttggtctttcctgataagtagggataggagagtgtcctatgctgaaaaatggactccttcatcagttttgaaggacggttttgctaatatggtgatgttgacatgatctttatcccatgtagcgcttatgtgatattagaattaaaaaatatatgtgagattcatttgtcattcacatacaaaaatatatattgtgggactcactgacatatggggcccacgtatcatcatctctctctcaaacccttcttccacctccctctctcccttatctctctattttctttcccccttcggtcttggcgatgacaggcaggacgacgctggcgagcggacgagggccaaagcagcggcggcggggagctgattcccatccctttccttggcttcccagaaaccctaatccatgcgccgcatttcgcctctccctgcgcaagaccgcatcacatgccgccgacatctactcacattgctcatagattactgcccgcgctagccatgggacatgtcgggaactcaaggttggctgcactcgagggcggggaacgggtaatccgtgcgctagagctggcgccacacctaggtcgtcctgcaaaaaggaggggagcacaagcaccaagagaggagaagcaccaccgtccaaagaaatgggatgatcggtcgcaatccagagaggaagtggtcagaggcaccggtggtggtggcagaggaggagggggatccacctgtggcggaggaagaagacgaggaagaaggcgtcgacttcatcagtgacctcccagacgccatcctcggcgagatcattgtccgtctccccaccaaagaagccaacagcacccaagtcctcgccgctctaatgctccacaccgctcaacctcggctgttgtcatccccgcgcgagaaaggatgccctcgctggctccgtttccgcatccctagctagacccagccgatgatctccaagaacgactctgcgtgcgacgaatcctcgccgtccagctgcccctcctccattgaatatattttgatacaaatgtttgttctgtattgaaaatactattatattttgctataagcttggtcaaacttaagataaatttaactaagaaaaaagtcaaacgacttataatatgaaacggagggagtatttgaactagaagtttcctatgcagta

SEQ ID NO: 28954 - DNA, 26110 bp, Oryza sativa
atataagagatagaagagagagataaactgacaggtggggccccacctattttttaataaataaattgctgactggaccaccacgtagaccaaaaccaccgcggattgggtcgaggggggtaatttgtccggtttacatagttcggggtgaaaaatgtccggttttgtggttcaggggggcaattcagacgaccgctatagttcggggggggggtaattcgtactttttccataaattaacaatgtgcactaatgagatactctcttattcatgaaatatctccgctcgtgctcgcatgcattcccgccctgctcaccggcctccctatctccttcctttccgccgctaagctcgtcgtcgcgctggtcgccacctttcctcctctctagccgtcgccgttgagccgaccgcctctctccccctccccgccgcggcgccatctggcagcaaaccaccagcccgctgccactccgcccgccgcctgtgaccgccttccgcccgttgtcgcgctcgcccgtcgccgctctaccgctgccccctaccttcttcgccttccgctcgcttccgacgaaggggcggagcacgaagaggacggggttgctctacccgcccgctgcccacccatcgccgctccgcccgctggcctccctcattgaagagaagagaagagagaaaatagaagagaagaagaagaaaagagataaaaaaatgtgcagctgacatgtgggccccacatactttttttttaattttttgctgactaggatgtcacgtcagcgaaaccacccatatatactgtcatgagatcttaagtgcacggtttgtgtgagtttaggtgtacacatttctgattttgtggttatgtaacctcgaaaaatttcgctgttaagttgagggacgtccggtgtgaacttattaccaattcctcgttccgagaaacttcagggccggatggcggcagcggtggggcaggaggaggagtcgatcgatgaggccacgtgatggcagcgaggaggaagagctgctcaacaagctctcccgctattgccgctactggacggatctgtggtccgacgattccagcgacatcgccaaaagaagtgaggaagcttcttttttttttttgttttagagatgattttatggtaaatacgaattcgctcatgctcttgttaggtttttagttttcatctcaaatcgacatgttcgctcgctgattatggtaggcgggagcctgggcgcacaatagtggggatggaaacatgaaaatggaaaatgttgggattgacatttttcacatggatatgcatcaatgtgatctaatggctcctctctttggtagtatgttgcaaaggaaaaagaaacaataatgcttgactgattgatgcggtttattggatggatgcagctgagattggtcccatgcggtacacggaggaaccgccccggttcgcgatgctcctagatttactagaggttttttctttcgaggtgacggagcttacaggtattctacgctggccaattgatgtgtttggtctcatctccgttcgtgactctctggatcggaaccgcaactatatctttgagcgcaccaggaacaactgccagactctcactgcaaaggtatctccatgcttcatggaaatagcagcacaaagtcatcagacttttctacaggcagctagttagttttgcaacttcacatttgtggtgcactagtgcagtagttcttctttacctaattataatagcagcgcaatcatgagatgtctggcatagttctgttgagaaaattggatgtgtctgaactagttgtacctttggtgcatcatttagtttacttaaacaaattagaacagtccaaacttatatgcacatcacggttccatttcacaaattatatatgatagtctgatatactagttgtatcacagaagcttatcagtaaacaacctgaaatattcaaatgtgcatgatttagtatcctgtgatggcatttcttttttacgaacggcaaaaataaaacctgtgatagcataatcaagcaattttccaatctaaaacacccctacacaccagagattaacatattttcatgatgcataaggggcatcacaaacatgtgggttgttaacagaaataactacagaaacaattggtgcacaggcgcagaattgatactacaaaaataaaatgctaccaagtcaattgatagaacatgcaggggtacttcccacgctcttatttaattcattgcagctagcattttccctatatgaacttgcagaggctatcttttctagcaagagctatgctccttgctccttgcttcggcttgtctgcattcttttccaaccattccagtaaagatgaagttgtcaatacatatatcagatatttatcgtacatcatatactgatatgcagattttgctatgcggtatcattttattattgagaaaagggaaaatagaaaatccaatttcagttatgcatagcatgtcgtcaggctcacatatgttatctttacctaattatcctcttgtttatattttgttttgacagttcaaatgccccattcatattattttgttgagtggaacttagaacacatacgggatagaattatgcatgtttgttcaccatcaatctagctagtttcaccttatcccaaaaaaaaagggaaatatttgttgtgttacattgttgctaccattcctttctaattgttttcatacagggttcttaagtggtggatagtgtatcatcaatattcttatactctctacatcgatcccataatataaggcacggtcaaacttggcacgatctccaaaactgatcttcggattataatttctcatatactataaggtttatagcaaaaaaatatataatcatatgaaagtagattcaaatgtcaatctaatgataatatttttagaaaataaaattcaattcatactatagtaattattggtcaaatgttttaaaagttaaaacttaaaatacgtgcacaccttatattatgggatggaggaagtatttagtaatgtcatggatgcgtgttgggttcatctctggttctcacaggtccaagccatgcaatcctattgatggaccctattgaatttgaaattgagctaggagttaaggggacgagtccctccgaagataagatcttgagcgctaaagcatttgggtataatggaactgctcagagacatagatgtggctcactgcgcagtatgatgttatcaggagcacgtagcaaattggagttcaagtatgcacacattcctgtggcattggaggctacaatcaaggtcaggattacaggaggttcaactgatttctgtggaaagttcattgcacatactgctagtatcaaggaacatgtcatattgctggactctggggaagaaatggtggctatctcccatgatggagccattgatttctgccgcagtgtagttgcattggaaggaaatggcggagttctgactgttagtgttcatgcaaggcagagtggtgatgagaatatcatatgtgcttataaacattttatcccggtaagatgtggacggaatcatgacacacttgatgttgggttttgccagatgagcgttgaagttgcttggttgctcattttttagtattgaaaaaaaatctaggccatgacaatacttaatattcggtattagtagtggaagtaatagatgtgctatgtggcattgtaatatactaatactagaagataatccgcgttgctgtgggacatagtgcataagacaaaacaaagtgaaattctatgggaacatttgatccattgcaattagacatagtgcataggaaaaacatttaagtgaaatttaaagaaaacatttcatcatcacatttaacatgcttcattggttgaatagatccaagtattttcgaacaaaccttaatatacttctcatttgattgaccatagaaaaatgaattttcttgactacaaattttgtaatccatcacatttaatatacttcattggttgaatatacccagttttttttcccaacagaacactcttatttgatcgactatagaaactgaatttttattgactataaattttagaaatagctacaggaacttaccttctgaggtgatcatgaaagttaagtaatatgtgataaaaaggaatgaaaaggtgtaaggagcactgttcattgtgctatggtataaattaaatacgggtcagttgtacaattattttcagctcgatatgtagagatggcattacattatttgattgaaataaataaaactgtagtaggaaataagctaatttatggtgtacaacctgaaaatttctagaaattaatcattctcaccgaagaaattaaatttctattctgaatcataacatatctgtaatatgaattaaagtagaaacgagtgaccaaaatttacatttggaattaggtgagagcatgtagcataaaatccatcggtaaataagtatatgatcttcatctaacaagaaagggagggggaaacgtgatattaaatattggctggcagagtgaagacgaacacctgatgcattaagctgagttctttgcgtgctaaacaatgtgtgtttttaaaagttttctatacgaaagttgctttaaaaaatcatattaatcttttttaaaaaaatatctaatatttaattaatcatacgctaataataagttgctccatcttacgtgcgtgaaagattagttctcaactcaggaaactgaacacagcctttaggggaaaaaaatgtgtacaaccaataatgaattcatccaaaagccacttgttttaacttggtaaaccaataaactcaacgtgggagagtgagggaaaagaataatgtacctgatccagcttaaggtttgttggggaacataaaaaatggtgcagaccaggaagacaggaaatgaattggctagtgcgtgagatgaaacaacgttgccggagtatggattagctgtggccgtttgcgcccaataatccctaataatatcagctaatccatctattttgttatcaaaagaacatattagccagtgtgccgcaacaattagttacatagaaaatgggaatgccggtagtcatttcctactaaaagattgaagctgcatcgaaaaaagccaccagagctgcagatagaagtcaccaatcctgataatcaccaagcacgatggataacaattatatacactcacaatacccgtgatgggtatagcacagggatttaaatgcgttatcacggtgcccataaggagaagttgaggcgtctgcggcgatttcctgattttccacgcacgaagaaaggcgaaggccactggcccactgagaagctgaacggtcggacgaggaatcgtcgtgaaggtaggggaatcgggctagggagattatcaagtaagattattttgcccgtttatcctacttctattttattttttctttctaattttcactgttatgcgaggaataaactagtaaataagtttttatgcgggtaatgggattgcccatttgcatcccctagtgcgcgggcgtgagcagtgctatgcgctcgaggaaaatgatcgattccccctatcctgtagaggatagcgaccacgaggggcaggatgggatgggatgagctattcaggctgtcacatgtggatgtgataatgtgggtcgtattttccctagtatgattcactccatcaaagttgcttcagcattggtacatcgcagcttcggcgttcgtacgataggagatatggaggacatttgatcaaaccgttgtgcataaaatggatgacatggcttaaccatagatcagaaagttgataatattactactctaagtgaagatcacttgtatagatttataggatgccagttagtactgaatttggaccggaggcctcacggcctagcttattatttatttgatcaatcaaattataaacttgctactactattcacctatttgtaagtagtaaccatgccatcacaattcattagaaatatgagatatgtcgttccctatactgtaaacgtcattggacacatgtatatgccactatatttttataacccaaaatgcccctatgtacatttatgtgggcctcatgtgtcataacctttatcaatcttcgagcgaggagtaaccttgctggcgatgtcatcggtctactccttagcatgtgactctcatagcttgtcgtacaccgttcgcagctggttttctttcatgattcagaggcgagtgagcaatcaaactgcgtcgcaacaaaagctggagaactgaaaaaaatgagggaaatcggcaaatggtagcgtgacataagaacatggggttagaaaagaagagccgccactgccaccgttggggacgactaccgccatcgagcgtccatcatgcgcttatcatcgacagtttcttctcgtttctgtctcgtacgtgcatgggtcgatgatgaccagatctgctcctatccctgaccaccacccagatctgtctcgtctctgttcttgccttcgctagccagatctaacgcactcaaaaatgataaaaagaaaaataaaaatagcatgataacgctagaaggagcatatggtgcatatgattagaagaatacactgcgttgaatgaacggcaataaacatctctactacttttaaaaaaaaaaggagagagagaatcgctcaatttctatccctctgtctttacttctctctccatctcccacttgcacgtaaaaatctctcaaaaaccaacaacctcaaaaaaaaaaaaaaaaaaccaactggccaaattccggttgcaacgcacgcatttccacagtgctttttattgggctctcctagcccggcccaagtgagcccaaatataaatcctctacccaaaaagactcctcgctccgaaaaacttcaggctagggccaagccggagcggagggatggcggcggcggcgaagccggaggcgggggagggggaggcgacgaattgccacaggagatcggcggcggggcaggaggaggaggaggaggagtcgaagaggccacgcgatggcaacgatgaggaggaagagctgctcaccgagctctcccgctaccgccgctactggacggatctttggtccgacgattccggcgacattgacagaagaagtgaggaagcattcttttttttttctttctcaattagccgctagctagcgttggggatttttttagatgattttatggtaaatacgtgccagacccttgtcgaattcgctcattccctggttaggttttaggtttcatatgaaaatctgaaatcaactggttggcgcgccgaattcgctcatgctcatgttaggtttttagttttcatctctaatcaacaggttcacgtgccgattaggattatggtagaaatggaaaaatgaaaataacatgttgggattggcattctttacatagatatctatcaatatgatctaatggctcatctctttgatatatctattctgatgcttgactgattgatgtggtttattggatggatgcagctgagattggtcccatgcggtacacggaggaatcgccccggttcgcaatgctcctggatttacttgaggttttttcttttgaggtgaccgagctgaaaggtattctacgctggccaatagatgtgtttggtctcatctccgttcgtgactctctggaccggaaccgcaactatatctttgagcgcaccaggaacaactgccagactctcactgcaaaggtacctctatgcttcatggaaataacagtgcatagtcatcagtaaacaacctgaaatattcaaatgtgcatggtttagaatcctgtgatggcttttctttttgaccaacagcaaaaaataaaacctgtgataacataatcaagcaattttccaaatctcaaactcccctacacatcagagcttaacatattttcatgatgcataaggggcatcacaaacatatgtgggttgctaacagaaataactacagaaacttttggtgcacaggtgcagaattgatactacaaaaataaaaggctaccaaatcaattgatagcacatgcagggatacttccccactcttattgaatttatagcaactactccctccgtttcacaatgtaagtcattctagcatttcccacattcatattgatgttaatgaatctagacatatatatgtgcctagattcattagcatctatataaatgtgggcaatgctagaatgacttacattgtgaaacggaggaagtagcattttcccccctatgaacttgcaggggctatctttagcaagggctatgttccttggtccttgcttcagcttgttgcgaaccattccagtaggatatttaacagacccctcatgagtatgtgaatggtaaaagtgagaatcaatcggtagtacaaatgtcctaactgcagcaagacgaatcatgcatggattcatctccttgcaatacagcttgagcctaagggaaaacattttgcaaatatttaggggtagtaacattttgcaaatatttaggggtagtaacattttgcagacatataatatttgttatctcatagccatcatctttggtttttatcataatagtcatcatgttttaatgggattattgaccattattcatgccaatccaagagtttaaggagatgtaatggcaatccacaattgacaatacaaagcaaaattctttgagatgttttagagtagagagtaaaaagggcagcatcaagagtacaatttgcccaacaattaactacattttgttgtgatactttgacatactatgaagattctatatgaaaagctcatgcaaaaaatgctaatgaataatggttgtgttaatactacagttctgcgataacagggtattattgatttgcaagtgctggtcattaaagattcaggcagtaaagatgaagttgtcaatacatatatcagatatttatcgtatactgtatacttatatgcatattttgctatacagtatcattttattgttgggcaaagggaaaatagaaaatccaagttcagttatgcatagcatgtcgtcagtctcacatatgttttcttttcctaattatgctcctgtttatattttgttttgacagttcaatgccccattcatattattgtgttgagtggaacttagaacacatatgtgatagaattatgcatgtttgttcaccatcaatctagctaatttcaccttatccaaaaaaaaaatggaaatatttgctgtgttacattgttgctaccattccttatatttagtaatgtcacgggtgtatgtaggattcatctctggttcttactggtccaagccgtgcaatcctattgatggaccctattgaatttgaaattgagctaagagtcaaggggacaagtccctccgaagataagatcttgagcgctgaagcatttgggtataatggcaccgctcagagacacagatgtggctcactccgcagtatgttgttatcaggagcacgcagcacattggagttcaagtatgctcacattcctgtggcattggaggctacaatcaaggtcaggattacaggaggtttaactgatttctgtggaaagttcattgcacatactgctagtatcaaggaagatgtcgtattgctggactctggagaagaaatggtggctatctcccatgatggagccattcatttctcccgcagtgtggttgcagttgaaggaaatggtgtgctgactgttggtgttcatgcaaggcagagtggtgatgagaataacagctgtgattacaagaattttatcccggtaagatgtggacggagtcatgacacacttgatgttggattttgccagatgagtgttgaagttgcttggtcgctcatgctttcatattgaaaaaacataggcccgataatattatattttgccaagtctaggccctgataattttgcttgctgtgacacaagctgtttgctcgatggcattgtaatatactgatatgacaatacttaatattcggtgttagtagttcatttttttagagaaggctatacggccctgctttttattgcgttcttatagaaagcaatatgtctttatacatagattcagagatgctggggccaccagcttgccagacacagcacaggaaactgactgtaaacacactaccaactacaggacgcataagcaagtgctataatagagaggagtattatctctaattctatccatataatctactactcataaataagaagcaatatatacaataggtcacctctaatacacaatacaaatactagtacttctaatactatcacacctagggcttgtttggtaaagctccaacttctaaatttagcttcaggaattgggtctggagtggagcagctccacctctctagttcattttttgagagtgtttcactcagctccactcccattttaggtggagatgaagtcatgaaactgtttagctgagcttagtttcaaaagaggtggagctagagctgtgccaaacagacccctattttgttacttctaatacacacatatcaatacttctaataatactctcacacacatatggaggttctcttagtacatgagaaggttgctcagctatatgacacttagggtcatccaatcctacgtgacactcatgtcaaaaaaaataaataaatcatacgtgacactcttaaaacagcacatcaagtattcctgtatatcatcactcaatcgtacgtgacactcgtgttaaaaagaaaatcgtatatgatgcttttaaggacagtacatcaattatagtagttgctcccaggctccaaactccagaatgccagcaaaagccaaaagcaaaactaaaccaccggtaacaccgatgttagcctattccagctcgcgagggacgaagaccgttgacagcatcttgtaatgccgccgccatggactccagagtagcaacgtcatcaggcttcagaaatgatttccactacaacagtaagccaatcaaacgaaaaaagaataattagaggtgaggaaaccatcttatccctgaagaccatgtcatgtctagttgaccaaagaattccaacataaagcagctaaaagaaggcatccaactctagattttttaagcctgttttccccagaaccaagcagaaaaagtcatcaaaatcatgaggaattctactctggccaagggcgtctctacaaatacaccaggcaaatctagcaacggggcatttgaaacaaactagaaataactgcgcgcttcgctgcacccgtccaatatcagaggagaaataaatttaacagcatataatttttttatatagcatgtatttggatcatttacatattagaaatgagcaaggagaaacagtaattgatgaaatagaattgtcttacaaatttcataaattaaacagtgcacatgataaatatcaccaaatgttaaagtgtcaacaaatagtgttggttctaatatgggagccaagagaggagtgagcagttgacagttagtgttgtgaccacaagatagaactgagaatcacacaacagagcatgttagtggagaattcttacaaaatgtggacattaagaataaaaaaactaagaaaaaaaacatatcctccggattagtcgttatctcacatatgaggctccccaactgttcatacttgcatttgtgttcatgagctcgtccatctacaaattgcaaaggctaaaggcatatagttgcaaaataagaaataatagatacattaggtgtggtatgaagtattactatttattttactgatatatacatatataaaaaggatgtggattatctccttcagtacaaaacatatatgaccaaatattatcaggcatttgcacatttctaagaatgtacctttaccatgctagacaacagtttgggcaagctgttgcctatatatatatgtatatgatacatatatgatatatccatcctgttatagcttataaggtaatggaaatgctaaacccaaatgttatggcttgtagccagcagtctgataaaagaagaactcatagcagtgtagcacagtaggactgagtgccctggtaagtgataacagcaagagtagactgttggcaagacatttatagattcatgtccctcatgacctcaattcagaaaatgaaaagaaaagctatctattgaaagaatgaagtcacctaactaagctttactttttgtatatctacaaatatcaccttttgccaatataattattacacattgggaaccattacatatacgcagcaccacgtgatattcataaagaatgaaattaacagtgaattttaaattagaacagagttgacttccatttggtaagtaaactatcctatatccaacaaaaagaatagtgtcccacattccatagatacatatttcataggagcataggatgatatatacttgcatatgtcttaaaatatgatggtctgcaatgttttttgtgagattcagatataatacaatccgactcaacacacctgtaatagcagtgccaaggctccttacatgctgctgaacctcacatagataaaaaatggcaaaagtgaacctagaaacaatggattgtcacatgtgacagcagtaattgtaaatcattaatgctctctaaaagtctaggcctgtagattgtaccgatcagatgagactttttcatgaaggcacctaaattgtagtgctaaaaatgctttttctttgggaatgtatttcaaaccacccacggacctaggcgctacctagctggctatcccaaaagctaaatgtaaaggttattcttcaattttagaaggcacactgaattatatgaactcaagcagtttgagttatttttggcatgccaaccctatagatgcctcagaggagatgatgatgcaagcataaacaacagatgtacacactacagctgacagaaaaaaaatgaggaggtactatgagatcataagaaagcctggatagtagatgatttacccatatttttcatagtgttggttttacagtgttaattaatgatcacaagtcgtgccccaaatttctccaggagggatggtttgattcctgggattcctgtacacgaagaaaccatgtagatcaaatatgtaatgctgtcatgctgtgctgatacgttaaaccaaacaatgcaacatttggtcttacctgctaacctcgacgaaagaaaataatgaggagcaatcagtgaaaatcttgccctgtcagctgtgactccttgttctttataagccagatgccttccatcaggaagttgaattgttttggcacttgggggacctatgtagagtttctttggcagctctactggggtatcatcaacactccctacacctaatactgcatacaaaatattcctgttaatcaagcgataaaaaattgatccctacattaagaaattgttttcttggatttcgcatttttcacaaatcaattgaagtacatagtgcattgacaaaatgattgtacaatgtgtagcatgtaaaagagggtaaaggagcacttctgggtagaaattctacatgctagcatgcatcaagttcgcatataagcaaccaagtgccataaaactcaaaaataagagggcaaaaagaatccacctggcaagcaatctgttggcaccaaaatagtaatatcaatacagcaaaaaaaaagcagctagcttgactcaatagtaaaacaattgactgaccaatgaccacaatattagactatggttgacctgtcatgaatttcaaactgcccgtaggccatgcattgtaccccatggccatgaaggcatgaacacaagcgcacaaggcatggatcccacaatccaaaaaaaaatctccttgaaataattacacgctttaaccaatatatatctagagtagcgttcacaacagaaacgcagcataaagagacagattgattctaaatccaaacaaaatttcaggggaaaaaaagagcaccaaacggttagttagatccatcccctctaatgactgaacactaaacgtgcacgctcatatcatacatcgtgatgcacgacggcataaaccaaactgcatgctgagctgtagtcagagcctcactcgcacgcaaggaagagaagatcgggggagggggggtgagagatcagcgggggattaccgatgagcgtgacgaacgcgacggcggcggtgatgacccagcacctgacggggttgcagtcctcggcgaggtacgcgttcatgaagctgaggcgcttccccatggccacggcggggcccctgagccgccgcgcgagctcgctgtcctcggcgccggcgaggctctgagcggtcggatccaccggggggagaccaaacgccggatcgacggcctgccagtggatttggcactacaccaagcagggtggagaagatggtggtggtggctcacgacccttttgtccgggcagccggaatcgcctgcggagaggaggtggtcaccggattcgatgcccctggtctcctcgctggtagatgaagtgacctgactggggagagagtcgggggcggtgcagcggcggcgagaggagggcgaggaggcgacgcgcatgagagaggagagcgaggcggcgcgggcgagagaagagaaccgagcggccgagccgcgcgaggtcgcgggcaggagactgaggtggctagggttcttggcaaatccaggccgtctgttcctaatccaacgatctcacgatggtggaagagcagccacgctgggacacgtggacggccagatcgtccctcgcgcgtgatcgaacggacctcaatagcctgaaccggaatgcaattaaccaaagatgaggggtatttctgaaaatattgatgaggtggcgccctaatcctcacccattcccacggcgtttaagtaaagtaatatgtggacagtatcctcatacacaccacataggcacattctggcaaaactctgatccacccaatagcactttctcagctgagcagaagattgtatctttcctcttacagcagccagccagagaaaatattttgtttttgcttaggagggataggacaactccaaatatcatgcatcctcacatcatttacccccttaaagggttagcatcctgtagattgattgagatgagtacacccccttcttgtctaaagacccccacactatcttttctctctcatcacacagtaatattgtcagccgaatgagagctaatgcagaacttgtaatgctgaactccctaccacatattctccaaacattgaatacacaacagactcaaatcaatttatcaaagatgaataattaaaatgataagctatatgattgtcaaaggcaggataaagaaaattcaagttactcttatcgatctgcaatcagagccataacctgcaaatacttgcacctttatccatataccagcagctaattccagttgcttttgcagctccaagggctcagatggtctgatgacaggactgcccaatagatcagcctgtaggtgggctgcatataataatatacgttgtcagcaaactctttatttgtgtccctgagatactggaagagatactagcaattggaaggctaggattgcaagtattctcttttacaaattgctaggaaggagaagaattcttttacctgaatctgcatcagaagattatggactgtgtatcgccaccgaacacgcacgtaatcagaatttcacttgtcatgcctagagatggtaacgggtgcatacccatcaggttttcttaccccatatccacaccctcaatgcacctgtcgcgggtacaaaccatccccatacccacacccgtgcgggtaatgggtactcatacctatataattgacctgtaacatttataattttgtactctaattagccatattagatctgtaaaccatcaatatttttcctaacaacaatgctattaacattagcgttcaaaggcgagtaaaaaaactttacaatcacattacataatcaagaaatcaaataataatttcatataactagactagaacaatgcttaagatgcgaaataagttttatgctatgatttaatagtcgttgagacttatattactcatagttttatgcttaatttacgggtttttcaaccaagggttgatgggtacgggtgggtaaagaatggacctatacccacatactcaatgggtaagagttctcgtccgttagtagacccataaataaagagttagaacatgattagcttctaataaaataaaagctcatagggtgtcgggtcataggtcccattaccatctctagtcatgcctccccgtcatcgtcgttgcagctccattggccattcgccggcttgatgccccgatgaggaatctgctggaatgagaatggaaagaggagaagaccgtacttgttgcggggaagacgagatgcccgtttagaactcctccaatacccataaaacggagcaaatccattttcacatgattaattaaatattaactaaattaaagttaaaaattaaattaatatattattttaaattagtagaaaaggtttttataaaaaaatacatcttttaatagtttgggaagttttatatgtgaaaaatgagggagtagaaattaaaaagagttggtaaagaacacactcatactactacacagctagccgtgcaatggacaaacgagacgccaagcaactgcttaaccaatcgacgaaatacatattaatttctactcccaaaaaacaaatggatgaaattgaaccgatataaacagccgatataggtaaagagcatctccaagagaatcttgtccctaaaagttaaattttaagaattaagggtaaaatcaaccctccaacaggtttccaaatgaggccccccaatatttaggtacatctaaaatccaaccaaatagtagctagttttggacacctccacgcactcgagaaaaatcagtttagtagggccaaccagtgatgacatgacagattttaaagtttttttaatcaagtattggatattcttagagatggagatgatttttgagcccgatatcttttggatactcccaactaggggtgtaagtggctaacccgcgaaacccacttataggctaaaataagccgtgagcccgcttattttgacttataagtgggttcgcggctgacccacttacacccctactcccaacacaagttttttaggagcctaaacaactctttgagatgctcttaacgacagcatcactcatacgatttgcttagtacgtgggttgcaacttgcgtctttcatcatctttaagagcaactacttagtcataatgcaataaaagcttttgattttagcttaattattccctatgtttcatattataaggccattcccaacccaatgactaggatgatgtccattgtattaaataagtttccacctaggatgaaaaatgatgtggcaaatgaataaatgaggaaagtgaaggaaaccatatcttgcatgagacatagtttctacgtaacatcccagacatcaagtgagataagtagcattaaattaaagtatggaatagtgatgtttgcagtggaagagtagtgtctagtactagtttcttgatgatgtagagtttatggaaactatctctggtaatggcctaagtcgctttgatatttttttctagttaaatttttttagttttaaccaaattgatagaaaatctaacaacatatataactccaaattagttttattaaataaaatattaaatatatttttaataatatgtttattttgggttagaaatgttactatattttttataaatttattcaaacttaaaatataagaaatatcaaaacaacttataatatgaaacaacgaaagtacctacttaggacgacttacaacatggccaacaatatctataagtgaaacccaattctaaaattaggattttctttttgtaaagaacttgctccaatactctctccggactgataatacttatcgttttggataaggatgaggtcaaattttaaaatctttggttatgaataatttataaaaatatttgtctttgaaatatggtgattatatgtatagattaatcttaaaaaatacttcaataaaatcatatatttgttaacatttatatacatattatactaaaaaataataaataatgatcaaagttgttttttaagatcatgcccttgttcaaaacgataagtattatcaactcggagggagtagttctctagagatgtatccaaaaattgaaatttccttcccatcctttctcgctctccataagtcgggagacgctcttgctcccaatgttcgcacggcaaaaaagagagggcgacacatgggaagggggatggaccgagcgttttttttatatcgggttcattttttatttttgaagttaatttgagatatctcttagagatctgtttgcaccttaaaatcaattaggaatttgagaatagaattttagaaatagctttttagatatttgttgggcatgctcttatgacgactaattacctaatttctttttttagcttttgagggatatagctgaaatcagaattaagaattttatgaggataggcagccccaggacaggatccgattggacggctgagcatattagcaacttttggaagttcatttgccccaagcctatagtgaaaatctcaaatttattatactagttgattttcatgtcaaatttgtcctcataaatttagtaaccacaatctcatcatccacaaatggtgtaaaaacaacagtgcgtcaccaacgcattgtaaatgacaaagaccataaggaaacaaatgtggaaccaaaatatttttagtattatcaaaaatctttgtcaaagtgaaaagtaaatatcataaagaaaccaggatatgccatgtcatctgacaaatattaaccatcggatacacttaaagacaaaataagtcgaataccgtaggatgaaacttaagtatagtcgtaaaaaatgtaggaatgttctagagtaccctgtagaacctcccctaactcttggcacagctgcaagcccaagctccatcctcttttctccatgcctgaggcaagtttagaataaaaacaaaataaactcctttactaacaaaatgtgaaacttatagttagataactttcaaattgaaatgcatttcctcggcccacatcagcggtgtcggtgcttcgattcatggccaccacttacacctccattactatctcaatttgttcataaattcaatttataaccatgaataaatatagtgaaatcaaatccatatgaagtgaaaacactacatatataaaaagtgattctcgatatatctttgcatagccgtagagtaacccaatgaacatactgaataacgtgttttctatggaatttatgtcaatagagttacaataaatcctacattcacaattaaacaatatagcaggtctaaaattatcagatgtgtcggtcatagaaacgatcctgaataaataagataaaaaaaatctaccacctacagaaatatccataactaacgaatagaaaaatcaacctaattgctcggacttgaaccaaatactctccaaagttcaatccttaacataattgaataatagaattcagatatagaactagaccaattaaattttaactaatatgaaaatagaagatagaaggagaaagagagtctcctgtcttaattcttaaatctctataggttcttaaaagatcagatttataaccattaattttaatccagaatcttccgtcttcacccttcaatgcaaagccttgatacaactgacccataaggccataactgtcgaaagccttccttagaatgcacttgattattcaatagatgtacacagaaataaaaacgtacaaaacccggcctctacatgcaatacaagtacaaaagtgtttagacccaaactcgttataaaaggtttcaacaaagcattgaaagacaacaaccaagcaaaagacaaatacaagaccacttccaatccctttctacagttccgcccaaactttgccgcactcctccaatttgtggtcaccctcttttttatgcaacaaagaccaccaacacgtccttgaagattacctgcaaattattggaattaatttgggagccattctaaatttctaataataagttacttacctcgtggatttgtctaaaaacgtgaaagcttcccggcgcctctccctcctgaaaacaccccttcatggggttcatcacgattcacgaatgattactacctacaccaaaggtagcaatttgtggattcactttggatcatcatcttgatcttgttggcaaaaactcaggatcaaactacacacgaatccctggaaatcgacaatgcttgacgatgaacagtggaagagaagaacacacgcgagaagttttttgtgccgctaaacttacgcagcttttctgtatatttcatctccttttatggaaagcgaaaacgagatcatgcaatcgtgtagatcgtgtctccggctctgtgcactcccacttcctccatttgcgcatgtgccatcccacacggcggagaacgtgagcgtacgactcgctacactacgcctaatcgtgaacttgcacgaatccggctttacaggacgtgactcgaactgtaacaaccaagccacaaaaaacggaaataaaacagactctaacaaacaccttgcatgcatcgaacagtgcacggtgtgagaaggaaaaagcagagctcctaaaacagagctccatagtgccagcttatatcatcaagtctaacattctccccctaagcctggcaccgtgaactgacctcgacgacgctgatgcgagctcgcaattcttgaaaacgaacccgcccgagtgccttggtcaggatgtctgcaatctgcccatcaatgccaatgaactcaacctgagctctcccgtcctccacgcactcacggatgaagtggtagcgcgtggcgatgtgtttactcctgtcatgaaacactggatttttgctgagggcgatcgccgatttattgtcgacgaggagcttgaagctttctggctcctcttgcttgatttctcccagcagctgcgccagccaaattccctaacacgccgccgtcgtcgccgctatgtactccgcctcacaagatgagagcgcgacaaccttttgcttgatggactgccaactgaccgggttggcgcccaggaagaagacgaccccgctggtgcttttgcgagtgtcgacatcacccgccatgtctgcatcacagtatccgacgagctcaggtggcgtttccatccttttgtagtagcagccgaaatcaaccgtgccggcaacataacgcaagatgcgtttcaccgccgcgtcatgctcggtggttggagcttccatgaagtggctcacgtacccaacagagaacgcgaggtccggccgcgtgtgaaccagataccacaggcagccgacgatgctgcggtactgggtggcatccaccggcgccgccgtgcttgccttggtcaacttgagacgaggctccatcggcgtcaagcaggaattacatccctgcatcccggctcgctcaagtatgcgttgtgcatacgatttctgcgatagtcgaatgccgtccgccacctgttcgacctcgatccccaagtagaacgagaggggaccaagatcactcatcttgaatagggacatcatctcagctttgaaacggtcgatctccatcgccacgttgccggtgatgatcaagtcgtcgacgtacacgccaacgagcagtcggctgtcgccactgccccgcccgtagaccgcgtgctcgcagtcattgcgccggaaccccagcgacagcaggctcgcgtccagcttcgcgttccacacgcgtggagcctgccgaagaccatacaaggccttgtccaggcgaagcacttgatgttcgcgtccgtccacaatgaacccaggaggttgcttgacgtagacctcctcggtgagctccccgttgaggaacgccgacttgacgtccatgtggtggacaggccagcctacttgcgccgcccgcgcgagtagcattctcaccgactccagccgtgccactggagcaaacacctcgttgaagtccacccctggctgttgcatgtatcccttcgccacaagacgagccttgtgcttggtgatcatgccacgcgcgtccttcttgatcttgtagacccatttgagtccgatggcgcgatgaccgggtggcaagtcgacaaggcgccaggtcttgttgtcctcgatggaggaaatctcctgcagcatggcacgccgccactcttggtgatgctcggcctcgccgaaggtggtaggttcctccgccgccagcaagtaaagctcgccgtccgccaggtcccttgttgctagacccggcgtgtacgctcccccagaatcccatcgatggagcggtaccggggcggacagtcgtcggcgtcggcgtcgaggttgtcgtcgccgtcctgcggcgggctgacgaatctcggtgacctcgcattgagcagtgaggccgtcagtgacggcgcgtcgtgcgcaaccgcgccatgtctcggtgtggccagcgtcggcgtggacaactccgcacgttccggctcctgagtgacaatgtattcaacagagaagtcagacgagggaggggaatgcataccatcagtggcatcccaatcccagctggcgccctcgtcgaacaccacgtcgcgcgtcacttgaacacgacccgacttcgggtcgaacaacttgtaggctttggatccctcaacgtagcgaggaagaccgtgggcttgttgcggtcctggagcttggtgacatgcggccgaacatccttgacgtacgcgagacacccgaacgtgcgcaggtgcccaacggccggcttccgcccaaaccaagcttcatacggagtcttgttgtccaagcatttggtcggcgcgcgattgagcaagaacacagccgtagtgactgcctccccccagtagcacgccggcactgacttggccttgagaagactctgcgccatccccagaatcgtctggttgcggcgctcgaccaccctgttttgctggggggaatacggcgcggtgagctgtcgcttgacgccgctctcggcgcaatgcgcggcgaactcggcggaggtgaactcgcccccattgtcggtgcgaaggagcttgagacggcagccagactcagcttcgctgcgggcttggaagcgtttgatcgccactgccgcctccctcttgttctgaagcagtgcgagccacatgtagcggctcgcgtcatcgaccaacagcagaaagtgtttcttgccgccgggcgtcgcaggcgaaatgggaccacagaggtcaccatggaccagctccaaacgatcctccgcgcagaacagggaccgccagggaaacggtgaacgtcgttgcttggtgatgacgcagcagtcacacagttgctcaacttgatcaatttggggaagaccacgaaccatgtcctgtcgagcgagtcgccggagcgcgtcgaagtagaggtggccgaagcgagcatgccacagccacgcggcctcctgcgtgcgtgctgagaggcacataggccgagcgacggtgatcttgatcaggtacagctgattgcgcgtacgctgcacgcgagcgaggagctgtcgcgcggtgtcgcggatcgtgcagacgccatgaaagatgcggacgttgcagccattttcatccagctgcccgagactgacgaggttcgcgttgagcttggggatgtagtacacccctgtgagtgcgcggtgttcaccgttcctgcactcgaagataattttaccttggccttcaatggcgaccacggagccgttgccgaaacggactttgccgcgcacagcagtgtcgagctcggcgaagatatcacgcacgccgggcatgtgattggtaccaccggtgtcaaggtgccacacaccggtgtcaacgtgttcctggcgatgcaggggagcgaacaccttgggttcatcaaggtcgagcaaccccgctggaggcggggacggcgacggaggtggcgccaactcaatggcatgagccatcagcaacgctggctcatcatcctcctcttcaccatgggcgatgtgcgccgcgacttgtttcttgggctgacgacagtctttcgcctagtgaccgagacagccacagttcttgcacttatcacgcccttgatcgtgcgtgtcgcgcgcgccacgctcgccatccgcagcggccttggatttcttccggccaccgcggcggcgacggttgttgcccgccttcttgcccaacgatccctcaccggactgccgttccttggcgcgagcagcccactgttcttcaatgagatacagtttgccgccctcatcaccggacttcttcttgggacggcgttcctccgcatttctcagacgagtctcgatggacaaagcaatctgctcaagatgatcaggaacaacatgaagaaacttttcacagacctttgattcctcgagctggaacccgagtacggcaaggttgttgacgagcccactcagccggacggagaactccacggactcgccttccttgaactcattcgcgtcgaactgcttgcgcaactcctgcgctttggacttgcggacgcggtcgacgccgacgcgcatcgtcttgatggcatcccaggcgtctttcgccgtctccttgacagcgagtaccggcagcagatcagcggggaccgccttgaggacggcctccaacgccatcctatcctcctggaagtcgacgtcacccgtctcgacagcttcccagaggccgcgcgcctggagcattaccctcatcaagagggaccagtcgctgtagttcgtcttcgtgaggatcggatagttggctgagccccccacctccttgaccacgcgcctaagcggaaccatgtcccaggcgtcgccaggcctacggcgaccacggcgcggaggaggcgagcgggattgacgacgcggcgaacgcgaaacgcgcggcgtcggagccgacatggctctgataccagatgttggcaaaaactcaggatcaaactacacacgaatccctagaaatcgacaatgcttgacgatgaacagtggaagagaagaacacacgcgagaagttttttgtgccgctaaacttacgcagcttttctgtatatttcatctccttttatggaaagcgaaaacgagatcatgcgatcgtgtagatcgtgtctccggctctgtgcactcccacttcctccatttgcgcatgtgccatcccacacggcggagaacgtgagcgtacgactcgctacactacgcctaatcgtgaacttgcacgaatccggctttacaggacgcgactcgaactgtaacaaccaagccaaaaaaacggaaataaaacagactctaacaaacaccttgcatgcatcgaacagtgtacggtgtgagaaggaagaagcagagctcctgaaacagagctccatagtaccagcttatatcatcaagtctaacagatctctgtgtttggaaccagcctgattggaggggagcaaggcgtgcagaacgatctccctaagcccgcccagaatgcaatgcgaccaacttgtttcttgttttgcatagagtgctgcatccgaaaggtcagacctcatattgatattgtgattgttcatcagtagaccaagacaccaaacttttttctcctattctggatcggcatcgtggtatcattgcaaagagaaaaggatgtgttgcaagctttttcactggaaaatgaaaaatccgaccttgcaagaaattgagaatccgaaactagattcatacacgtgtgcctcaaatgtgctggccattaattgttacgccaaaagtatgtagaactgcattcctacactcctgtctgttcagaacgaaagttgactggcacattcaggatcgctcgtccaaatccaaaaccacagcaatacacatcattctt

SEQ ID NO: 28955 - DNA, 6352 bp, Oryza sativa
aatatattttgatacaaatgtttgttctgtattgaaaatactattatattttgctataagctaggtcaaacttaaggaaatttaactaaaaaaagtcaaacgacttataatatgaaacggagggagtatttgaactagaagtttcctatgcagtacggtaatgcttaaacataataaattaacaatgtgcactaatgagatactctcttattcatgaaatatctccgctcgtgctcgcatgcattcccgccgtgctcaccggcctccctatctccttcctttccgccgctaagctcgtcgtcgcactggtcgccacctttcctcctctccagccgtcgccgttgagccgaccgcctctctccccctccccgccgcggcgccatttggcagcaaaccaccagccctctgccactccgcccgccgcccgtgaccgccttccgcccgttgtcgcgctcgcccgtcgccgctctaccgctgccccctacctgcttcgccttccgctcgcttccgacgaaggggcggagcacgaagaggacggggttgctctgcccgcccgccgccgcttcgctgccgcgcgggcccgccacccacccatcgccgctccgcccgctggcctcccttactgaagaagagaagagaagagagaaaatagaagagaagaagaagaaaagagataaaaaaatgtgcagctgacatgtgggccccacatactttttttaaatttttttgctgactaggatgccacgtcagcgaaaccacccatatatactgccatgagatcttaagtgcatggtttgtgtgagtttagatgtacatatttctgattttgtggttaagtaacctcgaaaaatttcgctgttaagttgaggaacgtccggtgaacttattcccaaaaaaattcctcgttctgagaaacttcaaggcgggatggcggcggcggtggggcaagaggaggatttgatgaggccacgtgatggcagcgaggaggaagagctgctcaacgagctctcccactatcgccgctactggacgaatctgtggtccgacgattccggcgacatcgccaaaagaagtgaggaagcttcttttttcttgttttagagatgattttatggtaaatacgaattcgctcatcctcttgttaggtttttagttttcatctcaaatcgacatgttcactcgctgattatggtaggcgggagcctgggcgcacaatagtgaggatggaaacatgaaaatggaaaatgttgggattgacatttttcacatggatatgcatcaatgtgatctaatggctcgtctctttggtgtgttgcaaaggaaaaagaaacaataatgcttgactgattgatatggtttattggatggatgcaactgagattggtcccatgcggtacacggaggaaccgccctggttcgcaatgctcctagatttactagaggttttttcttttgaggtgacggagcttaaaggtattctacgctggccaatagatgtgtttggtctcatccccgttcgtgactctctggaccggaaccacaactatatctttgagcgcaccaggaacaactgccagactctcactgcaaaggtatctccatgcttcatggaaatagcagcacaaagtcatcagacttttatacaggcagctagttagtttacaacttcacatttgtggtgcactagtgcagtagctcttctttacctaattaaaactagtaatatacccgtgctaacgctacggtgcaattatataataacactaataaaaaaacaatatcagcttagtctctcttatgcttgaaagctaaaattaaaatttcaaaacttaattttgaagttgaatttgtttgtattttgtcgtagtttattttacagaatgccctttttaatcgctaaagacacacatataaaaagttttttttttgttttctgttgctaatccacgagatagattaaagattaatataaagaaaaagagagaaaagataaaattatttagcactaaaatatcaccacattcttcgtaacccatctaattccagattacttcatattctagtatcatggaaatgtaatgcatattttcctgtactcgtacgaaatatgcaaacacgctcaaatctaacttgtcaaagcttggaaggctcaatccaagagagctatgattttcaattagtcacaggaactccagtatccaactttgtttaaaaaaaaacagtatacagtatctgcacaatagcttcatgccaaccaatgtaacttcaaaatgcagccctctcaatccaacaccagtatctagtactacacaatagcttcatgctgactgcagttacttcaaacgtgaccctctcattctgcaatccacaatgacttgatcttttgagctgcatttcaaaaccaaaattaaccaaaaggatcttaacacctgaagaaaaaaaactgcagaagcgaggatcacccaacaacattctcagctactttccagtctttgaacgtgcatccctagttttccagctttgtgtgttttatccgataacaataaattgatatagcaagaccagccacgctatcaatcacctttagaaaaatgatctatagaaaaaatatatttatgtactgtgtacctccatatcaggagaatctttgattggatttaaaagaattagcaagttttatgtacagggggttcagatgtaaacatcttacaaattaaatataattttcgatgcagccagttgcacaaatactgctaggaattaatgacattcaagtgaatcacatattttagggaacaaaggtgcaaagcaatcgcagaatttcagtataataatcttcaacataagatattatcctccaaagatcagatcttataggtgatttatttcaccgtcttcagaaaatacctaatacatacaaagccatacgtgaactaaactgtgaagaaacactcagcagtgacggtgagcagcggctcgcccagcagctcagatattcaaatttatccaatggaaaatcacatcattttttcagtatttgtagccaaacctaaatataggaaatagcatcctcaatctgctaaggggaaaatcagcacgaaatgactcaacactgaatgaacatgcgcttgaatttcttttagaattattcgtgtacataagttgaatatgaaaaatacatcgaagctactgttaccatgtgcctgcttcacttccaaaacttccaataagctgacacatgggctgtacaataacgtggaatatattactccccatcatgtaagtagagagcttgaaaattctcttcttgactcaaccaaacatattggctgaaaataatgtgaatcaaattcaccatactgagtgctactaaacaaagtagcaatactggtgttggtgcatgatttaaaagagaaaaatgctgttaataaatgatttctactgatattacaagtcacagggaattgaggtggcattgtataacgagtaattcatgattaacagcaacttaccggggatggctgcaggcacgcgatgcgaaggcttcgcctggctgcacaagatctcgtgcgaagctgcgctgccagggcgctcgaccagccggggctttcctcgctgctacgccggctaagccaccggcctccctcgccggttcgttggctcgtcgctgacaatgcgggtcagtggttctagggtttggggtgggaggttgaggggtctgtgggggtggaggacgctgaggtttggggatagggttcgggcgcggggcggggggagtacatggcggcgttgagggagtggggaaaagaatagatcagccgattaggcggaggggtcacgacatcatcattgtggggaggggcgcgacaattgggtgcgaccgagacttaggggaagagcgtcatgaatgaaatcggcgaggggcagggaatccgatccggcgatggagtgggagggagggggagctagcgatgcgagacgacgggggcgatgtctggtgtgcggcgatgcgaggcgacgatggcggcgtctggtgtgcgagagagattagaggagggggagcgtgcgggtccaaggtgcgcagagggccgcctcttgcgatgcgcaaggcaggtggcgattacggcactgggtcaggggcggcgtgagagatgcacggaagagggcggcaatccaaaccgtttgatcagatgtagatgaatacagagcgttagatttgatgaatgaagtatgaaaggatgtaagaggtacttggtgaattatagggtagaagaatagcagcgcaatcatgagatgtctggcgcagttctattgagaaaattcgttgtgtctgaactctgaactagttgtacctttggtgcatcatttagtttacttaaacaaattagaacagttcaaacttatatgcacatcatggttccatttcacaaattatataggatagtctgatactagttgtatcacagaagcttatcagtaaacgacctgaaagattcaaatgtgcttgatttagtatcctgtgatggcatttcttttttacgaacggcaaaaataaaacctgtgataacataatcaagcaattttacaatctcaaacacccatacacaccagagattaccatattttcatgatacataaggggcatcacaaacatgtgggttgttaacagaaataactacagaaacatttggtgcacaggcgcagaattgatactacaaaaataaaatgctaccaaatcaattgatagaacatgcaggggtacttccccactcttatttaattcattgcagctagcattttccctatatgaacttgcagaggctatcttttctagcaagagatatgctccttggtccttgcttcagcttgtctgcaataactgtattcttgtccaaccattccagtaaagttgaagttgtcaatatatatatcagatatttatcgtacatcatatactgatgtgcatattttgctatgcgggatcattttattcttgagcaaagtgaaaatagaaaatccaagttcagttatgcatagtatgtcgtcaggctcacatatgctatcttttcctaattatgctcttgtttatattttgttttgacagttcaaatgccccattcatattattttgttgagtggaacttagaacacatacgtgatagaattatgcatgtttgttcaccatcaatctagctagtttcaccttatccaaaaaaaagggaaatatttgttgtgttacattgttgctaccattcctttctaattgttttcatacagagttcttaagtggtggatagtgtatcatcaatattcttatactctctacatcgatcccataatataaggcacggtcaaacttggcacgatctccaaaactgatcttcggattatattctcatatactataaggtttatagcaaaaaaaaattataatcatatgaaagtagattcaaatgtcaatctaatgataatattttcagaaaataaaattcaattcataccatagtaattattgattaaatgttttaaaagttgaatcttaaaatacgtgcacaccttatattatgggatggaggaagtatttagtaatgtcatggatgcgtgtagggttcatctctggttctcacaggtccaagccgtgcaatcctattgatggaccctactgaatttgaaattgagctaagagtcaaggggacaagtccctccgaagataagatcttgagcgctgaagcatttgggtataatggaactgctcagagacatagatgtggctcactgcgcagtatgatgttatcaggagcacgcagcacattggagttcaattatgcacacattcctgtggcattggaggctacaatcagtgtcaggattacaggaggtttaactggtttctgtggaaagttcattgcacatactgctagtatcaaggaagatgtcatattgctggactctggggaagaaatggtggctatctcccatgatggagccattgatttctgccgcagtgtagttgcattggaaggaaatggcggagttctgactgttagtgttcatgcaaggcagagtggtgatgagaatatcatatgtgcttataaacattttatcccggtaagatgtggacggaatcatgacacacttgatgttgggttttgccagatgagcgttgaagttgcttggttgctcattttttagtattgaaaaaaaatctaggccatgacaatacttaatattcggtattagtagtggaagtaatagatgtgctatgtggcattgtaatatactaatactagaagataatccgcgttgctgtgggacatagtgcataagacaaaacaaagtgaaattctatggg

SEQ ID NO: 28956 - DNA, 3230 bp, Oryza sativa
ctccttggtccttgcttcagcttgtctgcaataactgtattcttgtccaaccattccagtaaagttgaagttgtcaatatatatatcagatatttatcgtacatcatatactgatgtgcatattttgctatgcggtatcattttattcttgagcaaagtgaaaatagaaaatccaagttcagttatgcatagtatgtcgtcaggctcacatatgctatcttttcctaattatgctcttgtttatattttgttttgacagttcaaatgccccattcatattattttgttgagtggaacttagaacacatacgtgatagaattatgcatgtttgttcaccatcaatctagctagtttcaccttatcccaaaaaaaaagggaaatatttgttgtgttacattgttgctaccattcctttctaattgttttcatacagggttcttaagtggtggatagtgtatcatcaatattcttatactctctacatcgatcccataatataaggcttggtcaaacttggcacgatctccaaaactgatcttcggattatattctcatatactataaggtttatagcaaaaaaaaattataatcatatgaaagtagattcaaatgtcaatctaatgataatattttcagaaaataaaattcaattcataccatagtaattattgattaaatgttttaaaagttgaatcttaaaatacgtgcacaccttatattatgggatggaggaagtatttagtaatgtcatggatgcgtgtagggttcatctctggttctcacaggtccaagccgtgcaatcctattgatggaccctactgaatttgaaattgagctaagagtcaaggggacaagtccctccgaagataagatcttgagcgctgaagcatttgggtataatggaactgctcagagacatagatgtggctcactgcgcagtatgatgttatcaggagcacgcagcacattggagttcaattatgcacacattcctgtggcattggaggctacaatcagtgtcaggattacaggaggtttaactggtttctgtggaaagttcattgcacatactgctagtatcaatgaagatgtcatattgctggactctggggaagaaatggtggctatctcccatgatggagccattcatttctgccgcagtgtagttgcagttgaaggaaatggcggagcgttgattgttgatgttcatgcaaggcaaagtggtgatgagaacatcagctgtgcttccaaaaagtttatcccggtaagatgtggatggagtcgtgacacacttgatgttgggttttgccggatgagcgttgaggtttcttggtcgctcatgttttcatattgagaaaagcgtaggccctgataatattttttgcttgctgtgactgaagctgtttgctccacggcattgtaatatggccatgtttaatattcgttgtaaataaaattttcagtttatagctattgaattgtagagtagtcagttgctaagcacagcttcagaagaaatcacaagattagttaggtatacttaggttagcctgcaattgctagtgcatggtggaattataggaggattcaatgagccctgcactagtggtctagtggatgaaaccaacttttaggactgaattcaatatttttcatacttaaaccttgtatccataatagtttattttgtactttgtttgttgatctatatctgaaataactagaatagttccaatgtacattctctttcactctggttgaatgcagattgcatcctttgttgaagtcccttaacgaccacacaaactaatattgcactaaaagttaccgtatgcaatacggtaatactaaaacataaactaacaatcactattttatgaaatagtatcactgaaaccaacattttggtggggttggcaacgtgggaaaacgtagattaaggacacagaaaacaaaaaaaaaaacatcagcttatgattaattgagttttaattattgcaaattttaaatagatttatttaatatattagaacaacttagcagtttgaaaatcgtgctaattgaaactaagttagaatctgaatattactcaggaaagaacggggcctttgtgatgacaaaatttgaatctatgcattataatttcaacaagtatttcaaatttgactagttactaatacaatgcataaccttttcaaattagaatacaacttatgaaaatctaagacatagaaagaacctgtttgacggagtttaggattaagcagttggttattttctggattctatagttacaaattcttagaatcgggaataaaatctaggctgtttggggatctacagctagggagtttgattttttaggagaaactgcaaccgttataagctccccaaacgctccccaaactgaaccatactgagatagtaatgtgacaacattcttcttcttcttcttctttattaaaaaaaacacaaatctcattttacaatgtgattcattgggctctcccggcccaagggcccaagagtaaagccccacaaaaaagcccataactccaaccgaatctcctcacaacccaacttccccatctagggccagcgcactctcctcctcccctcctccgccgccgtctccgccgcctccagccatcgatcccggcgagccagcgaccgagcaggcctagccaccatccttctcgccccccaccggcgttcgccgactctgttcttgctgctgtctcgaggtgagtctcgccttcccccccccccctccctctctctctctctcccctccgctgtcccagatcccggataggctcgcgtttcttgattcgatggttgatggattttggtttgtggaattgtgcaggagagttgctgtttgatcggccatgccggacaacaacaacctcgaggatctgctgctgcaggcggcggggcggacgacgggggcggggaagggcggcggggcacgggggccgtcgtcgggccagggccagcggtggtcgtcgcagcagcagcagcgggggaggcgcgggtcgtcgtactccggcgggagcggctcggacgacgacggcggcggcggcggcgacgggggcgactccgacgactccgacgccgcgccgaccctctcgaggaagcggccgccgtcggggtcgcaagtgccgctcaagaagcggcaccagccggagaagggcggagggagaggtggtggtggtggcgggtggaa

SEQ ID NO: 28957 - DNA, 1390 bp, Oryza sativa
cgacaaggagcagctggagaagatgtcggagctggacagggagatgatcctggcggagcgcggcgcgcggatcgacgactacaagctgaagcagctggcgagggcgtcgtcgtcgtcgtccaaggcggacaagtcgcggagggacagcagccctccgccgccgccgagccgcgcgcggtcgtcggccaggaccgacaggtccgccgccaagagcgcgctggacgagctgcgggccaagcggatgaggcagcaggacccggaggggtaccgtaacaggttcaaggatttgatcccgcagagcggctctccgccgaggcgcagggccggaagcccgcccagcgacggtagtaatgatggtgataacagggggaggatcaccgatgaaacccgggatgatgagtttgatgaatcgccaagcaggcttgaccctctgaagtttgacgatgtgaagagtataaccctcaggagatcaaagcttgtgaaatggttcatggagccgttctttgaggaccttgtgtctgggtgctttgtgcggcttgggattggcaagtcaaaatcagggacccctgattacaggctatgcatagttagaaacgtggatgcgaatgaccctgaccggaagtacaagttggagggctacacgacgtgcaagtacctcaatgttgtgtgggacaatgaggctaatgctgctcggtggcagatgactcaagtatcagactcctttcccagtgaagaggagttcaagaagtggctacaagtggctgagaagaatggtgtgcgagtaccgactcggcaggatgtattggagaagaaagaagccattcaacaggcctacaactttgtgtattcagcacatactgtacagaagatgctaaaagagaagaaatcagctatcagacgtcctatcaatgttgctgctgagaaggatcggttgaggaatgagttggatatggccattgccaggagggatgaagctgaagcagaaaggatccgttcaaagctcaatcagctgcagaagatgtcgaagccaatatcaaataatgagaaggctgccaagttggaggcgatgaacaagaagaaccgtgctgagaacttcaagaacgcatcagaaatgaagcccgttaacacgagtttgaaggttggagaggctggttatgatcccttttcaaggagatggacaagatcaagaaattactacgcagcaaagcctgaaggagagagcgctgaagtccccaacgggaacgatggcagcgcagtagctggcgatgaagatacgaagaacgggccgcgaggtggttcagcagccactgcagcggctctagtggcagctgctgatgccggtaagctggttgataccaatgcacctgtagatctgggaacggaatcgaat

SEQ ID NO: 28958 - DNA, 2055 bp, Oryza sativa
tcagctatcagacgtcctatcaatgttgctgctgagaaggatcggttaaggaatgagttggatatggccattgccagaagggatgaagctgaagcagaaaggatccgttcaaagctcaatcagctgcagaagatgtcgaagccaatatcaaataatgagaaggctgccaagttggaggcgatgaacaagaagaaccgtgctgagaacttcaagaacgcatcagaaatgaagcccgttaacacgagtttgaaggttggagaggctggttatgatcccttttcaaggagatggacaagatcaagaaattactacgcagcaaagcctgaaggagagagcgctgaagtccccaacgggaacgatggcagcgcagtagctggcgatgaagatacgaagaacgggccgcgaggtggttcagcagccactgcagcggctctagtggcagctgctgatgccggtaagctggttgataccaatgcacctgtagatctgggaacggaatcgaatttgctgcataattttgagctcggtatatcattggccggcctggaagaattcggcggtcccaagggtctcttcgatggttacatggcgaggaagcagaagattgaagcaaccatgggttacaaggtccctgacaatgatggaaggaggcatgctctaactctgaccgtcagtgactacaaaagaagacggggtttactctgaacttctcaagttatctgtgcctctgcctgctgttcgatggattcatctgcctctttggccacaaagttcatcagctgatcggcaccatgccattgtgactacttgtccagatcaatttgcattttagccttgagtgtatgtaacatgatgagacaagcaaggttacacattttcttttcataaacaggacctgtatgcctgaattgtgttgatgacaatttccgcattaatatttgtggagtgagtccttctgttatttagtttgttacccttgttgctctgcataaaacatttatgcagcggatattgggagactagactaagaggtacaaatattctatgttgtatacttatatgccaaaaggaaaaaaaaaacatgtgtcaagttatgaaagttcctaatgttccttaattagttcggtctaaatcattatatcaatgttgattatcagattcttatttctatactacaaaatgtaaaaaagaatagcaatggccgtgatactatagcaaaatttctactggaagaaggcaaagcttgtgttgaataataaaatcttgtgtaagataaagctgagcatctgctgcattgcatctcaggaagcttcataggctggtctactcacgaaaggcatacacaaaaaaggcttaattaaaccttcagtacaaaaagctaataaagaacaacgcatatttgtctaggcactccaaattagacacaaaagcttggtaaatgtacacagcaggtcagattatttatgcttttcagtgcaagattcaagatccatgagaagccttattcatctcagactgagctggttctctgaatacatccttgtttgcaattattacagacatggaagcctcaaggtcaacagattacacaaacgtcagtatgttgaactggcactaatcgttcttcgctttgatgaacttcttgatgatgcccatcatctcacttccagggaaacgtccaaggcagccccttgcagcggcaatctcgttgaattcaaagacagaatcgccactgaaagctttgcgctgatcagacttgcgatcagctacatctatgttttctgccacatcttctccagatttaactgaaggaagcaggaaatcgtccagggggaagttgataacattgtcctcccccatagctcctacgaaatctctaagtcggcacaacacaaaaggaacgggttcaaaactgtggtcaccgtactcaactggagtagagtggtctccggtgacacaaaggaaatactggtatttcccagacttttcagcttcccacaggagccttgcaagctgaacgatagcccgatcaacagcctctaggcctagtacctt

SEQ ID NO: 28959 - DNA, 652 bp, Oryza sativa
gaatacgaataagaatcgaatatgatcggacacgaatacgtaaacatttttttctcggaacacgaaaaccaactcaacttctaatagaaacaaatatcaacatatataattagctcattttatataaaatgaggtataatttataaatattttttaaaatttaaataatattaatagtatggactagtgttaagagataaactactattaaaaatctataaaggtatattgaaggttatagagttagaaaaaaatggggtatgtctcatgggtcctgcggatatccgaatagcactgttcaccggatatccgaattattatccgtatccgacggaatccctgataccatatttgtattcgtatccgggagaaaatatccgtattcgtatccatatctgaactatccgagaattatccgatccgaaaggtatccgtatccgtttttgtccggatcggacggaaactatccgctccgttttcatcccaatctagcaccctcttgatcggttgttaggatgaggaaaaaaaaagaaattgtgcttagaattatctctcattagctggatctggtaacctctatttttttttacaaaatacgcaaatgatttacgtatttttgtataaagattaaaggatattgcctcacaaagcc

SEQ ID NO: 28960 - DNA, 679 bp, Oryza sativa
acttggtaatcaccggcaccaaggatacggaggtcgcggcgttcaaggaggagatgaaggctaccttccagatgagtgatctggggcctctctctttctacctagggattgaggtgcacccggatgtctccgggaacacgcttcgacagaccgcctacaccaagcgcgtcgttgagctggctgggctcaccgattgcaacccagctctcactccggtggaggagagactgaagctgagccgtgatagcacgacggaggaagtggatgctacacagtaccagcgtcttgtggggagccttcgctacctcacccacacacggccggacttggccttctccgtcggctacgtcagttggtccatgcagcgaccgacagcggagcaccagcaggctgtgaagaggatcatccgctacgttgcggggactctcgaccacggtctctactacccgagatgtcctggcaaggcacacttcgtcgggtacagcgacagcgaccacgccggcgacatcgacaccagcaagagcacgagcgggattctcttcttcctcggcgagtgcctcgttagctggcagtcggtcaagcagcaggtggtggccctgtacagctgcgaggccgagtacatggcagcctctgccgcttcgacccaggcgctctggcttactcgactacttagtgatct

SEQ ID NO: 28961 - DNA, 587 bp, Oryza sativa
gggaaaaggaaagctcaagcggaagttctcgcaacagaatacgcggaccctcccaagcgcccagacccataaggcagcgacacaaagaaaacatggtgccctatacacaagtcggacatacactctctagaagattgcctcgtcttcaaaaagtcgctcgcaaaacacatggcattggaaaaaggcaagcgagtacgcgtggtcgagaaggacgctgaggcaactgctcaggaatcggactcagcatacccagactctgatctccatgtctcgtacatctttggaggttccacggcatactcctcaaagcgagaatacaagaaagtggaacgggaagtttgttcgacgtggcaaggagctgtgcccaaaatgaagtggtctgagcagaagatagaattctcagaagaggaccaccccaagactgctgtcatcccagggcgatatccgatcgtggtcgaacccactattcggaatatcaaggttgcgcaagttctgatcgacggcggcagctcaatcaaccttctcttcgccagcaccttggacgcggtggggatcccaagaagcgagttgacacccaccgatcaacc

SEQ ID NO: 28962 - DNA, 1066 bp, Oryza sativa
tactcccatattttatatgtgaatttccttcacgtagttctttattttcaattcactcctatataattaacttaatgttattttatgaaaagttacttcttttcaaactaagttacttccataatttaaataaattactttcaagtatttgaatatatttaatgttgtacattttgtcatatattttaagaagagtatgatggtttaaacggaatttaaaaataatgcatggtttaaaatatatagactgcaaaaggtttggtattaagaaaaaaatagattagtgttggccctcagtaccaaccatttaccttatttggtacttcctccgtcctataatataagagattttaagtttttgtttgcattgtttaaccactcgtcttattcaaattttttttttggaattattatttattttttgtgacttactttattatccaaagtactttaagtacaacttttcgttttttatatttgcataaattttttgaataagacgagtggtcaaacagtacaagcaaaaactcaaaatcccttatattatgggatggagggagtatataactagccattggcttatttggtatatagctagctagagaaatatttagacaacacactacccattactgtgcacggatgataaaaacgttcgaatcggaaaaaggacaccagggtcacgctgtaagtctaaacagtgcacgtgtacttagggcatctttagcttccaaggataaaggtagatgaacagccatttgatcccccatcaaaatccgcattgaaacctttacacactaatgggtgtaaacaaatagtacgcccctctactaaagtgggttggaaagcctgtatggctaatctatgcagggtcaaagctatttgatgtctgactcaggcctatatgaccgatcgatcgaaatactctaagactccacctttgtcatatattccatatatcacattagatagatatcatattctagccaatatttctctcgtgcctttccgcgttcatggttcgatattctggtgtccagaatttttgaggagccggacgacgaag

SEQ ID NO: 28963 - DNA, 14243 bp, Oryza sativa
ctgctccggaaatacccagtgggagcccataccggccttttggggcgtatgtcctgtgctctccggatggtgcggcgtgtgtcgacaatccaacagcagcggttcagatgctatatgcaacatttgctgcaaggcgtgctccagagacaggcgcggtgccacctgaggctgcacactcctgctacggtgacctcgtgctgagcatgccgcaccacttgctgctcaagaggcgccttggtgccacagtcaccgcacctgccgcgtccaactacgacgtcggcatctccattgcactggaggcatcaggtatcaccggtgaagctacagaggcagcaccggcacggcagtggctgaagacgtcgaagcgcgtgggccggagcccgagcctgaactgtgcgagcctcgcaacgcggttgggacggatcacgccgtgccgagcgcagatcgagtggtacaaggcattgttcgatgccaacaccgggtattacgacgcattcaagcagcggctatcacctaagaagttcagcaaggccaacatgtaccgcatcaagctcgcacagttctgggatggcgtcctctccatgcttgacaccagccagctcccctacgacttccaccgccgtgccaagtgggtcaacgctgcccacttctaccagctccttgttgagccacttgacattgccgactaccaccgaaacaacctacaccgcacacgcggctcttacatcacccatggccgggagagaaggtagaagcagtagcacaaaaccacattgttcattctagataattcatggactccattaggcttatgcactacctgtactctataggtatgagctgttcgacaagtggtggaaacagaagggctgcacagatcccagcactggtgacacctctgccaccacgacagcgaggaggagcaagttcgctgggctaacgcaggacccgtgcttctgggcgagggtggaggaagcgcgcgagcagacagagagtgccaagagcgaacgcgacatgacatcgctggcgaggatgctggaggacttgcacaagtttgagcgccattccagcgagctggtggagaacaaggaggtctccattgatgtcgttgcgccacagtcgagctactccctgtgggtgaaggagtggaatgagctcaagctccgggaagaagttaggacaatattgtttcaattttgaagttgaaacaccttaagaaaatttaattaattaattaattagttagtttgttgagcatttgtcatctagtttaggcacagatgaatgaatgttagcaacataatataggtgattgtaaatagatttagtcctggtagaggcattgcattatgatgtatctgttcttcatgttgaaatttgcaataacttgaagctgattcacttcacttctgtcaagaatttgcttcaaccaaatctgtatgactctgcatgttttacctttatggatatcaccaaatgtacatagtttgatgacagacttgttgaaaggatcttgtaggcttgctgacttctgaccaagaaaattgtgtgtggagttggattcttctctcttcaggttgagctactggtgtggtaactagtacgagtgtatgaccaagaaaatatctgtttccctgatttgatccccaactctgtcaagagtttgtaatttacattctgaatttcaaaaccgtctgaagcttcccagtctgaactcccgaaactgatcaaaccccagcttctgaaactgtggctactctttcagacgcatgtacaatttcagcccaggagtcgcaatctataagtaattttgtttttccttttgcgaatttggtgcatgtaaaaattcaattacgcagcagaagtttgtgaatttctcaccaacagttcaaagttcatcattacttcattcataatttgttttttttggctgtgtttagttccttccaaagttggaagtttgggttaaaattggtacgatgtgactgaaaagttgtgtgtgtatgacaggttgatgtgatggaaaaagttggaagtttggatccaaagtttgtatctaaacacagcctttgtttcggagtaagatttcattcactcagaatttgagagtgtatagtatactctctcacagcattttttggccgcatatgcgccgtcgtcatatccttccttggtggcggcggctggcggccaagttgctcctccacgcggcgggggcgccgccgccctttcctcttgtcccgccgtttgcggtttgtcatgcgtgatctcaggagcgtacacctgccggatatagtggccggcggcgaggtctcgccggagcactcctcccttgagtgtctcaagaatctgcaatgccttgctgatgtacgaacaggatattgttcccatctcaaatctggcatgtagcagccaaatcttggtatgatcacggcaacatcgtcaaggaaattcccaatatctattcttcgtggtttgccatagactttttcataaagtttctactatgttggcatggcttctgtgtcccaaaataagatttttttttaaacgacccacacaagtatagatggtaataaggcccgagagccaacagttgagccgtgtctggaccgatgccttggtacggtgggccgtcccggcacggcacggttaatggaaaatagtagagggactaaatagacttaatgcagccatataagcaaaggtaagccccaaagaagaggaatacaaaatagacttgctccagccatataagacacacccaaagagttcagggacgaaaaatagacttattattatatggagaagtgtgattggttgtcatgccttattagtcacacacaataaatttatatactccatcgatatacttcataaatttaactgtcaactaacgaaagagatataaaagaaaggatataaactgaaatttaggggtatgaatgaaaataagtaaatctcaggatataaaagggattggacaaaatttagggttacgcaggaaattttctcttattcttaacgcagttcaccggcatatggcaacaattttatcacattaattgtttctggctagctagctagttagagtgtgcgactttggtcgatcttgtggttaattattaggctcaaggaaatttctagtacttcgacacgtggtcgtgccgcgccattgacccatgagccgcgcgcctgtctatctccgcaactaagatacgaatcatatctatagtttttatcggtactttaataagttatctgtatatgagtcgggttttaagttcgtttgcttttagaaatacagattcgtatctgagtcaagttataagttcgttcgcttttgaaaatatagaagaagtcatataaaattttttttttaaaaaaactcgcatgctaatctgagatgattgggctcctaattgcaactcataattttctagaaaaatatatatccaagcgaattctcagagtaatttttatcttaactaaaccatataacaataataaaattaaaatagccttcacccgttgtaatgtatgggtattttttttaagtatacatgtagtttgaactaggaggatcggcgggaagttatggcttaagctttagacctaggatccaaacttcatacaaattatgtataaatttaagaaaaaaaatgcttgaaattatatagaaataaggcgaaatgaagaactcaagctctaggtatggctccaagctgattttgtcacttgttagaagttgtttctctctctcttttttaggagggagtaggtgcgatagtggataaacgtaccccatgcttgcaagctacattttttaattttttgagaagggtatttttaacccgatatctatctccaacaggatatatgtagcttttttaaattaagaatgtagcccatcaaataacccaatctaaaattcgcttgtatgaagatttaaattcaggatcttagagcatctccaacagccgctccaaattggactctccaaacacccatatagccaactctccatttgatttggctagtcaaactagatagtcactctaacagactctctattaatcatctctaaaataacaacggacccacatgtcatcctctactcctcttcttcctctctctctctcccccttcttcctctctctccccattcttttcccctttatttccttcaaagccgacgccgcagagaagctcgctgccaatttccgccgcatcctcaccaacctcgcctccgccgcgtcctcctcggccttcaccgagctcctgctacacttgccgtagagggggagatccagcaggcggcgccggagctcctgttcctcaccggatcggggcggctcgagctcaacctcgcgcgggcccacgcggcatcggacgcgagcggtcaagccctcgccgtcgcgctgctgagccggtccaagcccctcgccgccgcatcgccggagggtacctctccatcggcgctgccgaggggctgcagtggcgaaggacgacgacgacggaggggtggcgccggcaaaggacgacggcggaggggtggcgccggcaaaggacgacgacggcagagggacggcgctggcggaggggcgacgcggaggagtggcgccggcggagaggtcgatttgggggagagagagtacaggacgggagagggaaaagcgtgggaccatgcgtggggcccacaattggctaggctattttggctggccaaatttggccagcgcgaggagcactttggctagccagatggcttggccatccggttagccagtttgttggagcacaaaattgagttaaaattgccaaaatttaacttgaagagtgggataaggaggttgttggagatgctcttggggtgctactcggatcagtacaaccattagctatatgcccttccactctactttaattacactttgcaggaccggtcgagtgacgactgatcatgataacatgcattgcatgcgtgcccttttgatttttgcagagagagaattaatgggaagagatgatcgaatcctaccactagcgtgaataccgatcgacgcctaccactggccatggttgctactagtagcaacacacgattagaaaatgaccaactaattatgaaccactaattgtctcacatatacccactgctgatcatatccatcgatggtacgtgatgttgccggccggcccggccggccggcagttagtaggtggatatgttcgcgtaatcacatcatctcaggcttcttagtttcttcctgaagcctcttgatgatcaattaattgcaaagagaatttgcagtgtccatgaccaaagagaccggccacgagcccaggatgcatggacgcctgttcgttctttttctctctttcttttcgattgccctgtcgctatataattattgatcacttttgtttttagtgatcacttttgtttttagtgctgaaattaataattgacccattatatatttcacaaattttctctgctaatagcctagtatagttaatgtaggacttttatcatttatcatgtaatggagcattttttttatataatgctgtctcaactatttgcagtagattaattacttctttttctactgatagtataactataaatcaaccgttgcgattacttctactgatgattaattaccgtttttccaatttggactttggaatgaatcaacatatttgtctcagggaaatatatgcacttaaaaatgataactgtagatttttgctttgggaaatatatacttccatagggcaatagtattaccattcttcaaattaagctgcattttggtacacgtccaaaaaacgaacatcgttaatttatttgtggacaaaagagttactagatgccaattaatcttttgaacacttcaattttagtcaaacttaggtagatatagagatgaggttctaacttgtaagctatgtggcgaatcgatcgatcgtactgaaaagaacaataagtactccctccgtcccaaaaaaagacaaaccatggtttccgtgcccaacgtttgaccgtccgtcttatttgaaaaaaaattatgaaaaaaaattaaaaagacaagtcacgcataaaatattaattatgttttatcatctagcaacaataaaaatacgaattataaaaaaatttcatataagacggacaatcaaagttggacacggaaacccatggtttgcctttttttggacggagggagtacgtggtatagctagctagctagtggggtggtctaacacctatgattaaaagaacctcacaaagcttcattttttgccagctttttatgggcaatgttatcaggctagcatatatgctacatttgacgagttgccacgtcgatacatatgctctcttagctttatactccctccgtttctaaatatttgataccgttgactttttagcacatgtttgaccgttcgtcttattaaaaacttttgcgaaatacgtaaaactatatatatacatataagtatatttaacaatgaatcaaatgataggaaaagaattaataattacttaatttttttgaataaaatgaacggtcaaacatatttaaaaaaatcaacggcgttaaatatttagtaattaacggaggtagtatatagcgagaagatatttgcatacgtacgatcatatctgtagttaaccggtatatcattggagcttcacaattgcttttttttttcctcgctacacctttcatcacttctatgacgtacccaacttgtcataaacattcggcttaatttcacacaaattcctcaattgcttaacttttctgaaaccaaaccggcagaagaactagcaattatatatatttcaataagcatgagtaaaaaccctagacagaaaggaaattagaaaaaaaaaacttcatcctatgaaaattttgagttggattaataattcttttgtgtatgaaatttcttaagtgagaaaaatccttcaatatacaacccacactttatctggattgttcaacttcattccaatttgaaaattttcttaattcaactcaacggaaaaaagaattccaactcaaaatttggtaacatcttaagcaagaatgcacactctatgaaaactgcccagtagatagtacacagttgaacaaattggaattttgcgagcaacatctacactgtacttggctagcttggaaagttcatatgccgtatatatacctgcccaagtttgattggtgaattagacggcgatattagttgtggtatatatgcctaagtcactatatacggcgtgcacgaacagtagtctacggtgagaaggatggccacttagaaaaattcctcacttaattttcggtttatttgatttgcgtacttaaattttctaccacgaagaaatttaaagcatcttgggataaaggggcattgtcgtatgttagcatgtatattattacgcacatgtacagctgtggcatccaaataattcagttaattttctaggtgctcgatctattaatttgacatggctgtagaagcacatattatttccatagttaactgaaaaatttggatttactaatttgttattgttgctgctagaaccttttatattatattgtagaatttcaaaccatatgttagttgttaaatcgaaattctcctgaagtatgatatttatatactccctctgttctagatataaatgtcattgttttacacacgcaaaatcaacatttcaaaattctagctaataattgatcgaactaaataatatatgtatcatgcatatattcgtatttaaaaaactttttattgctattgattttctagtttctgataatatatattatgatatcagaaactagtgtattatttttctcacaacctccaacgtttatatatattatgaaatatatattgctattgatttattgctatttattttctagttttttatacactagttctatattttagaaaggaggggtatctagctacaactgaccagagcaaacatcgattagatagattcttacgcaatacaagtacacaacacaacacaacacaatacaacaaactacaatctctttcagagaaaaaatctcgaaagaggcgagagttttgggcatatatatccggaccaaagacgagatgaagcatatatacctaacattttcccatgaatgcgatgtatatatgatgccggaacgcttcttccatttcaatttgtttggccttgttcttggtcgatatgccgaccatgcatgctactgtagatcaatttggccaagatacacatataagacaatggagataatgcgtacgcgtgcacattattgtgaccaaggttaaccgtctgatcattgacttcaactagtgaagtgaagtgctctcgagaggatataccctcattttttcgttttatctaaatagttatgatttttttaaaaaaataataagatgaaataatatatcatacatcatttcacaaacatgcatggtaaaatttaagttttacaagttgtaaaataaaataaacaaatatgaatatgaatatatatgtatataagctaaagtctattatttactttgttaccacttgtattggtcaaatttgagtttatatgtttgtagaggatatatcatatactaattttttattgtcaactttttctcataactcttttggatgatacgcaagaaaatgaggatatatatccctgtcaagagtttatattccctaaatttctgcgtgtgcacttgagtcggtgatatctccttctcatttagtgtgggcaagcgcattgttttcctttttagcattcggctgagtattttactcatgttttattaataaataggacaaaaatcccgttagcttttcttttataaaaaaaaggctagagataaaccccaaaaaaaaccagagaggaaaatagaatatttttcataaggaataaatcggatgtgacaaggtttcaggagggcatattttgtgtgtgcctcttaggctgggtttagttcccaactttttcttcaaacttccaacttttctatcacatcaaaatttttctacacacataaacttttaactctttttttcaaacttttaattttggcgtgtaactaaacatacccttaaacgtttatttaggtacctctttaaacagttttggacatgtatcaatgcatcttttacttctggtagttgaagacttgaattggcatcaacaaccaaaaaaacaatgtgtacgttgttgataaatcatgcacaaagctggggaacgaaatgggtctgaccgtctgagaccaaacataccatgtgccggaggcagaggatgcattgaaaatacagggcttccattaaatcatattgaaagttcagcatggtgtcaggtctatgctatgaatgagaatgcagatagttcaggccaaacagatcccggctacccaaaaatttttcaccctgtgactaatttgtgagataaatcttttaagcctaattgctccatgatttaacaatgtggtgttacagtaaatatttgctaatgatagattaattagatgtaataaattcatctcgcggtttaccgacggattctgtaattagttttttttattagtgcctaaatacccccatacgacaccttatataatacccgatatgacacaccaaaactttacaccctggatgtaaacaccccgtcggtatgtggcaacaagagcttctccctttacaacatggaatgtctcattccatcttgtcctaaattaattagcatgcaaaaaaagcatgaggaaaacaagtcttgcccttctatattcttttccccacaacatacatagctctcgcaagattggcaattcttatccaaatatctatgtttgtaacagtagttggagccaatggtgacatcaaggccagacaggaaaaatcttttattagctaccaataattttttgtagtggtttttagcggataaccatgtcgcatgtcaacattgttgaagagccacctgaccttgtctgtccaagaggtggctccgttgcttcattatagtgtgtttcagcaaatggcaccctattaagcatgaacctcataagtcataagatcaatacaattttacttctttactgtcaatgttttaccattcatctaattcaaaaaattaataatatgctaaagtataagtactgaaagttcctttgattataaaagatggcacatcaaataaatatatatatatatatatatatatatatatattaaatacaacgaatagtttaacgctatgttaaaagttagcggcatcatctatttaacaaacaaaaagagtatatccttccacatcatctctaaatccatccaaaaaaatgtgaccattaatcctaatctaacacacaggggcgaaggtacagtcaattaccggggtcagtagaccccgatgattttattttaacctctcatatcctctttattttaccagctatgaccccggtgaaaacaaatattagaccccggtgacattaattgttgattgttgtgttaaattccaattgacaactagaaacgatactggcagcagcaaatagaaaattacctagcatttatgattatacgtcagccgaatatgcatatactttgagtttttgagatttgagaccatgcataaggccagtggctcataacttttcaaattccctagcaaaataatttctataggaaattattttaaaaaccatattaatctattgtctttcaagttttttataagctaataatgcttaattaatcatgtggtaacctcgccctattttgcgtgctgggagggaagggttcagatcccatagctaggtctgaacacacccagattgtatcagggttcaccaattcgatttaaaattagattccaaatatagcaatatggctttttttttaccaaaatttgatatttttttattaatttggtttaattttacaatttcaaatttgaattcttgaaaaactattccaaatttcactcaaaatctacttttgtcccaagttggaacatcgaaattgcgttgttttcaatccgttttgtttgaaaacatagaccatggctagtaatgaccccgacgatcatttatcctggcttcgcccctgctaacacaccaaaagattatctgagaagaagaaaaaaaggcacacaaaaggacatgtggtggctatgatcccaggatgcccaggtgcactgccatttgccaccggcctcagtggcagtggcagtgtcagttcatgttggaaaagcaaagctgtccacgcgtggcgcgccatggcgggaggaggaagacgaagacgaagcagccgcaaccctacacgcctctctcacctctcctctcctctcctctctctctatatatagctctcgtcttcttccacctctcactcactcaacccaagcaacgcgcagcacaccatcaccagccaagtgttcgacagagttcttggcgagctagaggtgtcgaacaccttcaagagaggagggatggggaaggcggcggcgatggaggtgtcggcgtcggcggcggcggaggcggggatgatggtgggtcatggggagtggcgcgacgacgacgggcgggcgcggcggatggggacggtgtggacggcgagcgcgcacatcatcacggcggtgatcggctccggcgtgctgtcgctggcgtgggcgatcgcgcagctcggctgggtggccggccccgccgtcatgctgctcttcgccttcgtcatctactacacctccacgctgctcgccgagtgctaccgctccggcgacccgtgcaccggcaagcgcaactacacctacatggacgccgtccgcgccaacctcggcggctccaaggtccgcctctgcggcgtcatccagtacgccaacctcttcggtgtcgccatcggctacaccatcgccgcctccatcagcatgctgtaatcaatcaaacaatttctttgtttcgattcggtttcgatgcaaactccattgatgatgtgattgctgatagcttagttgattcgatcgagcagggcgatcaagagggcggattgcttccacgagaaggggcacaagaacccgtgcaggagctcgagcaacccgtacatgatcctgttcggcgtcgtgcagatcgtgttctcacagatcccggatttcgatcagatatggtggctgtccatcgtcgccgccatcatgtccttcacctattcgacgattggcctctcgctcggcatcgcgcagaccgtcgccaacggcgggttcatgggcagcctcaccggcattagcgtcggcaccggcgtcacctccatgcagaaggtctggcgcagcctccaggccttcggtgacatcgcgttcgcctactcctactccatcatcctcatcgagatccaggcaagcagctcgccgccgccattgccgcatcctctgtttcttggcttcttctatttcttgtgtcctaacagaacagagcgttgttgtgtgtgatgtcatgtcaggacacgatcaaggcgccgccgccatcggaggcgaaggtgatgaagcgcgcgacgatggtgagcgtggcgacgacgacggtgttctacatgctgtgcgggtgcatggggtacgcggcgttcggggacaagtcgccggacaacctgctcaccgggttcggcttctacgagccgttctggctgctcgacgtcgccaacgctgccatcgtcgtgcacctcgtcggcgcctaccaggtgttcgtccagccgatcttcgcgttcgtcgagcggtgggcggcggcgaggtggccggacggcggcttcatctcccgggagctccgcgtgggccccttctcgctcagcgtgttccgcctgacatggcgcacggcgttcgtctgcgccaccaccgtcgtgtccatgctcctcccgttcttcggcgacgtggtggggctcctcggcgccgtctcgttctggccgctcaccgtctacttccccgtcgagatgtacatcgcgcagcgcggcgtgcggcgagggagcgcgcggtggctctgcctcaaggtcctcagcgccgcctgcctcgtcgtctccgtcgccgccgccgccggctccatcgccgacgtggtcgacgcgctcaaggtgtaccggccgttcagcgggtagagagaatgtgagatcgatcggtgaccgtccgatcgaagtagtactagcactagcaaacatgtgtacgtcgtatgggcagcagagcaacactgccgttgccaggtggggcccaggtgtgagataaaaaagaacgaggtaaacaaaaaattatttactgagctttgtgtggtgttttgtcatgtaacaccttgtagattcttgtattatgagtttgattgggataacaaggctttaatggttagtgaagcacagcttactgtacgtctctgttttttttttctcccttcgattttgctattattgtgtttagttccaaataagctaagctaagcttactagtaccagtattaaacggttgaatatttcagtgatattcaagaagtggtaagcaaatgactgcgtatgcaaatacatttgtctgatgaaaatgacttttttaaatggaatttttgttaaaatggtcaatttttttcgatctatgtacttagtgttaattaataattgttatattaagataaataagattgttatatcttaagatcaagattttgttgtgatatctatttctctcaattgtgatgttaacagaagataatttggttatgagaaattggagggagtattatttatatatctatatttcactggaaaagtccacatgcatgtgatatgtcattcggaagatgaaaatgaaatctatacatggcgcaatgtgcttcagtgtgttgtgcactgttgtaaatatattgtgacgttcgaggctactgatatgatggttgaaacttgtatttgtacatttgatgttgtgattgtcagtgagaccattggtggagcttacactacaatttttttccagggatattgcattattacatatacattatccaggtactttgtacaaaagagcaagcacatcacactagcaatgtaaacatactaaaacgaggtgaggcattagcgcatgattaattgagtataaactattttaaacttcaaaattggattaatatgattttttaaagcaactttcgtgtataatttttttttaaaaaaatactccgtttaatagttcagg

SEQ ID NO: 28964 - DNA, 16556 bp, Oryza sativa
ttatgctttgtgtggtgttttgtcatgtaacaccttgtagattcttgtattatgagtttgattgggataacaaggctttaatggttagtgaagcacagcttactgtacgtctctgttttttttttctcccttcgattttgctattattgtgtttagttccaaataagctaagctaagcttactagtaccagtattaaacggttgaatatttcagtgatattcaagaagtggtaagcaaatgactgcgtatgcaaatacatttgtctgatgaaaatgacttttttaaatggaatttttgttaaaatggtcaatttttttcgatctatgtacttagtgttaattaataattgttatattaagataaataagattgttatatcttaagatcaagattttgttgtgatatctatttctctcaattgtgatgttaacagaagataatttggttatgagaaattggagggagtattatttatatatctatatttcactggaaaagtccacatgcatgtgatatgtcattcggaagatgaaaatgaaatctatacatggcgcaatgtgcttcagtgtgttgtgcactgttgtaaatatattgtgacgttcgaggctactgatatgatggttgaaacttgtatttgtacatttgatgttgtgattgtcagtgagaccattggtggagcttacactacaatttttttccagggatattgcattattacatatacattatccaggtactttgtacaaaagagcaagcacatcacactagcaatgtaaacatactaaaacgaggtgaggcattagcgcatgattaattgagtataaactattttaaacttcaaaattggattaatatgattttttaaagcaactttcgtgtataatttttttttaaaaaaatactccgtttaatagttcaggaagcgtaaaacgaaacaaactttcttccaatctcctggtgccgaacgcagcctaaggctgagtccgttttagcgtttaggttgagatttttagaagtacgtgaaacaagacattctattaacacatgcatgattaatcgaatattaattattacaaactaaaaatgaatagatttattagttttttagaaaacttatatatatatatatatatatatatatatatatatatatatattttgcacgacatagtttaatagtttgaaaagcatgcttgcagaggttattctgaaaagctgtatagaacactttactgtttatttgatcctgcagtgattttctagacaagtctagagatgtacaagcatcacatcattacaccatggacacacaccaataatttggagaggaatatcttcatgatctgtgaagtggtgcatccactgttggtggattatgataactgatagagctccattagttcatacaagcctcttttctgttctccccaaaaaggagatagttgagggacgggcaaaatgaagataggattggatttcatgtgcatatatgcatgcatccaagggtaggagggcccaaggggtgtacatggcagtgtttaccagggccatagggtgttgctttctttgattttggcaggtgaattaaggctgtttttggccagggatcttggcaggtaccaaaaagaatggctcacaaaggattggaatctttggcactcctgtttgttagatcctctttctcttgcaatcttgctatcatatgatgggctggtttactttgctcagatttatgattggaagttgatgtttgttgggagctagattttttgcaagttaataccgtagagtatggggttctagatgaagtgctgtttggggccttatgttggcatgatgcttttttggttcagtataaaaaatcaacacttcctcaatcctcatgcatatgaacattgtgcatggatcacatctctataacttaatacaattgatattaatacttgtatggctttagataatagaaacgtttgcatcttcagcctttgtcattaagcacagaaccagtaagttttaatcaatttgataaaacaaaagacatactgacgtgtaattcttctgcgcgttcgtggaaataaaaaaaagacataagaagctgagacaaatccagccacaacatcttataaatgataacttgctgaattaacgataattttttttatagatgccatgtaaagtggaataaaagattataataattgtttgattgattgtataagacaatgaagttgatgcgggctaccattagagaatatatcctatgcacacaagcttcccgtgcacactccgtgcacaccaactatcaaatggcatagaaaattctaaaaaaaaattgaacacacacttccaatagtattgcacctacgtgtgaaatgctatcttaaaattcattatattttagctgtaacaaaaaaagataaaattttgacagatttttacccttaaaactattagatttttcactttttttgatagggataaaatacaataaatttgaatatgagactttacatatatgtgttatactattaggagtaaatgcccatttttttatataatttttcgtgacatttgctagttggtgtgcacgggaaagttacgtgcataggatgttcccgttaccattaagctaataagaataagatgtctgactttttttcaaccaacttttcttcctagaagagagaagcagctagtaactcagtaattgtaacaaaaagaaccaaattaaaccatatatagtaagttgtttttacaacaagaatgagtgagtaatgcacggcaatggtgttttcacaggaaaattaggttgaaaagttgaaagtagcaggcacatattctgtacattcttttcttaaacttgcgcgcacagttaagtccctttccacccaaagaaagaaatcaacaaatattccttttcttttgctgggaaatcaacaaataccgggataagaatatatacggagtgatctacatttgcagacaagttatatatattcttcactcaatgcagtacacatacatcaccagatgagatcaggagggtttacgcttttttttcccatgaaaatcgtgaaattttgattttcttttttgacaccacatgaaattaaagtagattcgaagtgaaatttcaaatggttttcgagaatgcaaatttcaaacaataaaaagttgatcaaactttgctgtaatttgacgaaaaatgtcataccgtttgaggttgaaatccaacactcaatcgaaaagatgaaccctgatcagaggtagtggagtatttgcacagagaagcaggcttgcacgcatgcatgggtagcccatactgtttaaccgagagagatcgatgtgttttaatttaattttgctatctattgactggagcatctgtattctgaaagttgctgcattattgctaccctggatatattctattctactgttgaagtatttcagataagagtagttttttagataagagtagttatccagaaaatgttagacattgtggtccataaacactacagtaaattgttcgatttgagtccacgacaacgaaataaagtatggctgtacatgtatggtcaggattactgaacaagaatggggcagccatatccattaagctaggcttggtatgtttgatgttgagtttatacaccagtgttaagacatgaagttagcacacattaatactatgggctaatttgaaatagattatttgctagattattactacggattaattatctacttgattataggaatagattaaatattttaataaataaacttaacagagatatcttagaataagtggtctgagcaagttttttttttttttttttttttttacaaaacatactttatagatgtggagcaaataatctgtgttaataatatggtgaagtagctgaaaagaaatataaaaagtatagcatctctcgatacattttcaaaggttttatggatgaaaaattaaatatctgccatcaaaataatgtagtctacaaacagttcaagacagtatattatatttgaccatttgtgtatgacactgtcctatccatcatctatgagatcatcacttccaccttctcagaatacaaacaagattacttcaacttttcaagtcatacttccaaaaatacaaaaaaggtgtaggacaaatcttaattcaagatgaactgttcattcgcattttgctttgaaactgcaataggttgcaccctttcttttcatcatttccttgcagtttcagtgtaccaagcagggggcttatatctgcattcatgcataggcgcaagaccatatcaaattcatccaaattctttgctatcctccaatttgaatcgatctgtacatggagtcatcgaatttaattccgccctcatcaccttcatttgcgtcttgaataactctaattaacactgcaacaagaaagagtatcatcatcattcaacaacaaaatttgatctgatgattatctatcaaaacacaaattcaacaatacttgagacatatcgagagataccaaaatttttggtgcaaatttggtatgtcttaccatcagagatattaagaggtatcaaattttatattaaaaaatagagaaattttatggtccttaaaaaaatacctcgaggtacctaaatttcatactaaatttttttatacatcaagctacttagtatatagaggtaccaaattttacactaaaaaacatgggtactttttaaggatggtaaaatttcacggaaaaaaaatatggtacctcctgtaaatcctgaaaatcactcctatcaaaataaagcccttgttaaaatccaaactttttcttcaaacttctaattttttcatcacatcaaaactttcctacacatgtaaacttttaacttttccatcacatcgtttcaatttcaaccaaacttccaattttagcgtgaactaaacacacccaaaggaaacacccacaagagtcaggggagtctcatcccaaaataaatgtggccacgatcttgaaaaatgcgaaaaaaaattcagtataattaggacggtttgcttacagtgagtttcaggagtcggcgcacgagcgcatgctgccggtggccgccggcgccacggcggcggagcccatggcctgccggtcggcggcgcgcctccggacacaccggtacgagcacgtggcgacccagaacgcccacgggagcgcgacgagcgccagcccgacggcggggagccagtgcggcgcctcgtgcggcggcagcaccacgtagccggcgaggcacccgccgccggcgagcacggagaggagtagcagcgtcgtcaccatccacacgcacgcgctcccgcccggccgctcctccccctcctgcatcggcggcgccatcggcggcggcggcgaaagaggatcacggcactaggcggcgacggcggcctcggcggcggcgcgggtcaagaacaaggacgaggcggcgtgcatggcaatggtggcgccaatcgcctctctctctggatttgtgttcttgttcttgttcttgttcttggattttgattgattgaaaaaaaatgtgccaaaaaagttttgatattgttatgttgtttgggttttgtggatcttggaggaggagaaacaacggtgacccaaatttgaagcagaggtgcagaggaaattgcggggagttaataatagcttggtaataaaattccatttaaaaaactaaagcagcgtgtcctaattccatgcagaaacatgcaaaaactggcaaagataacaaaacatgcaaaatctgtagaataccaggtagctttatatggtattcacattaagattaaggctctttttagagggacatttaattattccctctttagaaagatgtaactttacaggattttcgtagaaatttgttcagttcttgcaaagttcttttgaaaatcttccaatccaaaggaggccagaagtgttcaccggctgtgcattctcagtttttggggggaatatgttggggcactgaacttccgaaaaacaaatctactgaaacaaactttaagttcaaacataaagtttaggaaagatatcccatgataatagatttctgaaggttgtgttgctcactttaaattgcttaggtatggttttcatcatctgtgcaatcaaatatagaaaaaaaataaaattcgagaattttcaaaaaaaatggggtaaatattacgttccactgcagagtaggctgttcatgatctgaacttctgaagatacaaacatataaaaacagtcaacttaacagtgctttacatttacacaaactcccctgcacaatccacaccaaaccagaagcagaaagaaatacaaaaccaaaactaaaaaacaaaaacaaatttgctcatccaaattgcacacaaagcagccacaacacatgagcaggttgatgagatcacacacacagagagagtgagatgacgtcagcccagaacgctgtaaagatcgccattgttgccgtagaagccatcgccgcccttgtccttggtgctcttcctcttggagaagatgatgtcgccgatgagaggcacgatgggcttcaccttcctcgccttcctcctcctcccgaccagctcgccgtcgtccacctcgccgaggctcaacgcgtggctgaacgacggcaggtactcgcacgacgtcgcgcgcgacacggccgcgccgacggcgtcgacgccggcccaccgttcgctcctgaacgtcgccaccgtcgacgacacgtcggtctcgccgccaacgctgcgccgcgccgccgctgccgtgtcgccggcctccatctccgccagcttcgagaggccgcggtggagctgcgcgttgagcgacgccacggccatctccatctcgctcccccgcttcttcagctgcgccacctcctgcctcgtctccgccacctccgcctccagcttcttgactgaccgcatcatcgccaccgtcaccccctcgtcgaccacgccgccgtcgcgctcgtcgtcggcgtcgccgccgtcgttcggcggcggcggcgacgactgcggcgaggacggtgccgagtacatcatcggcacgacggccggcgctgcatcctcctccacctcaggctcagcttccatggcatccggagaagaaacagtagcatcatcactatcgccgctagcttcatgcttggcaatggcgatgtcaacaacggcagcagcagcagcattgccgttgctgggtcgccgggagtagccgtcgccgacgaggatgcgctcgccgaagacggcgacggcctccctgacggaccggaaagggcgtgccgtgtcgacctcgacacggtcggtggccatggcgatggagaagcacagcaattaagcagcaacacgaggatcgatcgatcgatcgaacgttcttggctgcaagcaacatgcacgatcgcttggaggattatatgaaggggcgaagatcagtggatcatcgcttggctgcaggtagtttctttgcttccacttcagtagcacactggccaaccagcaactagtttcccaatagcaacaagcaagaggagtgacttgccaccaaaaagaagtcagataaaactcccaagctaacctcatctgtatgtaggagtggagctgaagcagggatgctttctgaccactcttggcaagcatgcaacgcaggcagggtatgcagcatgctattcataattccgatgctggataaaaatcactcatggtaagtgtactgattaaccgaaaaggcgaaaacaactgataaaattcagataaatcttatcaaaattttaaaattcagttttgaacatgactccagggttttcgattatgcgctctcttcggtctcactggctctgcagtccatccgctcgtaaggtcatctgtggcctttaatgggtattgctgcttttggagatttcttgggagtgtactgtggttttgcccctttcctccaatcggagttgtgtatagccaccgtatttttttcttcttagctacaatttttgttttgctttttcttccttccctcggtataagccgctctggctgattgcattgtgtaacaaaaactcttttccctctaatatattgacgtgcaattcttttactcgttcgcaaaaataaacatgaccatcaaatcgagtgtctatggtttcaacccgatccgaaaagtctgtattttacgaaatttggtccggtttccaccggattgtaaatcctattaacagcagcatgaagcataacagaacagaaattctggtgtcatgggggtggttgggagaaatcatagttttttcagttggggcatgcagttcttggagtggacaagatagggaccttgtaacaaacagcccttgttgttaaggcgattggggacataattctaagatggaaaaccacaaatgtgtattggtaggaaagtaacacaaaaaacataagcaaatcaaatcacacaaagcaaaacctagtccttctatgatcttttacagattataagtcgtttttactttggtcaaaataaaactgattattagtcttttttactttggtcaaaataaaactgctttaagtttaatcaaatttgtagaaaaaaaaaagcagtaacaattttaacccaagacaaatatattatgaaaatatactcaattatcgatttagcgaaattaatttgatgtttacatattgctatatttatcaacaaactgagccaaactcaaaatagtttgacttttatcaaaaccaaaacgacttagaaattactccctccgtcccattataagagcaaccataagtttccgcgcccaactttgatcgttcgtcttatttgaaatttttttataattagtattttcgttgttatgagatgataaaacatgaatagtactttactcgtgacttatgtttttaaatttttttcaaaaatttttcaaataagacagacggtcaaagttggacgcggaaaaccatggctgcacttataatgggacggaggtagtagaatctaaaacgaagggagtatattactacttgaactattcccaccagtcaagaatatatagagcatattattatttgggggctgctatataccggtatcccgttgggatactgtcccaacgggatcgctcccagtccacctccctcagatgcgagagcgcaggcccccatgggagcagcgcagacgaggctgacgccggtggcgcagacgcggcggccgccgccgagctccggcgtgaaggacgcggctgcctgcgacgagctccagcgtggaggacgcggccgccggcgagctccgacgtggggcatggtcgcatgaacggcggagaatcctgcgtggtgacagagacggcgccgtcgacgagctccggcgtggggcgtggacggcggaggatcctgcgtggtggtggtggcggcaccggcgacgagctccggtgtggaggacgcagccaccgctgaggcgtggacgacagacacggccgctggtgacgagctcccgacggaggacgcggtcgccggcgacgagctccgataccgtggacgggggaggatgcggctgccggtgacgaggttcgggttcagtacggagcgtcgacgggggaggacgcggccgccggcgacgatgcctcgacacctcgacgcccagctcctggtatctagtaggtatcatatgaatatgatacctcataagtatcacccccgatacatcgtagaaatcacatgatacatgatagctatcacatgatacctcacgagtatcgtctgatacgtgataggaatcgtccgatatctgatacgtggtagaatcgcatgatacctggtaggtatcatccgataccagctagttattaggtgatacctgtaaggtatcatacgattcttaccacatagaagatgatagttgcgaggtatcaagtgatacttgagtaggatcatgttaaacctgggaggtatcatgatcctccttagtatcatgtccggtttcaccaggtttcataggtgatactttgggaggatcatgtgatacctgggaggtatcatgatcctcatctgtatcatgtctggtatcatcaggtttcacaaatgatatcctaggaggatcacatgatcctcctcgaaagtatcattacgtgtgatacctgtgcagtaccgcatggccctacttaggtatcatgtctagtaacaagattctatgggtttcacaaatgatactttagtaagatcgtgtgatacttgcgtttctaccacatatcagatgatacttgcgaggtatcggatgatacctatcaggtatcatgcgattcttaccacgttgtggatgatgcttgcgatgtatcaggtcctgatacctaccaggtatccatgcgattctaccacatatcaggtgatacttaagaggtatcagatgatacctatcaagtatcatgtgattcttacaatgtagaagatgatacctatcaggtatcatgcgattcttaccacgtagaagatgatacctatcatgtatcatgcgattcttaccacgtagaagatgattctaccacactccacagccagccataaccaagttagcaagttcttttcaccccatcttgtctctttgctcccccgaagcagtagatggataggatgaaggcccggactcgcagcgggatcaacggccggcgacgaaggcgccgaccggagagggcccgcgacagagttggggcgccggcggagggcgcaccggccggccacgcggatggagccggaggtgggcgttaacggcggcgccgtggatggcggacggcggtgctggagctccaggcggcaatccggcgaccacatcgctggcagccacgtcctccgccgtcgctccctacgccgggctcgtcgccgcagccacgtcctccgccgtccgtgcctcacgccacgctgaagctcgtcgccgaagtccgcgatgccgggggatcgttgggggtggccgcgtcggagctcgtcgccggcgaccgcgacctccgtcatccacacccatgccacaccggagctcgtcattgacttagttgcagcagcacgcatgagagagatgtggtagaaagaatagctagatagaagaagagtggattggttggtgtctatcctatcccgtcgggacggtataccggtgtttagcatttccgtattatttactctattgagtaaattacattgctgatacacaaatttggattcagacggcagtggcactccggaacgatctcctacgtgcgcggacagctcacccatgacccatctacttaaacgtgctcatcgatgtttcaccccgcgtgatctgaactgagaagcgccgtcgtgtgaccaatggcgcgccccgcacgccgaccccgccccgtcgccatggccactcctcgccggagcgcccgactagccgctcagaggacgacgacaccgccagccgcggcgccgccgagaagggtgcgcaatcggcggcgggagttccgccactaggagaaccaggcgatggtgacgaaatacgtggcgctgcacctggtggtgctcgtcgacgccggccccggcaccggcaagagcagccagatcccgcgcctgctccacgccgccggccacggctgcgtcgtctgccccagatgtaccgcctcgccgccgtgctcgcggcgacttgcgccgcggccgacatgcgcgcctagctcggacgccaggtggggtactccgtccccctcgacgaccgctcctcggacgccgacacggtcgtcaagtacatcacgcacggcgcgctcctccgcgatctcgccgccgacccgctcctcacccgctacggtgctgtcgtggtggacgacgcgcacgacgggatggcgatcacaggtgtcgtgctcagctgcgtcaaggccgcggcggcgcgccgcctggaccttcgggtcgtcgtctgcctgaaccactacagcaccctctgcaagggcgttgtacacggcttcttctccggctccggcatggacggcaaagaactctggttccgtacctactccggtctaatcgaccaacattacctcccggagccggtgacagactacctcggcgcggccgtcgacgcggtgtgccgcatccacacgacggagccgccgggcgacttgctggtcttcctcccgggctgcacggacgtcgaggcagccgagcacgcactcaacgggctgtgcgctgctggggctagctacatgctgcttacacgacggcctcccgatgcaccggatccacgacgtgttccggccggcggccgacggcaggcggaaggtagtgctagccaccgacgtcgccgtctgctcggtgttcgtcgatggaatcaagtacatcgtcgactccggctactgcggaacggacaacgcccccgtacatctgatcggcggcggcggctcggcggcggcgcgcctggttcgaggcctgaaagcggtcgtccataaatggtgccacataaggcgtaaggtgaatgagtcgccgaagatgtgcccgacggggacgttcttctgcctgtgtacacgagagaggaggagaaggggtttccatacgtgtggaatccggcgaacaagatggcggatgtcaacgccctcgtcggcgtcatcctcacgctcaaggcgctcggctcgtcggcgccggaggtgacgacgtcgtggccagcttcgacttcttcgagccgccgcatgcatagttgattcattgggccgtgaggacgctcaaggcggccggggtgctgagccaggacggcgaggtgaccgagaccgggaggcgaattgcgcgggagatttcgggaagatattactaagcgaattcaaacatccgtgcgagccactgaaccgtgggcttgacaggactaaactagtcatcaacctttattttttttaataactataataaatgctcccaacagatgaagtctattttaatcctattattgttatatggtttagttacttaagatgaaattcactgtgggaattcacatgaatatatattttaatcttattattgttatatggtttagttacttaacatgaaattcactgtggaagttctataaaatcatgagcgaatccgattgtctcaaattagcatgcaagtttttttaaacagatttcttatatgattccttctatattaccaaagtgaagatcttaaaaaccgactcaaatacagatatgtatttcaaaaaccaaacgaacttaaaaactgactcatacacgaatgacgtatcaaaaaaccagcaaaaccatcttcaatttttataatagtagagaagagatatagattaaaaccaaaaaataaaattaaaaccgactcaaacacgaatgacgaactgcgaaaacatcttcaatttttataaccgactcaaacacggatgacgaaccgcaaaaacatcttcaatttttatagtagtagagaagagatgggatgaagcattccagtctttgctcaagagctatagccaattattacaaggttcacacaaaagtaaactcacatagtgagtatgtagccaaagtaataaaaccaaacaaggtaaagatcccacgactactgaattctattggtgaatctccatccgaagttgtcaaagagctgcatgatcatcgactcaagtttacgacacacatcttttattagcttgatataatcatcatgccgttttagttgagcccattcccggagctaatgtgttgtcctgaaaagaacatgcaaataagattttgaaggtgatctatcaaaaaccatttcatttttacttaagctagaggagactaacatacagcgaaagctccaacaagaataagttccttgatctttttattaccacctacaagccaattcccaaacatgtgagatatactatgtggatggtataatccaaactcgaattgtatagatctccaaagaaatccggcaaaatggcaatccaggaaatgatggtaaattgattcttttttcataaaaaaacatctcaaactaccacccaattcctcttagccaaattgttttttttgttaaaacaacaagattccatataaatatatcatcctcctctgttaagttaacatgcacaattgaagcacacaaattgtgccatctaatcaagttttgaccaactaattatcacggaacagtactcaaaacacttgtaacttagcagtttttccttctaactatagaatatgatgatgggtatttgtcctttacagaagaattacctaatcaattatcctccgagaatctaacttgttcaccattattgataaaccaggaactcatatttagaaaagaacttttaaccttcatcaatcctgacaaaaaatgggaatccccttgttccgctcaacttagttatagatttagtaccaagatatttccttttcaaaagatcttgccacacacagtgttcatttattaatttaaacaaccacttacttagtaaacactggttttggatttctaaattatgaataccaagtccccgttgatctttatgctgacaaataacatcccatcttgtcaacctatattattttttatgttcatcaccttgccaaaagaaacgggatctataataatcaatttttcgaagaacccttttaggaatctcaaaaaacgaaatcataaacataactaaacttgataacactgagttaatcaaaaccaatcgcccacctacagacatatgtttacccttccaactactaagttttttctcaattctttgctcaattgttaactaatctttattacaaagctttctaaaatgcataggaataccaagatatctaacatgaaaatctcccagtttgcacccaaaaatatttgaatattgctcatgacattcctttgcttgtccaaagcaaaataattcactcttgtgaaaatttatcttcaggccaaataacttttcaaaagcagttaaaatcaatttcatatttttagctttctgtaaatcatgctctaaaaaatgatagtattatcagcatattgtaagatagataaaccatcatcaactagatgtgggaccactccagaaatttaaccataatcttttgctctctttattatatagctaacatcaataactatattaaaaagaattggagataacgggtcccgttgccttaaacccttatatgtttaaaattttgatcccacttggtcattcactttaatgccaacctgtccaccttggataaaagacgcaatcaaatcacaccatttttgtgagaaaccattcattcttaaagtttgttgaacaaaagaccattttactttatcataagctttctcaaaatcaatcttaaaaagtacaccactctttttttcggtgcaattaatgtatcgtttcatgaagaataacaacaccctccataatattcctcccaggtataaaagccgtatgtgtggggctaataaccttctgagccactatagaaattctatttgtagcaactttagtaaaaattttgaaaccgatattaagtaaacaaataggcctatattgttaaattttgaaagcctctttgcacttgggtagtaaaattatagtgccaaagtttagagactaaagatgttaattaccactatgaaaatcattaaataaatcaaccaaatcgggcttaataacattccagaaaacctgataaaactcagctggaaatccatccggacccggagctttattatgctccatttgaaaaatcgcatctttaatttcctcctcagaaaaatcttgtactaaagcattattttctaattgagaaacctggggaatattacttatttggctttcatctaacgttaaagaaaaagcttcacgagggccaaaaaagatctttataataagtggtgatacatgcctttaaatttgcatcaccattaattaccaatcaccatcctgtagctgattaagtccttgttttcctatgcttaccatttgctaccaaacgaaaatatttagtattcgagtccccttccaaaatatctttagtattaactcgctgataccatttaatttgcttttcacttagcaaataggataacctattcctcaaataaagtatagaatcaagctctgagttaacaaagttgattctccatttttatccagaaaaacaagactttttctctttgtaataaaggccactagtctgtttggcccaacctcttaaaaattgtgttaatctacgaatcttagcctgccaacgctctaaatgagtataatcatcaacaacacttaaccaaatttgcttaaccataactacaaaaccatctcttaacagccaacctaactcaaataaggctacacaacgctaatatttttagtttattttatctgatttttcaacattattgttgacattcttatacagatatattttaattactagtcaagtgtaattgatagtaacctttatctctttctctcgtacaactatacattattttaattatgttttattcatgaagtatctttcaaaaaaaaaagtttcatgaagttgatatacactatattataacacgtaaaatgatc

SEQ ID NO: 28965 - DNA, 16300 bp, Oryza sativa
ttgacattcttatacagatatattttaattactagtcaagtgtaattgatagtaacctttatctcttcctctcgtacaactatacattattttaattatgttttattcatgaagtatctttcaaaaaaaaagttccatgaagttgatatacactatatcataacagtaaaaatgatcaagataaaattgcctagctagcatgttaatatatcactattcaaatttgcagtaacagagaaaccagaataccaaatcactgaaccggtgcaaaataccaaattactgaactagtgcaaaataccaagtcactgaacgagtgcaacattcgtaaggccatacattaatgacttggccaaagagttatactacgtaatgcaattaactataccgtactgcagaagaaagaaacaatcaacaataccacaacttaactttgtctgtaggaactctacaatatccattaacaacatcagaaatcactttcattcttcagagaactttttaggacctccgttagaacactgtataacaacttatgcctctctagttgaatttctaaattatttattttaacttcagcttcattcttcagtaagtcttgtacctaaacttcaagctgatgaagcaaagattcctgtcctggacgagatgcctgttctgatcctgaagaaaatgcactctccagctgtcctattacataagcaacaaacccatcctgcttctgctttggaggcttcattttgatttcagattctttcttccaatgcagtaactcttgtacctgaatttaaagctgaagaagcaaatatgcttgccctgaaccagaagcaattgcactctccggctgcccagtaataaaagcaataggcctaggcctttctagctatctcccccttctggttcgagaccttcattttaatttaatcaaatattttttaaagttttctctaaacttttcacatttttcacaaccgagaagcattataaacgaaggtaccataatgaatgtatgtggttgttgtgattgtgggtagctcgcttaactgtatcacttaaatcttgatctaaagcatgcttttcaaattcacgggctgacagtacatgcaatagaatttataaaatcacgggttgcctttcgaattcacattaataggtagaaggagaagataatggcttatgctaggcaaaatgcaaattaaaagttttaattggaagaaacaacaataccttctgatagaactcacagttctgagaacaataataagccattttatgaatttgaccagtgagcaacacctgcaacaacaaaaaaaaaaacaaaccataattagtgaatacaatggatttggatttcatacaagtaaataaagtgataataagtcataccgggccatctctctttttcttataggcaatttctactccttcgagatatccagtctcaagcatatctttcacatttttaatctgtccctccacataagtcatcccctcctcctcctctgtaattccagcaataagtctctctttctcacttacagtagtcagctcccctttctcagttgtgacagcaggcataccctcctcagcagcacttgcatcctcagtttcagcagccatcagcttctctttcacagctgtgacagcagacagaccctcgtcagcagcattcgcatcctcagtttcagcggccatcagcttctctttcacagctgtgacagcaggcagacccttgtcagcagcattcgcatcctcagttttagcggccatcagcttctctttcacagctgtgacagcaggtagaccctcgtcagcagcactcacatcctcagtttcagcggccatcagcttctctttcacagttctgacagcaggcagaccctcctatcagaacgcaaatgacgcatcctctgcacggcgcgttctcgtcctcgcatctctcatcagtgggccccgcgctcgactttttgagcgaggttctcgatccttcgctaggaaccgaagaagctagtgaagctatgggcccaccaacttttttcaacacataggacgaagtaacgctccacgtagacgaaggaacgcccactgtgaagggcctaagcaacactcgcatcctcattttcagcagccatcggcttctgtttcttaggtgtgacagcaggcagaccctccttagtagtcgtcgccattccatactccacagtcatctctaccgcactgtagcaatttagtggcgtttcagaactctctaagtgttatggaaatatatataaatagagattattttttacatagaaaacccttatgagagtatactacaggcgcgctgactgacaatgaccactatatattgaggattcgattaaaaatgcaagaaaacaatgcgttgtcgcacccttccagtgtggcttacgagagatatataaattggataaaacctagtagtgctaataggaaaagacctgaaatctactagcaaactaatctaaccactaggaaacaaattcaaatatattgcatgctgaaattcagatcacgtatttaacacaaagcatataaaaaaatggtagaaactgacatgctttgatcagtaactttgacattgtaccctcagagctatagctggcatgcgcatttcacatataagaaaagaacagagctaattgcactgtaaaaataataccttgctgttacaagaccacatatctcaattcctattagcactaactatagatggccatgtgggccgcccggcacggcacggcccaggcccggccgtgcctgggccaaggcttgtcgggccggcacggcccgaccgacacatcgggctgtgccgtgccagcccacgtgccgcactcatggcccaggcatggcccaacacgccttgggccgtgccgggccggcccaaaggcacaatgggctatcgtgcttttcctcggaaataagtctaattttcctccctcctattggactgtgacacatatatatatatatatatatatatatatatatatatatatatatatatatatatatatagctaaaaaagtctattttacctctctcttctttgggctgcggtatataaatagctaaaataagtctatttaaggtccctattcttaggacagtgacaattatatgtctattttagtccctatactttgtgtgccgagcctggcctgccgggccagcccagcgtgtcggtggggaggcccaggcatggcccggcggtcgggccgggccagcacaggaccgacccaagtcgggccgtgccgtgcttgggccgggcaaaaagccgtgctgtgggtcgggccttcgggcctagtgctttatggccatctatagcactaaccatacgatgcagatccccacataaaaaatcaatagcattccacgcaaatcacaaccccggcaccggcaagagcagccagatcccgcgcctgctccacgtcgctggccacggccgcgtcgtctgctcctagacgtaccgcctcgccgccgtgctcgcggcgacccgcgccgcggccgacatgcgcgccgagctcagagtctcggacgccaggtggggtactccgtccccctcgacgaccgctccttggacgccgacacggtcgtcaagtacacctcgcacggcgcgcttctccgcgagctcgccgccgacccgatcctcacccgctacggtgccgtcgtggtggacgacgcgcacgacgggatggcgctcaccggcgtcgtgctcagctgcgtcaaggccgcggcggcgcgccgcctggaccttcgggtcgtcgtctgcctgaaccactacagcaccctctgcaagggcgttgtacacggcttcttctccggctccggcatggatgtcaaggagctctggctccgtactactccggtctaatcgaccaatattacctcccggagccggtgacactacctcggcgcggccatcgacgcggtgtgccgcatccacgcgacggagccgccgggcgacgtgctggtcttcctcccgggctgcacggacgtcgaggcagccgagcatgcactcaacgggctgtgcgctgctggggctagctacatgctgcttacacgacggcctcccgattcaccggatccacgacgtgttccggccggcggccgacggcaagcggaaggtagtgctctgctcggtgttcgtcgatggcatcaagtacatcgtcgactccgtctactgccgaacggacaactgccccgtactcctacatctgatcggcggcggcggcgcgcctggttcgaggcctgaaagcggtcgtccataaatggtgtcacataaggcgtaaggtgaacgaatcgccgaagacgtggccgacagggacattcttctgcctgtacacgagagaggagaaggggtttccatacgcgtggaatccggcgaacaagatggcggatgtcaacgccctcaccggcgtcagcctcacgttcaaggcgctcggcatcatcggcgccggaggtgacgacgtcgtggcgagcttcgacttcttcgagctgcccatccagaatcgattcattgggccgtgaggacgctcaagtcaaggcggccggggcgctgggaaaaaaaaattctctgcggcactgccgcaccacgtctcgtgtgcaacactgcgtagatacctgacgcgtgtccatctcccgctgtagccaagcagccgtttctttggagccgagccgctgtgccgaaatactaaagccgattgggatttgggagccgctgttcaggagtacatcaaagctgattgctggagagatttaatttgtccagttcacaactttagataggaacctattgcattgcgacacgtcttaaagccttgaaacttgatggtttggggatatgaccgacattgctaattagcttgtactacttccgaagagttttggttatctttttgcttctgcaaaatataaacggatttacatgcttcaataacatggtgtttgttgtgacttatgaacatggtgttgtagacatggtttaatttttcggattggccgattctatcggacgtcactgatataccgaaaatttggaaatttcagtccaaaattttcaaaattttgagcaaatattggttaaatttaaaaaaaaatattaccaaattcacaaagaataaaaaaataaaaaatcagccgaaataatatcgtatcgagagtccgaaatgaccaaaattcatttcggaattcctaaccctggctgtagacgtacggttgtcttttacaatctatatactattcgtctgttcttcgttagcggcagatttactatctgttctgtcttctaatgaaacaacagctcaactccgcgtgcagtcgctaactgcggcttgatgtccgttccaacgagctgaggaagacatcggcttggctcaaggaaaacgcttggctgcagtaatatgacgggacacgcgtcagatgtgtacgcggtgttgtacagggggcgtggtgcggcaccgccgtagagaattttttttccggggcgctgagccaggacggcgaagtgaccgagaccgggaggcggattgcgcgggagatttcgggtagatattactaagcgcattcaaacgtgcgcagcacatcagtgcgagcctctgaattgatatttttagttttatctgatctgatttacaacaaggggaagattttagtagagcatctctagcaggtcctcaaacataatccctaaatcattattgagagttgattaaaaaaaatatggatctagcagagtccctactaaagcctcagtctaagtaggcctctagatttggctgtgtatatccttcgtagatatagagaccatattaatgaaaatcagcgtcatcgccgtcctctcacaacctcctagcaagcaagccaccaggtcatttgctccggccggagacccatgcctccgattacgcccaagtgagtctggacgccctccccgaacttgctgctcacccgctggccacaaggcctagcgcggcccatcgacagctacctgtcaccggccgcacacatgctgcagtaaaaaaaatcagagatgatggtaattaaaacaaatcacagcactaaagttcagtttcgtatgtctgagtctcgtttgattttgatctttatgggtccatggccattagctgcagtactaaaatatctgtgcaaaaggacaacctgtacgtgcggaagattctttgactaaggacaaaaaaattcagatttgcttcatcaattgcagctagaggtgaaaacgatcgaaatcggtagcatctctttcgaaacaatgctcgatcggtcggtaatcgactatatttattattaaactactcagtatcgatatcagtacgatgcagaaaaaattgtgataaaacaaaatttaaaaataataaaaaacggtaccctatatacgaaaacggcgctcggtcaatcggcaattgcagcagttcatttcctaatcgttaaacacagagggattgtggccgtgtttagttgttttggcaaaaaaaaaattgacgtatacggacacacatttgaagtattaaacgtagactaataacaaaacaaattatagatgccgcctgtaaactgcgagatgaatctattaagtctaattaatctgtcattagcaaatatttactatagcatcacattgtcaaatcatggcgtaattaggctcaaaagattcgtctcgcaatttacatgcaaactgtataattggtttttttatctatatttaatgctctatgcccaaacatttgatgtgacggaaaagttaaaagttcgaaggaaactaaacacagcctgtgtatgttttttttatgtgattggattgaaaaacctgcctgcaacaagtgcccaatgaatgggacaaagaaaaaaatatattactttttctatctttacagcttattatttttttcttgattaatcaatcgcatatgcatattttgtaggaaaaggcaacctaggaagaatgacagaaagcacccacctgaaccttctacaccaataatgatcacaaataggtttacactaacgcatgatagcctaggaatggtgacaagaaggtaaccgaagtatttgtgtgtgcatatatctcattcaaattgttgcttatctttcgtgcttgtgtgtaggcgcttgcaatgctgctaggagacagatcaggcaccattgaataagggtgcaagcggctatccgcgaaaatccacttataggctaaaccaaccctcaaactcacttattttgaattataagtgagttcgtgggtgacccacttgcatccttacgggcactggagaattagcaagaggcctttcgggagcaagcacttgtggaggcggagattgcacttttggagctagcacttctgtaggagctggttgcactttggggtaaaataattatgctatccctaagaagaaaaaattgactcaatttgaccgagattgtctactcaatttatccttaaaattatgtagcttggttgaacaatttgtgtatgcactgtattatgggttgaatggtttgttgaacaatttgtcgcaaaatttgtgtatgaactggattgtgcgtttgaatgcttcgtgaactttttgtttgctgatactcatgaaaatggtgtttgatgctcgtatgttgctattcaattttgatgcattgtcgttggtacagaactacagagagaccacagatcgatctgatctgtttaggaacagccaaaggcatttcggttagttcatgaaagaaaaatgaggagaaaagaaaataaaacagctaatggagtggcaactatcttgaagtggtaattaaactatatatcccgaaggcaacacattgagtggcatttaatcatttgcatcctaacgagtgacattttgttgaagccatacgtatagagtggcatattgttctttttctcttatattgtaatttttacattgaaatccttatgcttgcatgaaatacaatactgtaataccccgaatttcgaattaatatatttcggagaatattagaagaaacgcgcaaaattttaacttttaaactgttgttcgaataggcgatcaggaaccgtggatgcgtagagctcgccgagtagtacaaaatagactataagtttattgtaatcggagtccgaacgaaatccaggtgatcaaattaatatgggtcgttcgatattgattaggctctcggctctctatttaaccaactgaaaaaaagaagaagaaaaggacaccagcagctagccctagcccgtcgtcctccccaaccctgcctccgcgccgccgctgctggtgacggcgtcgccacagccgtcgtcgtccgccgccgccaatcgattccctgctcggctgcctcttggtgtgctactgctgccaaattcctgttgttgctgctgccgatccgatcttttaattgccgctgctgctaatgcatggcttgatgccttgatgtgctgcgatctggtctcttcatcgctgctgctgctgactgctgctgctgctgctgactgctgctgactgctgctgttagggaggagaagggcgcaggagagcaggaggaagaaggaatttggggatttcggtcattttgcaactagcgggtttgttctcaaattctagtatccacgctgcagcggtacttttggctactccctagaagtataagattcaaatagaaatttattcgatagtcgtttgtgcaatttttgaagttattgattataggctaaaaccgtattttcaaatctgatattaaaccgtcgggattcaggttagttgtcctaaataaagtttgtagccatcgtcgatatctttctatcgattccgataaatggtttaggagaaacaacggagacagtactgctgaccgggtccttattttcacgtggaatttatggagctaggatggttagcaatgtgttggttaattcgttattgatctatcatataactgtctgtcgtggatgtccgtatttttagaagagactctgccgaaatttctaataatttcgggagttagtagttttgagtgtttttttagtgtggcactctaggtacgtggctactagggatggcaacgaggacatccccggcggagagtggtcacccgtccccgtccccgggcgaactgaaatcccccactccccgtccccggccccgtcgccggggatgatttttggccgtccccgtccccaaccggggttccgggggccacacaccccgaaacgaggagaagaactatactagtactactcaacgagcaaaacgccgtgtagtcgcttgattttttatcctatgctgcatcttaatactggattctccactgcccctgtagtcgcttggtttgccgtgtttcgatcatatacttgtttgagctgaaattctacgtactttacactcttcattcgtggaacgggaaaaaagaaagggagaaaacgaacttttcctggttttcatgccgtttaggccaaactggagctgtcgaaccaaactccaagaaacactataaaaaaaacattttttcctggacgagactcccttcagtttacaggcgaaccgtaactaatcgcctctgcaaaaatcgacctgcattcgcatacggctttataaaagacccgcatgcaaagatcgatttttacaagtggatatcttaacaggcccacctacgaaaagtccaaccaacctccctccatcctcattctctctcctcatgctcccaccaccggcgaagaagggcgggctgccagcggcgggcggtgagtgaaccgccgccgccgacgggaggaggagaagggcatgagcggctgggctcgatgggtggcaagcgggccgccattgacgacgggaggaggagaacaaaggccggagcagctgggctcgatgggcggtgggtggtgggatccggcggccccgtgatagccggatccgcaccgccaacggcttttagggttagggtctcgggatttttggatttttattttttgcatacggacgacatacgcaccagcgtgccaaaatcttattttcgcgtgcgggtgcgctactcacatgaaaaaagaaagtagcaaatttcgcagatacctgtgtgtgtgcggggctgttcagtcgcctaaaaaatcggatttgaccgcatgaaaaacgatttggctaaaattatgtcgataggttttttttgcctcagttgatttttgagccacttgatattctcctatattcgtgcaggtgcggtacgggtacattgtaaatacatgctgactattttttggtaaaaaatatggcgccataaatatagctgctcccttgattaaagtagaacaaacatgcatggccgtgggtccgtacgtggcacaagctaactgtgagcgatcgctgcatgaatattagtagtacgagacaaaagaatgttactcctttctcagtactgccaatgcagtgaatctagttgattcatttcttttaacaggaagctagtgagtagggaacaaatactcccaaattatagtgtatatacttgagttacatctcaattataatataattatatcctacttacatattaattacatagtgttaactaagatataattacaccgtaagtaggatgtaattacaaaaataggataagaataagtaaacaactgatgtgcacgttaatgatccaccaagattgattaaattaccgctggggaagagctttacttctagttagcaaccttttttagttttggttgtgcaaccggatgccaatccgaaactaaagatgtatatctttagtcctggttaaaatgactaaaaatatctatctttagtctcggttgaaataatcaagactaaagatatataccaagaaaaaaaaacatatatgtgggatgtgagattagttgtccatcataccaagttaaaaaaaaatatgtgggatgtgagactcaaactcaagatctctcacttcagccctcactcgcgttatcatcccatctactacacacatatgatgacttggatacttttgaaactaaccatggaagcatcttttatctgggttggtaacaccaactaagactaaagatcaatttttagttcgaattggtaagtggggggctgacatggcccgacagctattgaaccatggctaaaaatgatctttagtcccgattggtgttaccaaccgagaataaagatcataaagtgccattgggcttttgaaccggggttaaagatattatttagtccttgtttccattcgaaatagaacaaatgtgatttttgccatccgagcaaagatcaattcaacagtaatgaatattgctattatgtattcatctctactatagtggaaaaaatcgaatgatttttactcaaaaattatgtcggcacatatttagatactccccaaaaatgcttttctagaaatggaaaaccagatccaaacagaaggaacatctaatgtaatgtggaataactcatagtacatgtacaatggaaactaataatgcaaaatgcatcgtcaaaggaatggtccgatagaaatttagtactgaggcgttctctctgtgtttttttttttgatttgatgcgcgcacgcacacgtacacatcaatccacacccataacaagtgcgtgcgctagatacaatagatgaaactacagcaaaatttcgttgtaaatgcgatcatgcaactaaattaagttagaaaaagtacctgctttcatgagcaaagcttctaagacaatagtctataaaaattgatttttacatatagtcctttgagctatgcatttccaatggttcattgtttagactgcgtggaaaacaaaagaagtatctacgaaaatagttatatataatacaccatatcgcacatggattcagattgggtgacatatggtaggaatatcacatggtgacatagggtgaatctcggccctccaaaacaaatacaacggctgagattcgtccacgtcatcacgagtaaaaattttactccctgtaaaacttttactcctgaaattttactcccaataaaattttgagtaaattacacttttcaccacttattattgccatagttgcagtttggaccaggtccactgtattcttttcacttaagaccatgaaaacttaccactcattgcagcttggacctaccatatcccttcttctctaattactcctgcaccaatgatggctccaagctccttccgcctccacccattccctagctaggagcctaggagcataggatagcaggtgcaaggacttgccgactactcgactttctccacggttccaccaccttcagccgccagtacatcattatgcagttattcatgctccaccggtccacggacggagcagcacagattgacaactacaccttctaactcactggtcaccatagtgttcacggagttgctcatcgcgctcaagcgctacattgctccaccgcgacaggacgtgcctcaatgtagcaatgcgtagcaaacagtgctcgacgcgagagatctattggcacacaccgcgcatcccctgcaaccagcccgatgacgctgtgctcgtgctcgttgccgccgcatagccataaccatcttctccgacatgttatttgcctatgtcgagttggctgcgagagcttcaagttcaagcctggtccctatctctagcatcttcaagctcgatgacccagcacccaggcaccaagcagtaggctctttcttgcatatctatgttcgacaagctatccatagcaggcaacaacaagcttgttctgtttctcgaagaactaggagccagccatgggggcaggaacgcagcaatggccgctagaaggaactggtccagtccaatgtgcaacaaaatgtaaatttatatggtctaaagtgaaaacagtactatatgcctagcccaagttgcaacaagggtaaaaataactggcccaatgtgtaattgactctaaaatttttactcctgagtaaatttgtgagtaaaatttttactcatgatgatatggacgaatctcagccgttggatttgtttccgttggatttgttttggaggaacgagattcaccctatctcacattatgacatgcctaccctatgtcacccaatcccaatccatcgcacacatataaaaacacatttccctaggcgaacagcttaaccagtccacctatatggcatgtaagtatccgtcagataaaattaatacatgttttcataagccggcgcttaggtgatccatccgtgtaaatcggcctatttcacatgcgggtctttcacacgcccacctctaataatgtatttaccgaggtgcgtgctcattagaagatcatcatgtaaaaatacctactacttaaaggacccatttaaatcgcaggattgagaaaacatagtaatagaaaaaacgttggattttgataggaatgtaaatgtaaaacagagaattgcaaaacgcaggaaaaacacatgaatgaccgtttaattgaaccgcgagaaagatgcagaaattggatgagagagatagactcaaaggaaagttaccagtgcaagaggttgaaacttttactaaatttcctccaaaatatctatagaattgtcaattccatagaaatttcaaaggattggatatgattcaatcctttgtttcataggatatcatagaaaattttcctataggattgaaatcctccaaaatttctatgttttttctccaattcaaaggggcccataactcttgtttctcacaaggcgctccctttagaataatctatccaaccgaaagaagcaatttcttgcctgagaaaataaagttttgctctcgatttactcggaatgggcttttacaataagagcatgagattccaagtgttattttcaagtttccatctaaattgttagctagaattttgcttggccatggacatggagtttttctttaaaatttagagttcaaagctcaaaatttatggcaagcattcaatatatgaagtttcacatggttatttgtataggatcatatcttctaccacaagctttgcgtgcaaacaccatatgaaccaactaaaaaatgatttcaaaaaattctaaaaattatatactcaaaattattatattttggctgtaaaataaataaaaattctaacacttttaagagtactttttatctttttgttgttctctaggtatgatgaatttgcaatataaaactttccacatagatgtaattctactggaagcacatgctaggaattaaattaatccactaacctggttgcctctataacagtaattactgttaagcactggaaatcctttctctgcagcgagctgacgtagccgcccaagaggacgactgtcgaccatgtaaatgcaaggtacgccatgatcgtacatgtgattctgatgtaggcctgcacggcgagagtgcccttgattgccacttccaactcggcgcgcctcttcttccgtcggtcagacccgccgtcgtctgctcctccgccgccgatcatcctccaccaaataagcatgtttttagcttgaatgctaggtatgggatcgatcgacgatgaatcgacaatgacgtgcaaatgtggaaatatgggagaggcggtgctgctgcgcttctcagttttagctggtgccagcccgtagcttgcattgcctagctatatatatacatatttgtgcgcacttagtcaatggaatctcatagtttaaactaaaccgctgttactgttatatatgataatacaggctgccaccaaagcatccgatgaagccaagttaattattaagtatcacctccatatatcccacccgttaaattcaaattttaatgcccgttcggtttgaaagaaaagcatccttcctaatgattaatttctctaagcactactgtattagatttgtaggaattaatgaagtatagataaactaaaggaaattttttctcccctacaagtcatagcaaagaatttgttatttttattacctcctccgtcctataatataagggattttttgtgaatgcgacgtatcctagtacaatgttgtactaggatatgtcgcatccacccatatattatgcgaaattgctaattggcgcatacgcgccatcagcctaatttgccatcagcctaactcgcgcgcgtttcaggcccaatgtctcgcgcgcggcccacatcctcgcttcgctcgcgcagcccatctgttccctttttcttttttctcatttcctttttttttgccgtggggagtcgggcaaaacaatcgtgaattcacgttttgaatagtcaccaaccgaacattatcctcttttttttctttttttcctcccgtgattcctcctccgcgtggcctcgcttctttctttttgtcgcttttttttttgcttttttttccgtgattcttcactttctcttttttttttcttttttataattattaatctacagcaaaacatatttttgtgttaaaagttcttaaatcttgtcttgaaaatattcaaatcttaacttaaaaatttttaaatctcgaattgaaagttttcaaatccgagttgaaagttttcaactccgagttgaaagttttcaaaccctagttaaaagttttcaaatttgagatgaaaagttgaaagttttcaaatccgagttgaaagttttcaatcccgagttgaaagttttcaaaatctcgagttgaaagttttcaaaatctcaattgaaagttttcaaatccgagttgaaaatttttcaaaatcttgagttgaaagtttttcaaaccttagttgagagattttcaaatttgagatgaaaagttaaaagttttcaaattttgacttcaaaaattcaaatttgagttgaaaagtttttaaatctggattaaaagttttcaaattttgacttcacgtatagatttgttttcaatctgttacttaaaaaaatcttatcttaattaccatcgttatctaaaaataacgtgttagttacattagatatactcggaaaaaaacacgggaaaaaatcagtcgcgccacattcgcgataaaaaaatcacggaaaaaaggaaaatccgaaaaaaagagaaattcacgcggtgaaaaaaaaaacaacgaaaaaaagggaaacccacctactgggccgcgtgcgtgttgctggcgcgcacgcgccagctaggagccccctatattatgggacggatggagtacaacactaatagaaaaagtatttttgcaggcggccaaaagtgatttttccagacgggggaggatcgccagcagcccaacgactgtgaaa

SEQ ID NO: 28966 - DNA, 25496 bp, Oryza sativa
tcctcccccactccccacgttggccggcaaaatctcgcccctaccggccacgtccggggctcccctcccctatttaagcttccccgtcgccccctctcgctttttccccatctcgccgaactccctcgtgctccccatcgctcccgcgccgtgcaaccacccgccgccgccgtttccgccactccggccgccgctagccgccgctagggtcgccaccgcaccgcgccgtcgccgccgtcgggttcgcgaggctaagctccaccccggccgccccttccctgtcgggattcatcgccggaattcgcatcccctcgcgctccggtgagttcaacctctaccgccgccttcggccatgaatgccggtcgccgtggttcatctccctccctctaatctctctcttctccttccttagggcaccccgaatcccgtccgtcggttgccgtcgtcctcccgtggctcgtcgtcgccgttcgccgtcgtcttcctccgcgccggccaccctcggtgaggcatccctcccctcttttccccttcctcccccttctagtgccgcgccaccgctttaagtcgcgcgctgacgccttcggccgccgccgccgtcggccgcgtgccgtcgccgctagccctggccggccagccggctttgatgccgagccgagcccggcggccgcctctatcgccgcccccgatcggctcggggccgatctgggccgtcggtcccgtggaccggcggtggaccacccgcgtggtcccggtccacggtgaaccgcccccccttgagtcgctgcccagtggggcccgcctgtcggcgccgcgcctcccccccgtgctgacgtcagccctggaaaatattgcgcaataaattatttaaggatttttgttatagtaataaacacagtgaatcttctaaaattcataactaattcatccgagctccgtttaagcccattcaagtctcagtaaatcaagaaaaatgtgtagaatccattaaaaatggttttgttctctgtttcagtagtcttatagcctgtttgcattgtttgccttgtatgtcgctagattccggctcttccgacgctccggtgtacttcgaaatagtcgccgaggttcctccagcagcagagcaaggcaagtcatgcttgtcacttgatcatattgatcctatattgcaaatgtcctaatgttttctttcaaataccgcatttgttttgcaattataccatgctcctttgttagcttgggttataacatgattaaactttggactaggaattgcttagccatgcttagttcaactagcacacaatgggaaaatctcatttaaaacctagactataggtttatttgataatgttggattagtaccaccgctctggtgttggttaaataaaatgaatcacatggtgggctgtgggtgtatggttttgctagtcgtgcccatggcaattaaggaccggttcgcgggaaaccctggaagaacttatcgtacttaccacaaaccagcgtgggcaacggctgggcttgtagtgtagctttcctctagcagacgcatccaggcaagggtgggcatgatggagtttggatgggccctgcgacggcctatgcggcttccggattcacctaggcacgagaggggactgcccgctgccttgcgaggagtgggggtgaaacctgaggtgtggtgtgcttggttagagggggttatgcgaagggtcctgtcacggcctctttccggtatgtcgtggtggcatgtcggcgcacggaaacgtgtcgtggggctgtgtcttgtgggtacagttgtacacctctgatcagagtaaaactattcgaatatccgtgcccgcggttatgggcggtcaaccagactcaccgtgattagactcaccttagtttagtctaatgaaattggatggtataggtggatggttgggcctgttgcaacgtggtgtaacattggacagtggatgattaatactgcttaattattacaactgttttcgcattcaattcctgtttataaatgctagtatttatgcaaatgaacctgtttagctatcccttgttgaatccctgcatcataccccccccattccggtatgacttgctgagtacagtggatagtactcagtcttgctctattttcccccaatcccagagctcgagtatgtgtccgatggcgggttctccgaggagtaggcttcgtccgtgccgtcgaggatgcctgtggagtggtgttcccgctgcagttcaagtcaaggattagctccagttatcttttgtttttccgctgcatttatgtaagacttttatattgtttgtaaggcgtggatctgtatgtcaacattgtcgtttgtgtaccccggccggtcctggacgggggttttaatgcacattctgcttggaattctattcgggaatttctaggcatgacatccctccctcctccggccagatctgggagggagggggaggggagccgccgccgccgccccgcgccgccctcgtcgtcaccgccgccgccgagctgtcgttgtcgccgccccacgccccaccgccctttctaggcctccctccagccggatctgggaggggaggggaggggagccgccgcgccgcaccgggagcctcgtcgtcgtcgccgtccacgccgccgtcgccgccccgtgccgccgccggtatagggagggaggggagaggaggggagggggacggcccgcccggtgggaaatgttgagggagagggagagttgagtgagggaaatgagtggtggggagggagtgaagcagaagataagacttagatttttttttctgtaggtatgattttcgcgggcgtcgcttaagtggtacgtctgcgatagcaaacttcaccccgatttatatttttgtaggcggttatttggcttcaagggtcatgttcgcctacggaaatcagacccccacgtcgggaaaaatgcattttctagtagtgcaacttaaaggagtcaaatttgaccgtgcttgtttgtggtgcaactcttttttttaactatttagatggtacacaagaaacaagcgaatgtccacttgattaataaatctaagggattgtttcttcggcacctaactatcaatctgaccctatttttgtagtttgctcattggaccatgctttttaaaaacgaagagtaccctcttccgttaaggcaacgtaatgacattaattcagggcaaaatggcttatatgaaaatgcagtcaagttggagctccgctctccaacctgactgaatgctgctagtggtggcgtggtttggacgaaaatgctcacacccggacgaccggcggggtggagaaaatcggacactgtctgccaccgcagcatgatgcatgcaaagaatcttttcttttcttatttcttcaaaagattttttatcgtaaaatatttatctaatctacgatctgattgcaccactaaattcgttacaattaaatctttataacaagaccacacatgattatatttcatcaaaaaaatattttaatttttttattgattttttttaatgttgcatgtggtctcttttgatgtttcaaccagtagttttacaatgtttcagctagtgtactcatgatgtttcactgtgtacggatcaaatgttacagtggaatgcgccgttgcaataaatcacccacatattttggaaaccttctattaagggaatttggtttatttttttgttccacaaaaaatgtttcacctagtgcactcacaatgttccactatgtatagatctaatgttgcagtgaactgaaatatttcattgcaacaaaaaacccatatattttggaaaccttctattaaggaaattcgtttcattttttgtttcaccgaaaaatgttccacctagtgtacttataatgtttcactatgtatagatctaatgttgcagtgaactgaaacattcttccactatttgttgaaacattgtttttatataaggtgaaacaacaccagatttaaacgagtgaaacattttcgatctacttagtgaaacaattccgatatacctggtggaacatcgtgcaacattttaaaaataattcaataataagctaatttttttcattggaatatatccatgtgtggtcttgttttgaagatttaattgcaacgaatttaatggtgtaatcggatcatgatttggataagtaatttaagagaaaaatcagtttaaaagtagttttgcacgtaaatcgggcgctgacgtcatgctgacgtcagcgtccgatttttccctaaagcatcggacgtccgacgcgcagccctctccggttttggagggaggcctgctcggtatgacgccctgctgggacgtctcaccatggaaaggggttgctgtgttttttttttcctttcagttcgtatatgaaagtatgcaaccttggattcgtaaatttttttgtcaattttatcaaaaatctgtcaaatgtaagttatgtttgtaaagaaatatatcaaatctaagtgaaattagtcaaatttctaaaaaaaatacaaaattcagcaagcaaaaaactttgaaactttgaaaaagtaaagtcaaatgaacaagggcatataagccattttcccctaaattaatgccattatgttgccttaacggaatagggtactcttcgtcttttgaaaaacagggtcaaatgggtaaacttaagaaagtacggccaaaatagtggttagactttaaaatatggccaaaagtacaattgccccaaaatctaactactcaaacctattgaaaaattcatatggattgatgtttgcatgccttcattttttttatctttcctattcccataggttaaaattcctccaaccaaacatgcactaagtgattttattaaaatcgttgtttaaagggacttcctatccatctctaaatttagggtcccctatcatgaccttctttctcatcaaatttggtgagcctatgtcccactcgttatcgggtcacccatctccctagttagcttgttcactgtcactgtgcctgtcagtgccattcactctagattgctacttattgtgatggagggagtagatcttaaaaaaccaaaccctatcattattagcgctaccattttttgttttaaccgtcacccccttgctcgtcccccggccatatcttcactatcacagatttttttaaattatttctccagttacaaccttccgttccgagctattatcgcgtaccctatttacccgaactccatggcccttcctatgttatctattaaaaatataaatatcaatgtacgtattatttcataaaattagtaaaatatggtaaatgtgaaatataaggtgaatcttaggtcgtcagttggagagcaaaggaaaagaaatataaggagggaggttttttagaaagctatctctaagggtgtgaggtttagggagtacgttcggaatgctctagtaagaagcctttattattagttgacaattcaatgtctctgtgtagtttttcgaacaaaaaaaagtattttgcgtagcttacattggggttactgatcggatgaacttagctagctggtggcagcacattggctatatagttagtggaatcattattaactagctagccagcactccgttcttaattatactctctctcggtttcataattatgagacgctttataattttaaatcaaacatcttatcagtttaactaaatttatagaaaaaataataaaacttagaacaccaaattagtttcattaaatttaacattaaatatattttaataccatatttatctagtgttgaaaatatttctatgttttctataaatttgatcaaatttataaatatttgactaagaaaacaaaatcaaaatatcttcactactaaagattggaaggctcccgtgtgcctacgaatattactgggtgtttctctaaacacacggtaacttaccgtgcgtagaacaataaattcgggaaccatcaagcacataccgtgtgttaggattcacgggagcaccggaatccaccgctttccatctgtgcgcgtcgagctctattggcgtgtcgaacaaaatgttaccgtgtgaccccagtgcacggtaaaccaccgttctctgttacgaccgccgttagcccgttacatcgtgagtgctaccgtgagtcccgaatttttagtacactcggtaagattttcaaccatcctgtgcgttttcatgcaaactcacgggccacacggtaaaccgattaagccaccgtgtgagcgttaccgtgagctagaactcgataacggcgttgatgtgtgtttttgcctgttcccgtgggttttgagcacacggaagccttcccatctctagtagttagcttataatataaagcgcaggaaacataattttctcaagtgaatatatttggatatctgaaatatatgaacatataacatggattatatttgtagggcataggaaaatatattgttttacagtctcatattttgcattgtacttcctccattctttttttttttcatatatagtactagttatggacatcgctatattctccatcgtgtacgtttcatcattacttttctaactctatattcctgctggaagtggctggatgttgatattaattatattatattctagttacgtatataagctggaagtggttttgcatatcaacttgacaacaaagtttgctttatctaaaaaggctgcgggctgatctgcttgtatttggtagatttttgtttcttccttctttatgtaattcttttgaggcttgttaaagttttgctttatctatgtgtggggaataggctaaatgcctcaattacagtggatgcctacaacagaatggtgtagcattcagccaatagaatgatgaccatattgttcgtttctccgacaagacggagatgaaattttggatactcgtggcacgcttttcaaactgctaaacggtatattttgtgcgaaaactttctatatgaaagttgctctaaaatatcagattaatccatttttcaatatgatactgataggtatcaggttctgatgtcagcattgatatatctctaaattgttttttatatttatgtgcattaaaatgcataaaactatattaagacttgctaatcattttcatctattatttagtcaactaaataattactttggacatgtttatcatgaacacactagcgtgtgcgtctagcatcgtacaaaatgcacatgtcgtcattgttcctaaatatcccgatggacccacaggattgtttcctttcgaatatcgacacaaagatctccttgattatgttctacgaatgatagatccattagcacccatggtttcatcgacttgcttgtttatttactccctcctttttatatcataaagtcaaacttctataaatttagtcaaatttgtatgaaaatatagcaactctataacatcaagttaatttcattaaatctaaccttcgatatattttgatattatgtttgtttagtgttaaaagtattactatgtttttcctataaatttgataaaacttaaagaagttgattaagggtgtgtttagattcaggggtgtaaagttttggcgtgtcacatcggatatatggatacacatttgaagcattaaacgtagtctaataataaaataaattacagaatccgcctgcaaaccacgagagcgaatttattaagcctaattaatccgtcattagcaaatgtttactgtagcactacattgtcaaattaaggcgcaattaggcttaaaagatttgtctcgtaatttacacgtaatatgtgtaattagttattttttcgtctatatttaataatccatgtatgtgtccaaacattcgatgtgatgggtaggtgaaatgttttttttaactaaacaaggccaaaataatccatatatatagtccataatgcatccctatcattgatcgcatcacatgtctaggtttttctttttcttgagaacacacatgccggcctaggtcaaatattattttgtacgttgcatctccacgcccacgcaacgtaactgcaatctgaccaatcaattctaggattacataactccgtcaacttaccagaactactcactaattaatcacaatcacagtattcgaaatcctacagccactgcttgaaaaatgtttttttcgaataaacacactagttctgcacatgcaattagggacctggggaaccaccgtgcagcatacacaagaatgttttcgtagacggacaaaatcgattttcccaaattggtggagcactcgcctggccgcctggaatcaaatgtactatttgaaaatgaggaatctcacgggtaggccttgcaaccccatgcgagaattaatttttgcagaactctacacaatatttttgatagaaaaaacaaaaataaaaataaatctagaaactcctgtcgtcgtcgtcggatctggaggcacaacatctggatccggcctccccgccactccacggcccaccaccatcgatccgtcacccagccacaccgcggttggcctctcgtccccaataccgtgctacgaatggatggtggtgggcccactgcggtgtggctgggtgagtgaggcagcatgtgtggaaaaaaaaagttgaaatatatatatttttaataatttacgtttatatatccatagagagcagaaatacacataatccgccaatccgaaacgcgggaagcgcagctcggacacgcgggaacggcgaccacatcgtgccatggagcagaagcgcagaacaggaccggatgtcatggagcagaagcgtggaacaggaccggtcccgtggagcacaggagcgggaccacctcgcttccgcggccctgtcctgcgtggtggagagtggccgagtggggccacacgggaccgcctcgctcctgtggaaccgtagcgcggcaccggcgtggtttcgcgtctggatgtgcagctcagatctggtcccatttctccgcgcacgctgcccccttcccgcataaccatcacgtgggagtgtgataatcacttcctaacatttactccctcttctaacatttactccctcaaattcgtttcgcagtttacatacaggcggattcttgttttgttattagaatacgtttaatactttaaatatgtgtccgtatatccgatgtgacacgttaaaatttttttacccctccatctaaacaccctaaggtgtgtgtcggtgcaagtcaataggtgtatgcgtccttttttgattttgtatcagctattacattcaatcgatacctattttacaagcgggcctaatagcataaccgtccataaaaatcgattttcacatatgggccttcaccaagggaatcctacgcattttcacaaactaattttttagcccgcttataaaaataaagggagtgtgtgaaaatgtttttttttttaagtagtgcaccatattgcctgccttggaaatacatttgaacgggcggacaacttaaccggcctacctgtgggccacctaagcacctgcatgtagaaatacgtgtttccgtatgctggtggttatgcagaaatacctgcatgcagaaagatgcaatatttataaaatattaactgcaaaaatgataaccattgcacaaaacattaagggcccttttaaatcaaaggatttttataggaatttcatatgattcaaattctataggaaatttttctatttgaccttttgattcaaaggattgaagcttttcaaatcctatgaaattcctatggaatgatacattgcatgtggattttagaggaaatttagcaagagctccaacctcttgaaaaatttcctttgagtctatctctctcatctgattcctacgtttttcctgcgctccaatcaaacgaccattcctatgtttttcctatgttttgcaatcctctgttttacacttcaattcctatcagaatcatgtgtttttactatccctccattttttcaactctgcgattcaaaggggccctaagtcctaacaagagtggaacacataaaaaaatctatatattttagagaaagtttcataatggaccagtttttgttacctttgttgcatgatggactaagtggtagcacaatttttcattttgggctaggtattattaccaaaaatttagtggcccacatatcagtcagtgttggtatctcttatctccctcgaacactggtggccaacaattaacagatatctacgaaggagcttagccaacgcttactcaacgtctcaacctaatcgtagctgctcaccatcaacttctcccctgcagcaacttgtcggatggaggtttagcttgagagattgtaggaccaggagggttgagcttgatgcagggacgggtgcgggcgagatcaaccgattggcctgagctgacgaagatcgagctcaaacttgagctccagtgcgcaggcagagattggaggaggtcaagctagattggtggcgcaatcttgatggtctgctcaccgccgatagtgagctcgagcgcggcccgggcaacgctcaatgcagctccagtgcaaggtggtactggtgaaggtcgagctcaatgcagcgtagggcaagggcttgatcaccagccggcggcagctcattcgaagtcctagtctcccggagccttgctcatctgtggtagtgagcttgagctagatggcaggtgtggagacttctacagatcggatacaatacaactcaacggagaagagagttggagaagaacaccgattcaatgtgcaactattatagagttagcaggcccaatgtgaaaaggtagatttacctctagtccaatgtgcaaacaaggtaaaaatattagtggtccaatatgcaattcactctatattttataaaaatgtttcatatgaattttttatgtattcatatatatatatatatatataaggacaattattaaaatatccaaaagcatcgctgtaacatttacaaattatatagtgaaacataagagaatacttatcaaaacatctaaatagcactaaatgcaacatttataaaagatgcattgtaaaaaaatcatcgaaatataatgacgtaggatcttgttaaaaaatttaattgcgaccaattcagaagtactcctgctatctagtatttgtctctgtcatgggccccatggtttcgcttattcggaaaataagcgaaacggtatatttacaaatgaaaaataatttgtggataaaaattttatatacgtgttgtgatctaaaagcaaagactgaaaaataaacttcaatgaaaaaacatcaaaatcaactccaaatttaaggttgaaaatttaaattttgactgataagtacaaatataatcgaaaagatgggggccctaatactctagcagaggcagatactagccatgtccgattctttttccccttaggctcgggcgttggagggaaagtattctccacgtagttttacacctatatataaagtcttaaccataaatttattatattttagtctaaaaaataaaaattatgtcacttataaatgtataaatatgttagaattttatttttgtttttgctctttaggtatgatgaatttaaatataagactttgcacatatacgtaatactatatctaaagcacatgcacatttttttttctagaactttcagtggtattcattacttggtgtgcacggttgtgtgcatgggcatcctctatttctttacttaaccccaattagacatgttgaaagcctctatagtgtgttattaagggggatgtcttttggatcatcccaaacgggagttgagtttggacttaaattttagtaaaaatatctcataccaatacctatctctaataatttttcatgaatttaaaaaagaaaaataggtccgattttcatgggatttcacttattctatggttatcggtagatatttcccatatttattgtcattatgaattctatagatctagtctagaactattttttaactaactctagagttggttagatccaaaagtaagtctgtgtacacgacatctatagatcttgacctactttggatagtgatcttgatgagaattaatttatcatgaataattggacttcttaagatttgtacattaagtttaattatgtactaatggtaatattagaatcaatggtattaatactgtcaaaaaaagaatcaatggtattaatgaatatttaccaaatattaatggtactctttgtcagtgcacttaaatatatggtactccctccgtcccataataagcgcagttgtggatttcagtgcctaactttaaccatccatcttattagaaatatttttatgattagtattattattattattattattattattattattattattagatgataaaatatgaatcgtactttatgcatgacttaactttaaaaaaaattcatatttttttaaataaggacagtcaaacgttgagcatgaaaatttatggatgcacttataatgagacagagggagtatatcccgcaacattaggaaacactgttaatcatatagaatactacttttatgcaaaggatactctcatatgtaatgaaaccaacacctgcttcgaaaaaggtaaaatctaattaggaagcagagggtaaaatctaattaggcccggtttagtttcccaaaaaattttcacataatatcacatcaaatctttggacacatgcatggagcattaaatatagattaaaaaaactaattgcacagttaggggaaatcgtgagacaaatcttttgagcctaattagtccataattagtcataagtactatagtaacctacatgtgctaatgacggattaattaggctcaaaagattgtctcgcatttccagtcgagttatgaaattagttttttcattcgtatccaaaaacccattccgatatccgttcaaacatccgatgtgacacccaaaaaaattttttttgccagaattttgaggcttcgtcgtccggctcctcaaaaattctggacaccagaatatcgaaccatgaacgcggaaaggcacgagagaaatattggctagaatatgatatctatctaatgtgatatatggaatatatgacaaaggtggagtcttagagtatttcgatcgatcggtcatataggcctgagtcagacatcaaatagctttgaccctgcatagattagccatacaggctttccaacccactttagtagaggggcgtactatttgtttacacccattagtgtgtaaaggtttcaatgcggattttgatgggggatcaaatggctgttcatctacctttatccttggaagctaaagatgccctaagtacacgtgcactgtttagacttacagcgtgaccctggtgtcctttttccgattcgaacgtttttatcatccgtgcacagtagtgggtagtgtgttgtctaaatatttctctagctagctatataccaaataagacaatggctagttatatactccctccatcccataatataagggattttgagtttttgcttgtactgtttgaccactcgtcttattcaaaaaatttatgcaaatataaaaaacgaaaagttgtacttaaagtactttggataataaagtaagtcacaaaaaataaataataattccaaaaaaaaaatttgaataagacgagtggttaaacaatgcaaacaaaaacttaaaatctcttatattataggacggaggaagtaccaaataaggtaaatggttggtactgagggccaacactaatctatttttttcttaataccaaaccttttgcagtctatatattttaaaccatgcattatttttaaattccgtttaaaccatcatactcttcttaaaatatatgacaaaatgtacaacattaaatatattcaaatacttgaaagtaatttatttaaattatggaagtaacttagtttgaaaagaagtaacttttcataaaataacattaagttaattatataggagtgaattgaaaataaagaactacgtgaaggaaattcacatataaaatatgggagtacctatacatttgtcgacaaattttctcttaaaaatttgtcaaatgtaaatacaatataattatactgtaattacgttataagtatagaataattacactgtaacttacatgtagttacactgtaactatagtataactacactgtaactttagtataactacactgtaacttatatgtaattacactgtaactataatatgacttgcatgtaagtgagatgtacctttagaaaacttatgtttggcactgctcacgtgaaagagggattacgaactcgcaatgtctgtttgtacgatgcgtgtggaggccatcgttcatgcatgcatgttcggctatgccctgccgctttatctctgcccttcgtctgacatctacgcgtgcatgagccgcgccattgccggcagccagcggccctcgaaagaaacaaatcaaagcgttgacgcaaaagcacgaatcccgaggttcatcaagcgggtcaaaaatcgataaattctgaggaagaaatttgtcaacagatttatagcaaaatcgtaaaatatagagaagattcataagtgaatacatagactttcttatttaaagtaatcactatattattttaccttatataagaactgatataagaagtaactcttcataacactaaaagtaactacgttgttatagggaagtaattatgaaaaaaggaagtaactttcaatggcataagaggcaactacactgttaagaaagtaactcatgaaaatatatattcactagtaatatatattcatagtattagaagtaaccacactgataatttattcacagtattagaagtaactacactacaaaagcgaagtaactctttacagtattagaagtaactatattgtttcatgaaagtagcttttcggtactagaagtaactacactgctatataaaagtatttttgcgtttgcaaaaatataaaagtaattttcatggtacctgagacggagagggctcgtttggatgggccggaattctggcccaacccatttacagtaaaacttgaggagatatttccggcccaattgctaattcatttctcctccttcccatttgcatcatttcatacttcatactggcatatgccacatgattacaaatatcactagtagtagtcctcagaggaacaatttttaatcgctcgaggcaatgcctactcatttatttaaacaccatttaaattgttatagaaaatcttaaaagaattgacagtattcatgtgacatacctatacaacatcacaaaatcttacatctaaaatcaactcagacataaaaacaaaagacacattgaaaaattaaaaaaaaaacagattcagtgtatgaatgaatccattcgccgttatatctgaaggaaagtgcactgctcttcaatgtcattgtagtgcctcgatagtcgtcgttattgcaacttgcaagggctaatacgtctatggtttatagccgagtgttagttgcaatgtgttacgataccatatcagtatatcacaaaacaacgaagataacataatgatgatacaatatatcgtgaatttgtgctgaacaacaaagatacaatctcctaaacatttaacatgagtctatagttatctctttatgtttatatgattagtatgtaccaatcattttagaaattagaacaattgtagcatacgacattgtgtttgatcactgaatgacagctactaccattttacaatttctacgtgtgcgcgtgcttttgtcaatcgtgacagcatagcgtcttgatgatgtagttatccatctccctgtcgaattttaattcttttgggttgcaaatctcattcctctttcctgcaaaccagctccatttgctcgaacgatttcagtgtttttgccaactgtgacaccgacttgtggccacatcctgatgcccagtaaaaaccattgcaagtcaagacgctgcacgatgaatggtctctggggttggttgacaaatgagaaccggtgacaacgaatgctggccgtgctcagtcagtctgctggaccccttcctacatgtgtcaccgttcttcaacacaacgtctgaagtttgaacattttttgtgttgaacattgtgcttctctgtcttcatatgttgcaggaggaaagatggagaaagtgctgagagtagccatggaggtgatgagtcggcaccatgctcccgatagaagcctgtgcttactgttactgctgctgttcttgcttcttggtgtgcccatggcagcgtccaccgaacaatcgccagcgcgactgaacaaggcacacgaggacatcatgcgagatattctgagctcggtgggcagtaccaagaactggaacacctgctcaaatccatgccaatggagtggtgttcattgctcttcagttgcatcctctgcgtttgtcactaggctatccctccccggatgtggcctctccaatgccaccatccttgcgtccatatgcaatcttcataccttgcgatctcttaacctctcgagaaactcgttcaccgatttgccaagccaactctctccgtgccccatgaaggctgaattgcaagtgctggatctcagtagcaatatgctgtctggtcaacttggtgatttcgttggttttcacaagctcgaggttcttgatttgtcctccaactctttaaatggcaatataagtacccagctgagtgatttgccaaaactgagaagcttgaaccttagttccaatggttttgaaggcccagtccctacaagcatcgctacctctctggaagacctcgtgctctcgggtaataatttcagtgatcatattccaatgggtttgttcaggtatggaaatcttactctgttggatctctgccgcaataatctacacggtgatgtcccagatggcttcttgagcttcccaaaactcaggattttggtcctttcagaaaacaacctgacaggaaaaattccacggagcttgctgaatgtcaccacactgtttcggtttggaggtaatcagaataattttgttggctcaattcctcaaggaattaccaggaacattaggatgttggatttgagttacaacatgctcaatggtgatataccctctgaactgctctcacctgatactttggagaccattgacctcactgcaaataggcttgaagggttcatccctgggaatgtttctcggagcctccatagtattcggcttggtcgaaacttgctcggtggaagcatcccagaatcaataggcaatgccattgacttggttaatcttctgttagatggcaataagttggttggatatataccttggcagctcagcagatgcaagaacttggcactcatcgatctgtcatcaaaccaggtgcagggtaatatacctattgggctgggcaaccttgagcagctcgtagtcttgaagctccaaaagaacaatctcagtggagatatcccaagttcattttctgacatgtcagccctggaaatacttaacctgagtcataactcattcactggagaactacctttcacaaattctactcagtcactgaagctctgctacttaggtttgcatggcaacaagctcaatggtgtgattccatcgtcgatcagcttgctgcagtctctgatcaccattgatctggggaacaatgagttgattggaattatccccacaaacattggaacctttctgaagttggagcgtcttgatctttcaaaaaactacttgtcaggtcaggtgccatcctcagttgcaaacctggaaagattaatgtgtctattcctttcagacaataacctttccggaccattgcctgagctacctaaatgggtgatggtcaatgtaactggaaatccaggcatcatactagacacggaagaaaatagaacttcaggcagtatgaaaggctcccaggatgatttcagatcagctatatgggtcgcagcagcttcttttgtacttggattcagcttgtccttctattgggctggaccaggggaaaaattgatgccaaggttggagactcttcactgtgacgattgatgatcattaaatccatacctgtgtaggtgacaaagttgatccatgtattagtaatagttgcagataccttcaagtcactacgagatgtactaggtgacatgaaaaaggattaaaggccattattgtatcatccttaatgtacaaatgctgaggtaagcctaaggttgatttgcatagtcctattgataaacggaggtggctgtttttataggtggttattttcaagttgctttggttactgaattttttcttgaatttatttatgcaaatattgaagtctttagttctttacattattcattctggctgaatcatcacaatccagtcactatattaaacccaattttttattgaagcattgttggtgtacctagccaagaagaattaatttggtagagtttatgagtgagcaagtagaaatattagaaccaaagcaataccaagtttaggaaggaaagatcaagaaaaggaagtagtttagattgcgaagagcagcctcaaatttaagaaaacgtacagttcactggaaaacatgttctttgtcttctgtagatgacaaaagtagtagcaggattttttagaagaggctttgtcctatacgcaccagccatttccattcatttctgtaatcaggccttctccgaacataaaaggaatcacaaacaccacattaaaataattcatgaacgcggattgtgctgtgtctgaagagcatgtgcttcattttatcagatagaaacaaacttttgcatctatcctaaacatgtgcatcactgcatatcaaagggtgattaacagagtagtatgagttgggccagcaaatgttcactggaagtgctcctaaggcagtatgagtctggcttctccatcgttcatctcaaagggtgattaacagagtagtatgagtctggcttctccatcgttcatctctaaggcagtttcttttcagttttcacaagcccttgtcatgtacgctaccacctttgggattgttgtttggtcaggaagccttgttgggtttgttttacagcggaatatgatgcactttgctgaacgatatgaatattcatctgttgttggttgcattgtactactacacaattcttcagccaaattattgtcatagtaatcaacgcatgatccacagatatgttttgctgtaaaagggtgtatcattacttctttagtgcttgtaccgtgtgcagttgtgcatcaatttcaagaacatggactgcttaattaacttttgtcaggcaggagggccattgctggttgcaacttaccttgttctcagaatggttgcaacttaccttgttctcagaatggttgcagctttctttgatcatttggcctccctttatgcattcatctgcacaagcacaacacaggatagagaaataagtggtgactgatgaatgaggaagagcagcaacgcaggggggttaggcggatctgatgcatggtcacgccggccgccggcgtgggccgctccgaggctgccggtcgccggggcggaggcgccgcctcgctgacgagaacccgcgggcgcagagctgggaattcgagagatttgttgcaaacctgattacgaactgaagctttggttttctctgaatcttcggaggtggaagacgcggaggggcgcggggaggcggatttacaccggagacggaggaggcggccagcacgcggcgacggctgtagtggagtcgtcgccggagtttggagcggcggcggcggcggtggatttcgctccgaggaaggaagaaagatgggctgcttgggctgaagcgggaaacctgaaacttgttagcccagaacggggaagcggcccacgtggtgcctatactagttgggcccataacgggattgcggcccatcctacttgggctggaaggaggaattttttttatttataattttttttattaaaagttttacaaaaataattttccaatttgaaaattaacggaagtagtcgcctaccgccctcaaatcgccctcccagagggcggcgaaaatgacatggcagacggccgttcgctctcgggcgacggccgtcaacgaaatttgcaggcggcccccttgccgtcctccgcgagggcgattttgtactgtgcggggggccgcctgcaaatgggcggcgagggggggcatggaattttgcaggcggcccccttgccgccctccgcgagggcgattttgtactgtggggggggccgcctgcaaatgggcggcgagggggcatggaattttgcaggcggcccccttgccgccctccgcgagggcgatttttgcctcaccccctataaagcccagtccctcctctgtaaaatttcattatattcactaaaaatccaaaaaaaacgaaagagagagaggggagggcagcagaaggggagcggcgaagccctgctggttcgctcaattcatcacaggtatgctcccatacatcttttgcatttgtactaatatgttatgtttgagtatatatgttgcgttttagttttagttccatatattttagcacatctgtagcacacagcacatatgtgtagatccagagcatagaatataatagtatgaattgagacatagacagtagtgttaattataagatgtagtttagtttgatctggagaatgtaacgtaattttagaaatttagagaacaatattgtagagaatgtaacttagggcgtagtacagaaatgcgaggttaacgcagttattgttttcatcaggcacaatgtcaagtaaggtcacatttcagatagttcacggtgaaggaaatattagatttggtccagatggtgttgatctgtcagattttgtaatgacatctaagggcatcgataggcctgcggagagaacatttcagtcaatttatagttggttgttgagaggatttagaatagaccaagaagtctacacaatgtcagtgtcagttgtagtgagtcgtgcaacagaaggttatttttgggaactaatgccgatggacagcactgatgcttggagacggtatgtggaaatggcttttgaacggtcatggcccctcgttatatttgtgtcggtacaacagaaagatataaatgtttcaatgcaaaccgaagatgtagagggttctatcaatgcaggggatgttgttggaccatcgatgcaaaatgaggaaaatcaaccaagggaggagcaggctatgggcatggcagatgagggggagagagtcggtataattgttgatgaaatggagagggaagattcggagcctcactgcccgcagcgtgtgatgagacagttcggacttaggcaggtgtttccgggcaacgtgcagccgaccgtcctccctgccgaccactcgtgagttcggattgttcatttctaaatttttatgataattacttcatcgagccatataatttacctctcttcacaggttgactcgacggggacagctagcaggcgcactttgggctccacgtgtacagcagtacgttgacgactgggtgttagctacagaggaggtgatcaacgagctcttcccacacacggaggagaactaccgtgactaccttcgctggtaccttcctcgcactcgtgcgcgtgtgaccttcactccagacgccccagagccgcacgttgccgctgtcacggacgcgtatcccacgcaccgtgaccgagactacttcgtggcggtacgtccaatttgtattacttcttacaattatttcatttatcttgcataatataggacaactactgaatttgttatttccatcttgcataggctgatgccgcacgggatatcagtgccgatatcaccgcagtccaagtgaggttgaacagaggtttgcacttgactgacgttgagcagagggtgaccttcgaccggatgcaggagaagatgcgtgcggtcatgcgcgtcttctcctgtcgcagcgccgtggacgtcgtacctccagctggtccggtacaaccacggcctcgcgcgcctaccgtcggagcaggacctcgacctacggcacctatttcgcacggtactgctcagcccagaggtttcttaagttttgtttctgtttttgtacgaaaacatcaccccgtcgtaacttgatgatccatcctcgcaggacctcgtttgccttcgagcgcccctagcttcggatcagtgcgacctacagcaccggtttcgcacggtacagttcagcccagatattacttcatttttgtttcagcttttgcacgattatgtcaccatgttttaactgcacgtttcctcatcgcaggacctcgtctgccttcgagcgcgttcgtaagcacgaccggcgcttccacgagctccgcaggggcgttcgccacctcttcgggcgcgttcgccagctcttcctctcacggagcgtcgatccctcgcccacacggtactttactttttattaatactgttaaatacctgtacgaaactgatggtccttgtccagcaggatttgcagccgggatcttcggtactggggcctcttcgtctcacgccggtaggactggtcctactagccagttctacgacgacgacttgcacggtgcagaccaccacgacgtactaggctcctctcagcttggaggagctccagaggcgcacactcaggagcagccagaggtcacacctgtacaggcaggacgggttggccgtgccgtacccccggaccgactcacgtactcccacgggcacattagggcgcagggtaggagggacaggggtaagaggcctcgtcagtagtgttctacctcttcagtccttatgtgaccgtttcttttggcttacaaacttgtaaagcagtactacttttgctattactactgcagtactacttgtgtttgtctcgtctacatagttcttttcattcatatggtgctagaacaacttatgctcacgacaacacactttcggcgctgcacggtagtgtcagatccagtagcgcgcacagtccacaacagcacacatgaaaagcggcagctcgagttatcactatcaactttcggcgctgcctgtttacataaagtgaatcacgcccacgcgtgatcgtcttgtcacatctaatgaataatgtatctcattgagttcacatatattgcaatgaaaacgacgttatataattgacaatctgaaggcaacctcttaatattttctttcccactagcacacaacacacgaaaatggaagcctattcattggtaatacgtaatctagatttgagattatgtagaacattcttcactacaattttacattttggcagcaaaccaaatatgatcaaatgcaattttaccttaccaaatatttggtcgtgaagaaaaatttggcactaacaatccaaatatgccctaaaaattaataaaatatttgtacggtaacaaaatatttgtacggtaacaatccaaatatgccctaaaaaataataaaattgtattttaccagtcttggagattttaatcttgtatagttttcaatataaaaagatttgataactattgatatttatacaaaaatatagagcacagtataaaatcgccctcgcggtgggcggcaagggggccccctgcaaaattccatgccccctcgccgcccatttgcaggcggccccccgcacagtacaaaatcgccctcgcggagggcggcaagggggccgcctgcaaaattccatgccccctcgccgcccatttgcaggcggccccccgcacagtacaaaatcgccctcgcggagggcggcaagggggccgcctgcaaaattccatgccccccctcgccgcccatttgcaggcggccccccgcacagtacaaaatcgccctcgcggaggacggcaagggggccgcctgcaaatttcgttgacggccgtcgcccgagagcgaacggccgtctgccatgtcattttcgccgccctctgggagggcgatttgagggcggtaggcgactacttccgttaattttcaaaatggaaaattatttttgtaaaacttttaataaaaaaaattataaataaaaaaaattcctggaaggagagagcggcggagtgcgtgcccatactagttgggcccataacgggagtgcggcccacgtctggctcatcctacttgggctggaaggagagagcggcggagtacgtgcggcccataccagttaggctcggaacgtggcttttgatgggcccataccggttcgctgtctgcaagaaccgggtgttttccggtgatcatgtcagcggtagcattcccatgtatggaaatcttcctctcttgcatatctcaactgcctccgtcccagaaaaatctaacctaggccttttttttttttaccaagagagtagtgagcaatgaaagttctaactttttttttaaaaaaaatgttcctctcttggatgacctcagccagaataatctactccagttggtgacgtcccagacgggcttcttgagcttccacaactcaggattttgctccttccatgaaagggcaacctgacaagcaaatttcgtttgcatgtaagaaagaagacttgaggtacgacatgattactggtgccgaatttttttcattaaaacaaaacagaaaacaaattaaatgaataagacacgcatccccatatctaaaaacaatttgagctctaactgtgatggcgggtaatcattttctatctagcctcctctagcagcaaccaatagaggccattgcttcatttatcagaagggtgatctcatgcaccatattcgatcagttttcatggcagtttacatcagaaaaaaaaaactctggacggatctgattctggtgggtacagaagaacaaggttttctacttttcccttcattaactaataatttgatagattttagagggatgcaattaacaatcagcattggtcattttctattccttctatgatgcctaaatatttcccctagggaacacttaatgttcagactgaaaatatcagggtagagtacataatccctcctaagtttgcaaagctacaacagtttatctagaaatacagtattgtagcaaagtaatatttcatcgatcacaccctcataaccagaaaccatatattgataaaaatgtaaactacaaccggcattaattgctcagcaatgattattcagtttatttaacatttgaccacccaatttctcaacttatactgtagatgataagttatccagcgccaagtttccagaagcgatgcatatttagtttagtatgtaacgctattagcatctagtaatgggatcctctagagtcgacctacaggcctgcaagttaacaaggatagagaatatcctacggttataaatatg

SEQ ID NO: 28967 - DNA, 1483 bp, Oryza sativa
aatatgatcagagcaggattacttactatttaatttatttctgcttttggcttatggagaaaaaatcagttagtggtgagatgatctcctcatacctgatagtatggagttcttttgaaaaggtaaatattgatatcatctttatggtgccttttcacccgtttctttgcaagtcatctcttatcttgaccgttcctccaaaccagctcaaattatttcagtagccacaagcccagtaaaaagggacaaaggctaagccagtgctggtgtcaaatgtgatgccgacggccacaacatcctgaatggatccatctgccaggtgaaatcagtgcaagtcacactgaacggtgagtgttctctgctctgctccattcacacgccataaaaaaatttacagtgtcacacaaggtaaagtggtgaaagcaaacttttgaccccttcctggatgactctttggcatttccctctaatgcaatctctatatatgtataattcacaacttcacataagcaactaactgaaaattgcaccagtgtacttcagatgtaaccagtcgatatcttgaatcgacagagttgccgaggagagtggagagagaactgagaagtagccatggaggtgatcagtcggcaccgcgctcctgctagcagtagcagcctgtgcttgctgtttctgacctttcttctgagcgtgtcgatggctgcggccaccgagaaatcgccaatgcaactgaacaaggcacaagagaacatcatgcgagatatcctgggcttggtcagtagtgccatggattcatctctcaccaagagctggaacaccagctcaaatccgtgcgaatggagtggggttcattgcacttctgctgcatcctcttcttttgtcaccaggctctccctccccggatatggcctctccaatgccaccatccttgcatctatatgccttcttgatacattacactcccttaatctctctagaaactccttcactgacttgccaagccaattctctccttgccccatgaaggcagaattgcaagtgctcgatctcagctacaataggctatccagtcatcttggcaatttctccggttttcatgagctagaggttcttgatttgtccttcaactctttaaatgacaacataagtacccagctgaattatttgccaaaactgagaagcttgaaccttagttccaatggctttgaaggccctatccctacaagcatggttacctctttggaagaactggtgttctccggtaataatttcagtggtagaattccgatgggtttgttcagatatgggaatattactctgttggacctaagccagaataatctagttgatgacgtcccagatggcttcttgagcttcccaaaactcaggattttgctcctttcagaaaacaacctgacagggaaaaatccacagagcttgctgaatgtcaccacaatgtttcggtttgcaagtaatgagaaca

SEQ ID NO: 28968 - DNA, 692 bp, Oryza sativa
gccttccccttgtcaattatataacgtcgttttcattgcaatatatgtgaactcaatgagatacattattcattagatgtgacaagacgatcacgcgtgggcgtgattcactttatgtaaacaggcagcgccgaaagttgatagtgataactcgagctgccgcttttcatgtgtgctgttgtggactgtgcgcgctactggatctgacactaccgtgcagcgccgaaagtgtgttgtcgtgagcataagttgttctagcaccatatgaatgaaaagaactatgtagacgagacaaacacaagtagtactgcagtagtaatagcaaaagtagtactgctttacaagtttgtaagccaaaagaaacggtcacataaggactgaagaggtagaacactactgacgaggcctcttacccctgtccctcctaccctgcgccctaatgtgcccgtgggagtacgtgagtcggtccgggggtacggaacggccaacccgtcctgcctgtacaggtgtgacctctggctgctcctgagtgtgcgcctctggagctcctccaagctgagaggagcctagtacgtcgtggtggtctgcaccgtgcaagtcgtcgtcgtagaactggctagtaggaccagtcctaccggcgtgagacgaagaagccccaataccgaagatcccggttgcaaatctgctggaca

SEQ ID NO: 28969 - DNA, 1377 bp, Oryza sativa
atttcagtggtgtgatcccaccttcgatcagctctctgcagtttctcagcaccctcgatctcgggaacaatcagctgacaggaaccattcctacaatgccaaccaaaatcggtgctcttatactaagtcacaaccatctccaggggtctattccatccagcattggagctttaagtaacttgctgttacttgatctttcagacaaccacttgtccggtcaggtgccatcctcgtttgcaaacctgaagggattgatctacttgtctctttgctataaccagctctctggccccatgcctgagttgcctagaggggtaaaggttgatgtatctggcaatccaggtctcacaatatgtacagaagactctgacagtcaatacaatatggctagcactgaagatgacttcaggtcaactacatgggttgcaacagtttcttttgtagttggcttcatcatctccttctattgggctggtatcaggaagtattgctattgatgtttcttatgatcataaagtagtgtcagtgggaacacgataacaactcaaaacctagctgcatatccctgcaagtcacaagtagaggtattgtaagtttatagatcatgtcagagacaagactattctctcacaagtagggatggattgtacatgaatgtgtgtggaataacaaattactgataataaaaatgaccatgctcagaccgggctttacctcattgtgctagaaagggtgttactctttcacatgagattcacatgaaaaaccatgtcaacatactacatagattcacgataatcagaaactatttcagtatggtgttttttcttaagttcctccaatgtctgtaccaggttgcaagcaaacacttcatacaaaggtacggtcgcacctatggcaatcaaaatatccaaaaagtgtaatgatttcacgaaataaaatgctctaaaaatagaaaaatgcagaagagcaatattcaactaaagtactaaacaaagtcccccttttatctttttctctctttttttctggaatagttttgcagaagtctatttcagccaaagtagcaaaaaaaaaggctactaatataagtacaaaaccttacatgcattgcatgcttatattaataaccttataacataacacttgttggtattgcactattgctgcatacaggttagttgcaattttttgctagcaacaacagaatagagtaatctatcactgtcagctgcaggcctgcagccatccaaaaatttggaacaacatgtcctcctgaccaccaagtgatactcatggtcaggtagtcagcattcacatttgtggatgagctgccgtgcaagtaccatcaattcaaatgacagttacagggccaga

SEQ ID NO: 28970 - DNA, 2109 bp, Oryza sativa
ttgatacttacagtcccagtcaacatattgacaactatgttgggcagcagtttatcaggtaggtacaggtaaaaaataaaaaatggaggcctgatgtccctattttacatcttcctagaaaaatcaggtaagctcaaattgcagcacaactgcatgactgcctaaaaatatgtttttttttaaaaaaaaagaaagtttaaaggatgccaccatgtgcaactgcacttcatgttcttttccagaactggtattctggaacaactttctctcaagtttcaactggctttaaggttggaacaatccctgttttcctccatattagagcaatcatcatccagaaaagagttatcaacagataatttcgtcatatgcatagactttgtaaaagctccacctccagttcttcatcatcaagttatgtcatgtctgagcattgtgtgaggcgccaattttccgaaaggttcctagcatgtgatgtcgaagaattatctttatcaggcaatattcaagtctttatatctaactggaaagtcttccattaggtagcgattatcagctttgggaagtgacaatggcaaggtctcttcgtccacagaatctcggtatttcaatggaacgacttcaatcgaaaacctattttggctggccgactttgaacgacttgtgggtaaagatggtccagtacctatttggaaaaatctcattagacatgatgacatagtagtatctatgaaaatgtgtaaaatgacagattgtggcatactgtcagtcatgtcctttgtcttgtggaggagaaatgtcccagaaaggatggtcacaaaaccacacagctccgtgacaatttgtgttggattttgtcgatcccaatcctgcacgtaataaactatgctatcacaaattgaggaaataaactttccataaggcatcaattgtttcttgaagacagcaacattgtgaaagaaaattaaggtgcgtagtgcacggtaacaacattgtgcaaaattataatcacagcagcatagttagcggagcaggacacatgtagaactacacattaagccaaaaaaaaaaattgttcatagctttctgcaacaagaaagttgagtgtataagggctgaatgcctaatggaagtgatagaaaaagcttaccttaaacattatcacactggctaaaattgttagtgaagtaaacatcacgtaatatattggtgagacaactgctgtattaaaggtgtccaatgcctgcaagtcacagagataaaagaattactattgcgttaatgtaataagcccttatgtgatatgttacaataatggtagctcaataagctacatgttctgtactattgcccagagtgacatttcaatgccccagtgacgagccaggaaagttttacagcctgaagccctggaaaaatctaactacgctgagtatatgctgcaattctattttcaatccctacaatgatattaaaattctattgcacattcaccaacgatcccgggtggctccaccactgctatgccctacatattatttgagctagtgaagattcttttaaggacaggtgcgatgaagttgtatgaatgagacaagctgttagaagatcccttaaactcaagttaaatctcttcatgtaccttatttagatagtttatctgggtgctcacacaggtggctacaattagggcaaaagcccatgtctgaggatagaataactggttcactcctgagaatgttaacttcaatgcaatgccgagagcttttacactcatcacctgttaaattctcaccatcagatagaacatggaatttagttgaaacaacagtagaaaaaacaacaaaattgattatgattgggtcatatatttggacaggaagcgtacagtgagagatcctagaagagaacagactccgatgtacaccatgatgtttgtttgtccatgttgagggacaacaaaatatataagcaccagtgctgcggcaactactatagcagcgtagcaaagaaaacctggaaacaaagggaaaacaataatgaatcagacattcagtctagcccgtggaacttacagtaaggctgctgagggctatgttatgaacatat

SEQ ID NO: 28971 - DNA, 2949 bp, Oryza sativa
ttatccccatttgttatctattatgaaattgtattacattttgctgctactttgattgtttgttaagggttgccatgcaacatatagattaatgagttgagtccatgatcctggagatgcccaattctctattattgtaaactgtgatgttcttgttctttctggaatttctttggggcaaggaacttaacagtgaaatagaggcttgcatcaaaagaaccaaaaagagtaaaagagggtaatttctaccagttctattgatgactttgtggcttagctttggttcgttttctgttttatatgaaaacagtatattcttcactatggacctctctgctggttggcaaatctgaatccgtttgttcaatccattaggttgcattcttaaaaggcatggagttaaatttccatggtggtttttcaaagtttactttggttgatgctttcatagacgtagtatggtccaatgtggggctgtaatttgtcatcattccagttatgtcatcacatgtggcatgtgatatacctgtcataaaaatgcgtttaatattgccatgctttcaccaagttgtaacgatacactattgcataattgctttgaagtttgttttgactagattgaagatgtgaaaatatgatctaattggaatactgaaatgtctacatgattagctctaaacctgccacaagttacttgacattcttctctacaggcttttctgaaggaagctactgctatagttccacttgttatatttgatgatgcaattggtgatcctttatctactcttgaccagttttgatagttcattttttggatctggaatcgtactagaggtatgcctgaaatgcattagcttgtattcagaactatgctgatgaaggcatagttgatcatagatagtgttaaagattgtaaatctgcggttttcttttggctgcttttgtttaccattaagatttgaagaaggtgccaggcataggcaattctttctttcccaaagtagacttcattaacttgtctcaattgcaggcgccaaaaagaagttgagctcagactattagaggaggaaactgcaaaaagagttgagcaagctattaggaaacaagttgaagagagtttgaattctgaggaaatcaaacatgaaatacaaagacggattgaggtagggcgaaagaggatacatgaggaggtattagtccaaattgagaaagaaaaggaggcagccctggttgaagctcagcacaaagcggtaaatgtcctgtcgctagctcatcttctgctctttgacattagaacattatcccattcatgaaattaaaagatcatctggagatttttccatgatcaatacaggatgatgggcagagggtatgataggatatttgaggaagactataatcatcgatcctttatctgttgttcaatgctcaattgctgagtggttttcacggatatttgaggaagattataatcaccgtgcttttatctgctgttcaatgctcaattgttgagtggttctcacaatactgctgcagaattctctcaattgaatgccctcttattcttttcttgtcgacgcaggaacgcgaaaggaaagagcgggaggagctagagaaaaagctcgaggaagagcggaagaaagccgaggaggctcagatgaaggaagcaatggagcagcagcagaaagagctggagcggtaccaggagctggagaggctccagaaagagagggaggaagccatgaagcggaagcagatggaggaagagcagcagaagcagagccagatgaagctgctgggcaagaacaagtcgcgcccgaagctgtcgttcgcgcttgggatgaagtagatgaaggaaattagtgccttattatttagtcgatgtgtattttgtaacagtctatctatgcctgaaaacatcatctctcttgctggtaaatcgtttgcagatcgtgggcaagaagaaagctctaacaatgtttactgtactacacaagcctgtggcaacctgcaagttgtaattggcttgggcattttaccatctcatctcaagtgtaagctgacgatttgttaacagttcagaacctccgaacctaccgaatgggttctacctctacccatatctatgccttacggacatagataacctagtgggtacctgatgggtttttaataacataatgaataatatctctataaatagataactgaagtagcaacgcaattaactagcatgcgcgaggtcacggcgacggcggaggcgctccagttcgccatggacgagatgggagacgacgacgagcgcgcgaacaaggcggcgctcacgttcgccctgctccgggcctgtttagattgttgctaaaataaaccttaccaaatttgttaaaattttggcaagttgtcaatattgctaaagttttgacagaatttcttatgtatttactaaatttggcaacaaactaaacaaagatatttattttgataactttaccaaaaaaaatgatatggttgaaaattgcatcaatatgaacagcccctccatgagaacgcgccttggcaagcactgcggccttgcgctattcacctccaacatgaaccgctacggagacatggccaccaaggccacagataaaagtagatttatctgatattttgaagcaacttttaaatagaaaatttttacacaacacatatcgtttagcagtttgaaaagcgtgcgacgagtatctaaattttcatccatttcttttagaggaaacgaagggtaccatggattttaaaccgcattaattcacatatcctaaggttattaattcacatatcctaaggttgtgtttagttcacaccaaaattggaagttttgttgaaattggaacgatgtgacggaaaagttataagtttatgtgtgtaggaaagttttaggctatgtttagttcacaccaaaat

SEQ ID NO: 28972 - DNA, 1628 bp, Oryza sativa
cactcaaaagggaggaaaccccctaccttttcccagcaacccagcagccgttctgatcagttctcactcccctccaggcctccactccaccctgtcggcgatcgagccatccatccaccgatgccgcccgcctccgccgccgccggtgacggcgcggcgcccgaccaagagccgcccccgagccccccacccccgcctccccctcccccgccgcctagaccggcgccctccctcgcctccgcgctccccttctggttatacctcaccgccaccgtctccctcctcgcgatcctcctcccccacctcctcccttcctcctcacccccaccccctctcccctctctcctccgctcccacgcctcgggcggcagcgtcctcaagctccatccgggccccgacctcttcgccgtcacctccaaacccaccaccaccgccgcggcgcaccgccccgctgtcctcgtcctccccggcctcgccgccggatccttctccttccgccacgccctccgctccctctcctcccgcggcctcctcgccgcggccgtcgacctcccggggcagggcatgtcgccgccctgcgacgcgccgccgccgccgcctccaagcaagagcgccttccgcgagatcatggaccgcggcgtcttccacgccttcgagcacctcgtcgagacgggcgaggtgccgttccaggagcccgccgccgcgccggagccgccgtcccacgccccgctctacgcgccccacgaggcggccgcgtccgtcgcccgcgccgtggacgcgctcggcctcggcgccgcgccggtgcacctcgtgctccacgactccgcgctcgtggccggggccgccttcgtgtcggccaacccggcagcagtgcggagcgtcaccctggtcgacgccacggccgtcctgccggcgttccccgtggcggttctcggcgtgccggtgctggggagcatggtggtccgggtgccggcattgttcaggggactcctgcggctgtgctgcgcgcgggagatgggcgcggaggtggccgaggcgcaccgtgcggcgatgcgaatggaggggaagagggatgcagtgtttgagtcatggaaggctctgaatcagagctttgatctgaaggagtggaggggctctttggaggcagtgaggaaattgccgatgatggtgctgtggtcgggttcttggactgataggtggatcgatgaggggaagaaggtggtcgcggcattgccggatgccaaattcgtctaccattccggtggtcgatggcctcaggtcagtgtgatggtttcctttttcataatcaattcaaaatgtagagagtgtttagcattgtgctgaatgtatagcttagctgatgtagaggttcagactacagacagtcatgcaagattgcttgggcaggttggccttcaagctctactttaagttaactagtgatttactatgcatcataccaatgtcgctggtctgatacagctcaccatgatccatcatgttttgttaagaattagtagcacaagcatcaggtgtccattggctaaggatgcaaataatctctagaacggagcagtactcaacacccatcgtctcattgcaaacatcaagaccagctaactgaataa

SEQ ID NO: 28973 - DNA, 1884 bp, Oryza sativa
tcttgctgtatcctaggaaacagaagttcgtgtatttgcttctctgcaccaaactctgaagtggcctgcagtgcagaacattcggaagcacatgaggatgaaaattcagataaaatctgttggagtggttcagctgagaatgtaagcagttttattcgtcaacgcatagatgctggtttcctccttgtagaaaagggtactggtttcctgcaattttgttcatactgaaagctgatactgacctttgcagggaacgcaaatctcagtgtctgcacttgtgttcctgagcacactctcaagtcaaacccaaggcagtccactccaatgacagctgcctcctgtggaaatattacatttacagtgatgacccaacattagcaggcattgtacttcctccataatgttcagcaatctgaagaaatttgtacctctatttggatggccttgcacctccagcagagtgatttcagagcctggcttatcttgtctccaccagctctcaagcgcgatattatgttcggtgcagaatgcgcaatgatatctggcctagctttccggtattcccctatctttacctttggctacaaggaattcaagcatgaaaacaattttactaaatagaaattcacagtacattgttcattattcatagactgaggataaatagaaataccatatcaaaatgaaagaactatacctcagttccatatgcagtgatcagctcaatgctcagaacctcaaccttgaaaaatgtagcaccactctccttgttatctttccgtggttcatcatctgtacaaattacagaaacctgtcaaaatcctatgttccagaaatcctatgaatataagatacatttctgagttcatagcaattgctacttgataaatgccttgaaaccatggtgctctcttcagcaaaggctggtctcagttgaccctcaacaacaaggcttgcaggtggtctgtccaaccagtctatactagacttggttgaggtctgcacgtacaagtgaagaacatgatgcttgaacaaatcatggcaactaaaatgacagatgctaaaattctgagtcagatacctctgcaatcatccttgcaaagtacaatggatggcaggaattcatggtttctagatctgtccatctaggcagatcttcgtcttctccatcctcatcgccatcgtcgtcatcgactgcaaacacaccctcctgcaatgttttcagagatgcagcagtgtcaaggaaaatccaatcaccaattgcaattggcaaagtaatcaagaaccctgaatttcctgagaaggatttttcatcaccccatcaaagtcatcgtcaaagtcactctcctcatcatccgagtcgtcatcatcatcgtcgtcgtcatcgtcttcttgagcaaactcagtcgcagatgccgctgccagatccaagtcagcaaagacctgagtgttgtcaagccctatgataacatgctacaaccatgaaccatcatccaaaacaagaattcagtatacaacgaagataaaaattcagaaacaagaacgaaaaccggggaaaaaaaagggcgtaatcgtcaccgcagtcttgtcgtctcccatgatgctctccaggagggcgtcgtcgttgtcgacctcgaagtaaatatctgatgagagcagattgccacacatcacagcatgcagcttcaagaacaaaattaacagtgtctccagcaaaagtcacagagaaggagctaagctaagctagctagctgcatcaaagcatcagctcaagcatccggttttctcgcatacctccgttctcatcggtgaggtaggggaactccggcaggatgatcctctcgtgcacgccctcgtcgatcagcgtcgagatcatcaccgtcg

SEQ ID NO: 28974 - DNA, 1519 bp, Oryza sativa
atatgaaaactaataacacctagagcaaattactaatttactggagtaactactccctccattccataatacaacgcaatttgggtttgtcttagagtcaaatttgaccaagtttacaaaaaaacgtggcaacatctacaaaatctctctgtcaataaaattatgtactacagtatgttttcttttgagtctctagaaatgctccaaatagaatttcttaccgagcactagagttcaagttccacacttccacgttggccggctgttcagctgcttcaaaacccttttgaaagtcttattatgacaccataacaaaaatattcccttcttacagcacacagttaactatgtgtaaataaagctttcgaatagccgatgacaaatagtagcgatgtacttatctgaatattgaatccatcaccaactggaaggctagaaaactgacttcagacagcgattactgttaaaacaaatcttgcttggattgtttgtaaatatcatcttctgtgaataacataaagtacgcatggtttaggtttttagcaataagcaaacatgacatatccaatcagcaacagtttttaagccctaggttaatataaagaatccaaatatgccatgagcgagggagtaacagaatataaccattgccctaggatcacaagaatagacttttggagcttgatcgttagggaacaaaaataaaaaactgctctttaaattaatcgatgtcacttattcactctatgcaacaatcacttagatcccctacatccatctcagtatcatctgcaagagcgccatcatccatgatatcatccgaatcttcacttttgacatccaatatagaatcagtagcaccgctactatcatcattaccaaacaaatagtcctctgaatcagacaactcggcaaatttaccaagattcttgatcctccctctatagctggtaagttgaaggactttttccttccacctcaccaatgggcacttctctattaattctgtcccatcataagactccgtcaagaatacgctaaaccgcttccccctctcagagacataaaagatgccataatgcttcagaagcagtctcatcaacttctgcggcataacaaactcacgacggaaatgtgtgaggtgatcagtcaccagcctcttttccaacgtgaagttcagtatctcatgcatcactgcaactgccctcttgtcaaactccggcgagccaggagtcaatcctcctggttctgcataaggagataggtatgttgtcttctgaaactgctcagtattgccttttttcacataatgatgaacttttccgcggaatttgtagtaacttgtaaaatttggtgggaacttcatggggaatgatagtgagagctctcctggtggactggcaatgtcattagcatttgcatcaccagtcaatgctgccgtctttttctcgagctcggtgactgcccagtttggattccaagagacaagctccaggtaatcgccgtcctccaacctgac

SEQ ID NO: 28975 - DNA, 6078 bp, Oryza sativa
gcgcgcgccgagggaaaggaagagggtgagagattgggagaaggcggcagagaggaaaggggagaagctgaagggagcggaagagacccatggatttgtggggcccatagcggaagaccacacggcgacggcaccacaactggtattgttgcactgtagagcggaggcggatagaattttcctgtatatcgcatcggatagacctggagactcctgggtactattcgcctgtagcacctgagatgcccctcccaaaaactataaattctacagatttgccactcttacgagtggttctaaacgatttgttacttgactctatgtcatagacacataagggcccacatgtcataggcagcgagtgacaaattcttaattgccacaccttaaaagtggcaaataattaaatgtccttagtcgacgacgacgatggtagaaaatgtttgggttgccagaaaaaaaagagagagtagagcttcgcattctcctaagtccatgaagaatacacaatcttgtaaatgttttatacaacatctcactatcatgttgtgtctcagttatgaagaggcaaattgaaaaaaattgtgaatacataataggtctatttcgttatccttttgctacagctgtgtgggctataactacaagccagtaacggtggtttatatcttgctgactacaatcacaacaacgttttagcatcacctaccaaataggcccaatgtaaaaatatgattcggttagaaaaaccaacctatgcaaattatggtgcatgttcctcgcatcattcttgctaggcctcaacagcaaagagcgaaacttataagcatcggttattgtctttcttatgtcataaaattctatcgatagaacacaggtagtagcccaatgaatgcatgcatagctagtttgtcagattcgtagctagaaaataactacattttttggatggagtaccaatcataagttaaccagctgcctcagcaattgagagttgaacgaattttgtaaagaacgcccagaaggttgggcaaattacattttgagaataggaatatgaaagaagagctaaaaagaaaaagaaaagaccatcaagttcttgtctcggccaaatctaataggaaagagaactagtgttgagctgtagaagatgatggggacggctaatgggcgatcgatccccatctcactgtacactcctctccccccttcctccctcccctttttttcttcctactacaccataattttttttaaaaaaaataaggggaaaaaatttatgtatagaaatattatatataaaaaaaaattgaattcaaattcaaattggaaacgggtacgtaaacttttgacttataaactttgggtctataaactaatatttgaattcaaaatcaaatttgaatcgggtatgtaaacttttgacttataaactttgggtctataaactttaaatgtatagaaatactatatataaaaaatatttgaattcaaattcaaatttgaatcagatataattcaaattcaaatttgaatagggtacataaacttttgacttataaactttgaatctataaactttaggtgtataaactttagatatatagaaatactatatatataaaaaaattgaattcaaattcaaatttgaattgggtatataaacttttgacttataataattcgctctacaaactttaggtggataaactttagatgtgtaaactttatgcgtataaacttaataaaagagaaaaagaaaaaaaacaaaaacgatcgccgccagcgatcaatcgctcagtaggactttcggaagatgatgcctaggctcgaacatgtatggggcttccaagaatgggaggttgaaggagttttggcaagcaaagataatatcagtcatatcttatatatctctcactggaaacgaaaaagaaaccatcaccgatgcgggaagcttgtaggagaagaattgagcgatcgtcatgaccttcttttcgtttggatagaggacaactggacaagtcctcaaccccaagaaaatcagctgaactcccaacggtaggcgttgatggagaacccaacaaccaccgtccatgaagtcctgcatgcctatcaagtcatgacaagaatagccaaatgcccgtaacctcttgagttgcataaagaaaggaaaaggaagaagaacgaaatgaacagaagtacaggtttaacccaactagcctgcccctactagggaccaaagaaatcctatccatcattctcccatcacgtgacggtgagccaccgaaatcacaaagagggacataaaggttggggattttcgtggtgctaggaggttcgcaagagctccataaaagaagagttttcagtttgttagtactttacatttgtatgtgtagtttgtgtaggactatgggtaagctagacaaaaaaaaaatccacggtaggaaaccatgaaagcaagagatcatatatcgttaccacttaacaagcgaagcaatgggacgagagtcagtcagattagccctgtccagcggatcatagatcatttagaaataataatgtatcaaataaagagtcctacgattaagtcacattcttataaattaataataagttatctatttcacaaaacagaataatactttattcatttcattataaacatagtatatactctatagtatatgatacaattcgtctctctagggcatatagctgatagtttgcgtgctgcagctcagcttgcgtgtgtgttgattgtgttcacgtcaatttgttttccaatagtaaaggaatcgctcctgaaaaggaggataatgcctactagttacaaacaacaaggacaaggcccagttttgcccttaaaaccttaaaataggattaaattgacctacagaatcctttacaagctacaaattcttcagatattagaatacaccaaaaaatgtggcaacagcaaacagcaaaaaaagtactcctcctatcaggccaacctggaaaattgtacattcatgtaagtgaaatacccaaaaacctaaaacacaataataccgagagcattaactattaaaccaaaacaagaaaccaagttaattgtacaaaaaacttttaccagcttctcagataggtagttggcaaggaatgctcccccaacaattgcaaggaaagttgcaaccaagtgtccagctatggctccgcttgcgacaccaaaaggagactacaaaaacaaagacatgttttttttatggtaatacaaatctaaactaaattatacatatgcattctgttgccaagtccaaaacaaacctgagcagcacctaacgcaattgtagccagcatagagcgatctccccattcctgccagtaaaaatcatttggtgagcaataaggtgttagttcactacgccctttgttaaaaaatagaacagctattttgtttcgttcaaacaagactttgaccaaccaataacctattagaacataatttttgtgacacaaaatttatgttattagattcatattcggagtactttcgtatgattatgcttttgtatggcataaatgatacattagtacagcaatgttagtcaaagccttattgtacatgggaatcaacttactgcaaagaaaacaaggctgaaagacttccaaaggacctcaagaggactagtcaactttttagccacctgccacaaagtagaaacaaccttcagttaaaaaaaaaaaaggtgaagagcagaaaacttattttgatacttaagttttgccaccccccccccaaaaaaaaaaaaaagaaaagaagaagatggttttaataaattctcaagagcagcagatgcaaatgttccaaatatttagttggctactgcatgcttccagctttgcagaaagtaaatgcaaaagcaaaacatttatatgatttgacaaaaactcttcacagaatcaacattctgaaaaagcacaaccttctccttgacaagctcctcagcctcagccagctccccagattcagagtttccctgaaggtttccatttgcattatctggaagttgccatgcatcttttattgacttgaaaccaaaaaatgccaggagagcaatcgcagcatactctcctataggtagtgctgcaaaaaaaaataataataatcatgtatcaacaagtatgtccattaggatatcagagatacttatggaaacttccaaaaagtaaacccaagtgcagaaagaatgccaaatatgagtactagaaattacatagagatattgccagagaaagcatagtagtttatacttgtttgaaattgtgctggtacagactgaaaaatccttccaattataacactcacaatagtcattagggaaagagcagccattgacccaagtaaaacctgttcacaaaattacacaggcacataaatgttagagtgactagccaaagggagacattctctaaaataaaaatgaaaattgagggaaaaatatatttctctaaacccttaatataattcagttgcccggcggagaatcttaatataattcagttataggtagaaaacaagtctttagtttttcttaaatgacaaaaccatcattttgaggttgtatcttttagttcggtagtgacattttattattaatcgttttttacatggaagaacatattaaaagaagagagcaacactgtgaagagaaaagaaacaactcaaataattggacaataacttgagacagatctaaatcaccatgcccaaacgtaccaatgctctctgatattgcatcgcaagaagtgcagcaatgaaaaatgtctgcaacaaaagaagggtcagcgcaacaaaatttctttgcttgcccaaacatattaagcatatagcataagctttacagaatggtaaaaaaaaacaattcttgaacatagctccaagctaggagaacactgaagatcatgtagctacaactaaatgatagtaatacaaggagaaaaataggatctacagtaggtatgactccaaaacagtaaatgagtaattcactatgaagataatacaaatccaatttgactgagttgacactcaagttgtaaagccttgaaatatcataatttaggagcataaaagtacataaaactacttactgcttagcttcatgtatagaaaacaacaagaaggtctcatcatctatcaaattgcaacaataaatactgtgatgtagcatgggaaagaaatgaaactatagacatttggttggacatagcaaatgtggatgacctatttatttcagaaatggagcatcagaatgaaaactctaagaaccatagaatccagacttcataattagtcaaaagaaggtaaagagcatctgtaatgcatctagaaggataaggcaagagaaaaagtcaactttaatggactgtataccttatccccaatctcagatacaaaaatcagtgtaaatgctgccgtgaaacctgactttgcaagcatcgctacaactgcagatggttgtcctttaaagaaaacaataaaagcggatgccagagcacatagaagtagcactgcagcaatggattgagggtaacgagatcctgaaggtggttttgttctgccaaccaaagccaatgtgcagtttaatgctatttagaagagattgggatgaagattgagttaaacatagtagagtataggaactcacggtttgtttgaatctctggtagcagaactatccaaatgttccccatggctacctgcttcgccaccttcatagcttccagctccaacatttacattggatgtctgcactctaacattgtgccgtattggtctcaaccatggtaacctacatctcactgttaaaataaaactatgcaatcaaaatagtataacgatgcctgtccaaattcaaacaagaaatcttacaaaatggagtcattatgcctgaaagtagcaagggaagatggttttaggtggtggcatgaatctaaggctcctttgacattaaaatgaattgcggatgaatgtgtagagttggaatccataacaaacaatacgatcaacttcatcaacgagtttcacaaaga

SEQ ID NO: 28976 - DNA, 1546 bp, Oryza sativa
actgttgtgtctagggattcaagtgggtagtcccgctatccacataaaaacccgtttgctagtttatttttcacatggtagtacaaaatttagaagaaaaaatgaagtagaagtaggataagtgggcaaaaaaagcccgcttgcatccgtggttgtgccatgtaatgactgttgccaaatgtggcttttgtgctagttaactctagttgccaaactgatgtgtgaaggctttatattgcctcacactatgcccaattgttgctatgctggttaagtgaacctaattatgtgctgctatgctggttaagtgaacctaattatgacttattctgctataaagattttcagacttgtgtgatccaaattgtgtcaactattctttcctgagattgaatttatccctgtcgattgttatgtgaagccaattgtgctacccacttgttatgacagacaaacacatattctgctgtaaatgaatcaaaattatgtcatgccatataaaaaaaatcaactagcacagtttgtaacatattcttgccaaatactcattgcattcataatgcaagttgtagctgcaaatactacaacgtgcagttcacattcttgataccatcacagatacgacaagaacacagaatatgacaacaatcgagagataaaatctctcattctctaccctagtgtttacgtactaattttctctgcattctcacaacccaaggctttgactgactccaactattgcctggcagcatcaagctctctgctcttctcctctgcattcaacctctcttcttgaacagccaaaaccagatcttcattcttcttgctcattgaccaaaccaaatctcgcaagtcattcaacaaatctcacatataagtggttgttggcccatcaaaccaagaaaagaaattgcatctttgaagcatctaggcccctgttgttagttttggtaattaataacaagcactaattgtggactaaccgttgtctttgagctatatacatttaagttaggttcacatcatgtgtgcgcatggatgattatcgatggattaaaattgacggcgcaaagcaaaaggaagagaagacggtaaactagtgttttcattttaaattgatcgaggcgttgggcgatcaaaattgtgctagtttatttataggtttgccgtactattaagaggggtaatgatctagcaaagatatgattttaattgccacattaggtcattatgcatttagacttgtgctcacatttcacaacacacacaaccactttgtattcattgtctcggcctgaccaggggcagtggcggtctgacgggcgtgccctggccggccccaagtcggcggtctgaccggtgcataaggccggtctgaccggcgggaccggcggcacttgtgcggtcagaccggccccctggaggccgggatggtgttgctcggggtggccaatacagagccgacggagccgtattcggtcagaccgagctgatggcggtctgactgagccgaggctggtctgaccggccaatcaactgtggt

SEQ ID NO: 28977 - DNA, 6606 bp, Oryza sativa
ctcacatttcacaacacacacaaccactttgtattcattgtctcggcctgaccaggggcagtggcggtctgacgggcgtgccctggccggccccaagtcggcggtctgaccggtgcataaggccggtctgaccggcgggaccggcggcacttgtgcggtcagaccggccccctggaggccgggatggtgttgctcggggtggccaatacagagccgacggagccgtattcggtcagaccgagctgatggcggtctgactgagccgaggctggtctgaccggccaatcaactgtggtctgaccagccaagccaatggggctctctgacagggctacaatggctagttttctagccgttgcagagtagcacggtctgaccggccacatacctccggtcagaccggcaacacacagagttgggggatttcgcccccaacggctagttttggttggtgagagtataaatactccccctccagcagcaacgggcctctcttggtacccaattcattgcatacaccccttgcatctctcacacacccacttgagctttgtgttcatccatctagtgtgtttgagggttgattagccaagagtcaagtgcattgcttcattgtagagctagtgtggcacttgattgatcatgttactcttggaggttgccgcctcctagacggcttgtggagaagttgccctgtgacctctccgagaagattgtggaggaggcccggtgccggtttgtgagttgtttggagttcaccaccttcggagtgaaggaagaactacctcgagtgatcgaggcttgggtagtcctgtccgtgggctggctcccgccttgcccacccctttacgaagggggcgtgcggtggcttcgtggttaagtggtggagttgggctcgcctcaacggggagtaggaaaccggcgagtttccgaacctcggtgaaaaatctcttgtctccttgtctcatttgattgtcgcatttacatttgtgtaatttacattcctagagacatacttgagatcatatcaccctaggattgcaaaactttgacataggagtgtgatttactttcctagagaattaattgagtcactatcaccctaggtttgcaaaacataacttagttgcttagttagacttaaccctcaccaagcctagcaacttagtttagttttgattaggtgtcttttagtttttaaatcgcctattcacccccctctagtcgacatctcgatcctacaatcctacaatccccaaccacatacttcactccccgatccaaatcaacccaccaaatgtgaccaaataggcaacttacccagacattgtgacatttgaagtaccgatgcctagggttttcgatgctccacaagatccaccacgcagccttgctgccacacttgcacatcacggtcggctggtaatcaaatggcccaaccctatacaacatgggagaagcagatggccaatgggaactcgccaatgacgagtagctcctcgaactagccatcgctgacacaccgctccccatgttgccgccacgtcgccatccccgcaacctgcacctttgttgtcgccaatgtgtcgagggctagtgtttttatggtgtggttggggattcagcttgcgaagaacacaaacatatttaactatttaccactcttacaagtgacaattaaagatttgccactagaccccacatgtcatagacacatgagggcccacatgtcatacattgtgaatgacacatcttaaaagtggtaaatggttaaatgcacccctactcaacccctcaatcgacgtgttggctcagctagtcaatggggtcaaagatgccaggtcggatgaagctacctcccaacccacctgagaagttgatatgcattggtttttggagttggcgggttttacagttaagcgatgtgattcaaccagtagcataaattgagggatgcacaatagacttgttccttgtaactatatcaggtatggatagttagattttttttttaattttttgaacttttttagcttttaattttaaaactaaaccctttcaaaatttatttccaaaatctgaaccttttggccacgctagtccgcttggcgtgacaaagcaacaatggcacgccacctgcagcgggcgtgaaagttttgtcctgcgacgccagcgagagcggtgtggccaaataacgctgccacgtcagtgggagcggtgtgacagtattgttttgccacgctagtttggctggcgtggccgtgtggccaaaaggttcagatctttaatataaattttggatggatttatttttaaaattaaaaaaattaaaaaggttaaaaaataaaaaaaaatcagatagttatggatccggctccagccaaacccaacccaactcggcccggcccggcccggccgatctctttacctattactccgtacgcagcattctccctcgtgtcattttcgtccacgccgagacgagacgagacagtcgggcgacgggacagcagctgcagcctgcactgcagcacagccgtcagccgcctccccaacctcccgccgccgccgccgccgccgcatccgcatggagcccgacgccgcagcggccgcggccgccggcgagagggaggcggagatcgagaaggccttccgcgcccgcctccccgatttcaggaagcagccagagtgagcgcgtccgccctctctctccctttccctcttccaccccccctctctctcaggctgtggtcggctctcccgcgcgggatggtttggtctacgcgggcgcggcttctagggttcgttcctgtgtctttggctgcctgcctcgcgtcgcgcccgggaggttgttggcggtggccctagggtttttcggcggcggcagctggtgcacgcttgcggggggtttggtgtccgctttttgggtttcgaaccggggaggggtttatggcctggttggttgtttccaatcttcgattttagttcgggattcttctgctgctgcgggtggtcggcagggttgtgaaggagaagcaagggggagtgatgccgattcctagggtttagtgggggggagggaaaccaacaatttcgtattagcaggtgtgtgcaccaaatatttctgttctacctccaaattcgtcaggttctagctaggatttgacaaggtggtacttctgatttcagaaatgttgtgatttcagaaatgttgctgggcgacggttggttatttagttgcgcagggttctgaagaaccacgtgtagttgcagccttgtattcagcatttcagctatttaaggataataatggctgtgcatcagatttcttgtgtctctctaggtatttaaacctgtaaggaagaaatgaaaagggtttggcgatatgtgagtgataaatgtatatagctgctgcatataaagcatcctagggttgcattctccctaattttcacgcaggcaggagaggtcgatgctttcttctaattactagaaattcgaaccttttctgctctctagatctcttatattggtcaactatgaggaatgacaccacatatatttttctttcttttcagctccttaaccctcgaaggtgtaaggagagcactggagaaggacatgggcttggagaaacattcacttgacgcccataaaaagttcataaagcaatgtgtagacaaggtacgggtggacattaatgtatatggggtttggtgcagtgcaataattaggaaaagaagaacatttgtgcaactaatgtttttgctgtatgaacctgggagctgtacaattttggaatttcctagtgcaatagttaggaaaagaagaacacatttgtgcaactaatgttttctctctatgaaccagggagctgtataatttcctagtttaaactcttgactcttcacttccaacaaaaatagaaaccactgataatatcttgtgttcaaggccaatttttgacttttcaatcgtctgtggaaactaagtaaacataagtacataacatattttgtcaataatgcggaataaatgtttgctatttaaacacaccgctgcagaaacaattactcctgcttgagtgcattaatttgtgcaagtgattttgtgatgcactgtttcagttttcatatactccctccgtcccacaatatagctacctttaggttcaaattttgtcccaaatataactacctacaatatgtagaaagtaacttttaccacactacttcccatgctacccctagtaggccatatcatcccatcaaccctcgagatccacacccacccgtactattcttgattcccgtcacctcaccatctattaatgagggacttttagacctttcactccaatccagaattcctcaaaacactcctatgtagctatattttgggacggagggagtacattagcttggggagctaacatgtcagcatgcattacgattgggcgtttgagctgtgcgaaaagaatcagttgaacaatcataaacatgttattgcagaagcaaaaaaatgagtatgttaaccattggctctgagtatctgactagtaccggtttctgttgttacagcagtacataccaagacaagacagttggcattttaaagattatattgtaattaggatcctgcatgcaaatctcaaatttggtagtttatcatggttggttacgcatcttcaggattccttgtttagagatggacagatggcttcttagtggtcaactcaagccatcctccatctatataaggatgatatggtattatgatgtattttatgttggagcaatggagtaacaaaagaagataatccgaatatcagttttgttgtgttctcttctcttggcctgctattgtgtagatctagtccctcctaaccaagtcccgcattcacagagcagcattctacctcaaatcatcactgtccaatgtctctttaacgggtgttggctcatgttgtgaactagttcaacatcagttgccaattctgatacaataaaagaatgactagagtacaaaacaagtatttacctaaccagtatttctgaagatgaaatatattaagctcacatgtgttgatataatcttttcctttgaggaatatatattaaaatcaccattcacaagcaggagccacaaggatctctttggaacttagacactgtagagactagagagaataattgagtctgtccttatatttgttacaattgtgttatggaaaccaaatgtcttgatatttcaagtgtcaagctgtttttcttgaacctctcttcacccagtttatgcaaattggtaatgagatcctttaattcagatgaataattacctttatttaaacttctgaaggtcataaaacttgttcagttgtcatttatactttatattcccagttggaacctgttagcttgtatttgggaactttcaaactttattgaactctgatttcagtacagtaatactcattttttcctttttctttttggctaagcacatcaacaggttttttctggttctgatgatgacaatacgaataataatgcaccagagaaggatgaagctaaagatgaccgttcttctaaagaagaatcagaagatgcccaaccaacatctgactcgaacaaaatttcctccaatgctgatgagccggtggcaaaatccagtgagacagatagagatcaggagggagacaaagatcatagttctggcagtgacattagtgaagctacgataaaaaatgctattgtcaaaagggcctcatattttagagagaactcagagtatgtgtcctcaacttgccattcttaaattgtacttatcattgaaacttaatagttaacatgcactccaaattatcatgtgtcagattgatcagcgaatcattgtacttgacaacttgtagagttgtagtctcaaaagcctcttgctctggaatgtaatgaaaccttgtttttttaaaaagaaatatttaaccccactacatcacagagcagatatctgaaaagatactatcatgttattgtaattttttgacactagaaaacaaaactggaggttggggcagtaaaatgagtcaaccaaaatatagtcaaccttttgtgacctgattgagtaataatagagaaaccatttagttgttccacatcttgcggtgaaacatatgaataagggacgaaagtagagataattgctcccattgtgtgatgcaagcggtgagcagggagatttcgttgcgtgctagttcacttatacaattctgagtgacaaatttgtggggggccatgccgagggaggggggggggggatatgggtcttagctggtaaaagaaaaggccattgagtcattcttaatgtagaccgtctaaaaatgaacaggagcccagttgtgtgcactgatctgaatatacatttggaacataatgattgaaactgttgagttttacaaagaaaattgcctatatgttcttaaaacatatcattcttgttgttaagagtggtgtgcggccaatattatataggacatgatcatatgtgatgcagttctttagagttatgaaccaattggcgataaacggaaatataggaatttgcttatat

SEQ ID NO: 28978 - DNA, 1503 bp, Oryza sativa
agcaagcgtgaagcctgtttgataaaggagttggaggatatacttgaaaaagaaggattgtcaacaaacccctctgaaaaaggttcatttgttgttaaattgtttacaataacttgtgcgggaaaagttcatttgttgttaaattgtttacaataacttgtgcgggaaaacttgtgttgaattgttttctattttttctatacttctatgggtaggattaggatgtttggtatcacagtcatcattcaattttctcccaaactatgaacactacataaggtgtatgtgcccaataataagttattactgttaaatgcaatcttatgacctcacctatttctctcttttttttagttggttcatttatgagtggcatataaagctgcgtatatatggcgtaaagcatacctatataattacttgacacatgttatgctttctttgtacagaaattaaagcagtcaagaaaagaaaggaaagagcaaaggaactcgagggcatagatatgagcaacattatcacaagttctcgtcggagaagtacatcgaatttcatacccctgccaacgcctaaaatagtagctgatagtgatgaagatgacgaagaagacgcagaagatgacaatgatgaggaggtgaatgtggagggtggagatgaaggtgacaatgatgttggaaaagctggcgatggatctgctgatggtaagattcaataatacatggtatttcaatttcactgtcaccagctagtcatttataatctcattagttattgcatccaggggaatatccagtggcatttacagcatgttcagtgttatttcgcattccaagcgattccatatctctttttctcaataaaatccatatgcttctgcagatgctgagcacgacagtgattgattcttgcggtttctaaggtggaagcaggcaattctgaccatgcaagttcatctcatgttgatttggcctagacgcctagttggctgtccgtgcgtggatggaggcagttgttcagaagtttaacttatgagtttattctgttattcgaaacatattctttagctctagcgttggtgaaacattagcgcagatgattcttgtagctcccatctcattattatgtataatatatatcaggtttgttatctgaattttcgatcgtgtattcctgtagactctagtttgaaagcggcgtgacattcctgtatcggacagttattttattagttcatcacttatagtgttattttagaggaggaattcagcttttttttttactatttcaaaatctatttggtatttttttataattagcaaggttcacttaatattaactattcgctcctggtagcaaagtttcatattgtgatctgataggcttacttggaaaatcaaacaaagttctcaaaccgtttgatttaattaaatgtaggttataggatatcgaaatttaattacacagtgctacatcagtgtagtaagaatttgtaagaactgtgta

SEQ ID NO: 28979 - DNA, 995 bp, Oryza sativa
ttttgttttgttttgtttttgttttttttttccctcttgcctgtactgattactgaaattcagatttttcttgttagtgtttcttagcattaccttgtgtgactttttcatgatataggacgtactctttaggattaccttgtgttccctacatatcggtatatcaagtgtatgctggaggattatatatttcaaatataacccagttttgaacactgtgaaatcattttttctgttctttttgttgtgacaggcacggatcaaaaagatcatgcaggctgatgaggacgttggcaagattgcactagctgtacctgttttagtatgtaagttttgacaacagcctgtgctacttctttttgggtattgatgtagccatgtagtatgtaaacagttgtgttatcgctccattctctctaggggttggtacttacaaaaaaatgcaatcaagaaagcattctgccaaaagtttgtcttacattcagtaagctgaactagcgacaagtttgctctgccacatggagaagaacccaactcgcctttttatgccaagtcactggtcacatattttgacatcggttgttgcccattagaaaaataatcgttttgcatttcatttttgtttcactaactaattgatacacattttcttgtatgataatatatgtgttttggagtaccttttttggtttgttttgcataatgttacagttctagttattgccatgataaagcatacaacctgagtgcctgacattctgaatttgttctttacgtgcagcgagggcccttgaattgtttttgcaagatttaattgaccgaacttacgaaattacactgcaaagtggtgcaaagacattgaattccttccacctgtgagttctataccactgcacttttaaaattttactccgcattatgattttgtgcttttatggagtgatgtactgtttatcctttcatgtttttgtgacctatgaaaagcttgtgttgag

SEQ ID NO: 28980 - DNA, 579 bp, Oryza sativa
ggtgagtatcgactgagtatagggcgaattcgagctcggtaccctttcgaaccattcagttctgccggataatgaatcgcagccagtacatgtgcacctgccggtgccgcacggaaatgcaggtcccgcaacaccgccggaagaaaacgtttaacccgaccgtactgctcaaccatttcgtcatggaaattattgttctgtggacgagcaagttcattaaccttgcttacagattctgccagtctgtttttgggtacgcacttgaagataacctgcctgagatctgggacatctgtattatcatccagcaacaatgcacatgcccgcgccagtaacaatgcggcctgatcaagatctttcagtgtcctgagtctttttttttgcccggttttctttgcttcgcggataatgtccagaattagcatatcaagcacatcaacggcatcggctaatgccgttatttcctgtgctttaacgaatgcagtaagtacagcaagctttctctgctgtggcattcgagcgatatattttaccgacaccatgccagcataacgagccagattactcaaattgaatggc

SEQ ID NO: 28981 - DNA, 1190 bp, Oryza sativa
ccgaatgaggccacataaatatctatatgagtctttcaaaccccatttagttttaaaggggagattcatgagctagcaattatatatacatttctcaaaatcttacccctcaaaatttcacttgacatgctgatggctttgatcacatgcggacatgcccacatataacttaggtaatgaactcaaaatttgagacagaatacagatgaatgttttgtacatcgcacgggttgtgaaaagagggtgtagagagctataaaattcacctctgacctcttcgttcccagcttcccaaaaaaccagaagatgttggagtatgccacagctaaaccatgtgtttccaagagtatagcatagcaaactccaacttgaagaacggtcattggcctcgaggatactgacccactcaaatctgagcagctactagtctgcagagtgaccttgtcccttgcagccgctatgcaaaaggagaaacagactccaaaccaggtcttttgcataataggcaccaaacgacctcctaatcccgctaaaagataacggatggaatatgtggagatcaaacctttggtatcagcattgtgatatacccgtaacgccagacagaagctccacacggtctctctttagatcctcatgtgagcagtgagctctccgggatcattgacagctccaaaatcaacactattaatcgcggcagttccatccgcatgaggtagtttcatcaaacacgttatgaagggcagggcatgggggcattccgatggctttctgcaaagtccctgacaatacgcttaagggttcttccgcctttcccttgcatgtaagcatggttgtttctgacattatcaccagtcctactgtgaagatagtctgaggctgcatcatgaagtacgctgagccataaaggaactatcatctcagcttccccttgccttaggtactctgagggcatagatttcacctggacaagattggaaaaacgttagcccatgatggtgttgcaacacgtcaaagttaagcttcatgcagaaaatacattagtcggaaatacttttcaaatgaatataacacgtcaaaacaccagaaggtagctcaaaatgttcaggtgtcaacagtacttgttactagtccgacatgacaacaatgtctgcctacaatcctacatatatggattaatggctagtatg

SEQ ID NO: 28982 - DNA, 4055 bp, Oryza sativa
agtagagcataaagtacatttgacatgagaccttcaccgcagcgtgccaaaatttgagctagcaccacaccaggtgatccatcagaggggtgctctcgagattctagtgcagcagcgaggctaacatcaagaaaacctacatgtgtcatggcaaatgatcaaatgagcacaaaaatatactaggtgctacacgatgtttcaagtgcaatagcttgagctgaatgctgaagcatatgtcacagtaacagattaaggtatgtaaacggtatgaacagtgcagcaagtacaaatagatcttttaactccaaagggattataagtgtgatgaaaagaataacgctttctaccaccaactcacattacagtgatacactagttccaacagacataataatgtaacaaaccttatccagaaagtagctgaaaaggcatccatgactttgcaggggaaaaacactaacttgacatgattgcttaccagtagaccacaatccaagcattatttttctttgcatatactttatcttctcaggggaataaatttctttaaattaaaaaaccaacaggcccaataggacattatcctttttgctgaaatgaatgagcagtatgcattcattgtttcccctttatgcaactggctaatttactaacattccatgacaaaaaaacaaatgctctaagaaaaaaggtgttcaattgataaagaaaaaaatatatacataaaggtggatagatatcctcacatgacatatatgacatcgcagcaagtgctgctcctcggtgcattgctgtagagcatatagctgccttttgaaatgacaactcaagcagggagccagatgcgacaatagcttcctgatgatatatgcaatcaacacagataactactatcagactcactatccatatcatgcagcagcaatgaaccaaaacaccttaacatataagacacaataaattcacctttgggcagcagcgaataaatgtggatgtaaagtttgcataggcttcaacaagatcaggttcttgatcacatgtgtaagaagaattcaaagtagatattgaagctgcggagctaagtgcttcgaaagttctgacacataaagcaacatattcttccttgtgaccaaattcttcaataacactggcagctgaaaatgtcgttgatgtcaaggcagtgtggagtccacaaatatattgaataagatgctgcagtagtatcttagtgttttaagcctatcttgtgcattgttttgtaaatgtaaagctacaaaatacttcaaaaattatattctaagagcatgggatggtggctaaaaatatatcagaagtacatagcaaaggcaggtaaatagcagctattgatgtccccaaatgctttaattaaaggcaaacctatgtagatgggattaatctattcctgtgagtactagcatatgtattactgtgatgtaggtagtaaaccacaagtcaaatgtacatgtaaatcagcaactgctagcatgttggtaaaaatactagcaagttcattgtagagttgaataacagaaagcaaattacatatgcacacatgtaaaccctcttacctgttcttaagaagcagtcatgcctttgaaacagtaagaaatttgttgataagcattccagaactttaggtaacaaaatctggaagtgttgtcctgtaaaatgcaattgcttgatcagcacaacgatctaatgctattagtcttgaaattttgcattgcaggtatcatttaacttaccacaagaatgtatggctgaagaaagagaacgacatgcagctgcagataaactaacattctccatatgagatgatcgggaaagtctttcaagaagtggccagaatataccaagaagaaccaaaaccgtgtcatcatcaatcagactagatgtaattgatgtcgccaaatggccaaatagagcacccatcctgaaaaaggaaacttcattttcatttgcttacattgtagatcacagcatgtttctaattttcttccacggcatccaaaaatccctcccaaaatacaatatccttaaaaataggttcaaaatgactggttgttacttgtgttcttttatctgtcaaattctatgatccggtcaaagcatatcatattgttttttctatagcttgccataaatgatctaagtgggaggatgtaaaagtatccacctttccaagaaccaaataactcccaactaaatggtaaagccatctttttattaaagatcacatcaacatcaaccaacaggagatgcttctccacttgctttgctctccttttgttaatctagaacaaagtggtttcatgtttacagtcaatttttcttccgcgcagctgactctagatagcatttattcatctctattggctagaatgtagttggtgatactgcacagctttcactggatagttcaaaaagtaatatgattggatacttatacatcaattgaatatatttatgctggcatgttcttttgatgatcgccccaaaagcaaatactcgctttctgcacaactttgtacttcaagttgtagttattagttaagttatacttcaattaaatatcattcaacatgaggctttgcatagtttatgactttgaatagtctataatatgttgacacaacggaaaattgcaccaatattaatcaaatttatattatttacagtacaaaaaactatttttcttcaaactgctaactttagtaccatttcgttaacatgcttgattcttgaattagtcaagtgtagtagtatcattgaaaagtgtggaagatacaaaaatatatatattgctagaaaaaatggggccacaaaatgtaagaatgaaagaacttaaaggctaagcacctgtagagaccatggacagcaaggttcaatgcttctgtgtaagcagctggattttgacgcagagattgatctctgtctatgtcaatctgtaaaggacagcaaaaagacaacattaatagttttagatgatgtcatggtcaaattcatgaatgtgtccatgcagagttcatatgcaaccattaaaaataacttgagaatgtttcacatgaaacttcatggcatcatagtcctcgaaatcccatcaactaaataatgtttcgactaactaggaatgtccacagatagaagcaaaatataatcttacaagcatttaagtggacaataaagcatctcagaacacaaatgagaaaattatgaagtagagttcatgagcaaccattgtggactactggcttgtgtactggagtgcatatcaggaaaatgaatcctaaacaaattcattggtgtacatgttggatgttgaaagttgggacatgtgcacctgtaaatatatgcacaagaatatgatcgttatgtgcaataaaaaaaagttgcagtgcaatgggaacatgtagattgtcctactcatacagtgaatcatattttcacaaaaaaaaaacgtggcaggtgcacatgttcaaatatgctgtgcatctaggaatgtttggctaatttataaaagcgtacaaaccacaattgagattcacctgatatatgatgccattagtgtactactaaaatacaaacattcagatgcaaataaacactggcattgctgaaaagcaacagagatatggaagaaccattaagcttttgtcaacaaagttaaaggttcattcaaggacttatcatggacacagctaatacaaaggttcataatggttctctagatgatatcatggtgataaagataataaaatatcagcaaacattccgggctcctttaaaatgcaagaattttacaggaatttcacaggaattagttccacccatgaaattcctctgtttcaacgaaagcccaaggctgaactagggagagagtacatacaagcttctccactgctgtgtagctggaacaaagtaaccttgctagtgaacttttccttaactctttgtcaagaacagaacataaagcatgtgtaattgcagtaatgatctcttcctcatcctctattcgcagattccccgcatccatg

SEQ ID NO: 28983 - DNA, 4078 bp, Oryza sativa
tcacccattaagatttgctgtattctgccagtatttttttctcagcacttgcctagtttactcatagaacagcaatcataggaagcatattgagtgttttaccaaggataggcatccattaagttcgctgtgtgctctgctggacagaatgttcacaaaatgcattatgattgaaaaatcgaaggggcttccatcttgtaaaattgtgtcagcgacctgaaattcagtaacttgcaagtaaggcgtagatttaacatgctggttccttgcatgcttacgtgcaaccagacaaccacacaaagacaaacaagcacgcatattttcaatcaacaaagaaacagaacaagagaaaatttaacttgcaaagcaacaaggcaggagtctgaaacacaagcaaaataacaatttgctcaagatagagttgatagacagccatatgttattaccaagtttgtcaaaagctaactgtccaagatatttgcatagtaagataggcaattttctatgcatgtaattgttctgcccatacattgtctcaagtggcaaaagtttttgtggtcatagcctcataggcagtattgtgaactagggctttctgtggggctagtgtacaagcctaataaacccatcagtaagattattcttgccattatgcacattatactttcatatttatatagaattacagataagcgatcaacctatgggctgacaacttaagtgacaacctatgggcgatcaacctaagaatcatcaacaccttcaaacaggtggtaacattttgggcacctgggtgatattaagcgacacaaacttttcagatctcaaccttgataagtatcaacataatggtctaatggacataatgatgaaattgcatttccatcttatctagtagtaagcaactttactgaatgatcttaattatcaacaagtataccaaaagatatgaggcacttaccatgctaagtgcatacattcgaacttctacctctttccaaggaattgattggctagccaaaccccatccaccagaaaaaagctgcatacaaaaacatagttcaaagttaatcgccataatggtctcactaggggagtgtaataaaatcatctaaaataattgtcacaaaaggggctcaaaagtatcccacgtatcaagatattagaagcaatatgtagaagtttaataaatcgatttcaagaccagcacatagggcagtataaatattacagaaaccataagggtatttgtttgctgcagcaaataccaagaaggttcagattttcagaaccatatggtttatttctgtgttttctatttttagtacattcatatatatatgcaatagtatagttgtaaatagtgtttatttggaacaatggtgcataacatatctacatcatactattgcatatctagcttataaatacggttattggatgtctaaagataccaccacttctgcaaattacaatcttttctccccagacatggaatatgaggaatctttcagcaataaaccacataccttattaatatatgcaggagcacctagaagcaagcaaatatcaacaagaagctcctccaagttcattctgaactgtgctagtccatcaggtatgcataattccccatcagtgccatgttcatcagtgtcaatctatggtttatcagataaaacaaggcattaaaaagtggatggatttacaaatttgggtttaaatgaattggatataccgaaaagcaaaattggaatttctactttagtgtacagataaggaactgcaaccaatctgaattctgaagtataaaaattgtgaccacatgcacaattttgtaagatagtactttcagttgatcattagaaaataaataaatgaattcatgggaaaaggagaaaaaacctgagcacgaaaaagaagtgcatcaagcagtgaagaaaacacaggggaaaatatctcttgtgcagcattccttttttctgtttgtgcatcactatcaagtataaaatgtgctaaactgcacctgcaaagtttcaacgcacaagtataaatacttaattgactacagacatgaaagaaaagttagtagtacgattttagctctactctggaagtacagaatggaatattggaattcaaatctgcacacttgtattatctaatactccctctagtcattttttttaactggagggagtagttgccttatcattgatgcttatatgatccaaaaatatatgtaaaagcatgtgttttaactctcaatgagattgcaatgaggggaccatgacaagaaaaacaaagtcagacatagctagaaggaccataggcatatcaggttacagtgtttttattaaatccggtcctgaagtatggtaatcacaagtcctttgagaaagtttgtacgtagattccagtcgaacaccaaaaatcttgtgatactcctagaccttctaaaccccccacacgaccacaaggttacggaatatgctcatcagcaacccagccatcctaaatttccacatagacaagatgcaggaatacatcgcaacacaaacataaagaaaataatacgggaataatatgtttccgaaaaactaatacttgtaattaatcagaagaagagcttgtgattcatgaaaatgaaacaaagcaaagacatagacattattaccaaaattgcaaggttgaatctgcaatctcccaatcatcactagaaaaggctacacatctgtgttgaggataaaactcatcaggatcacaacaggtaataaagtgaactgaactatagaatagcatcatttgaaacattgaaacgtgcaacttaaaaactcaaagaaaagtaccacaaacaattcaatagattgacctcaaaagtgcatcggcaagagcaagtgcttgaacactcccttctgcaaccaaagcaggtgcctaagaaagttcaacggttatcagcttatattcaacagtctcacacttagaaaacaatgcaatgtgattatgcatataaggtgtgttctatttcacattggaatttctctcaggttcattctctgagccgttactaaaatgctgatttcaggaaatacatgacagttaattcagttatttcactaacttaactacagtagaggtctaatattcacttcaacttgatagtagaacaatgaatggaggaatattttgagtaacagaaatgcaacatagataggttgcaaatatgacactgcagtacaaccaccaggtgagacaacttactgcctgaccaacttcacacatcaaacaaacaagaccagcaatagtcttctcgcttctgttggcaagagctggcagaagaagagcttctctaatatatggcattttacttagaaatgcctgaggtagatcctacaaccaaaaagtggcacgcatcaagattagtggaactgtattgaattaatcaacaaattcaacaaggggaacagcagtcatgcttctagtcattgtctgagaaaataaatgaggagcaggacgggcattgcaactcttctagtcataatattcacatcatgtagatatctgaggcaaaatataactacattaactagcagcttaggttgaacattattaaaatgtaaactgaaatgaactctgatttagtttaatcaaattggtgtcttgacacaaacagaagagagcaaactcaatcgtgcaaactattccatggcaaacctcaaatgttacattttcatacaacagaaatgcatgacatcaaacagaagattagggccaaccgataagtgacaacttgggacaggctaagtgactaacaagtccaacagtccaactcaatcgaaaaagcatgcagccaccagatagaaataagttactgatcatcagttggctgcagcaatgaagtgaggcactatgcagcaatcagaacttacttggtgatgactgacaagctcggtcataacctctacggccacatcaaacgagaaggacaccttcattagtcagatgacaacaaagcaaaatgtgaggacgtgaatgcacaaacttgtccttcaaagtacacttttatgagcttataaag

SEQ ID NO: 28984 - DNA, 3067 bp, Oryza sativa
gggcgaattcgagctcggtacccttcttgattgcatttttttgtaagtaccaacccctagagagaatggagcgataacacaactgtttacatactacatggctacatcaatacccaaaaagaagtagcacaggctgttgtcaaaacttacatactaaaacaggtacagctagtgcaatcttgccaacgtcctcatcagcctgcatgatctttttgatccgtgcctgtcacaacaaaaagaacagaaaaaatgatttcacagtgttcaaaactgggttatatttgaaatatataatcctccagcatacacttgatataccgatatgtagggaacacaaggtaatcctaaagagtacgtcctatatcatgaaaaagtcacacaaggtaatgctaagaaacactaacaagaaaaatctgaatttcagtaatcagtacaggcaagagggaaaaaaaaaacaaaaacaaaacaaaacaaaacgttcagtaatcagaggtctcaaaaaacgcagttcacagtgccatgtcacatggaaaggtctcaaaatagtaatgaagacgggagtattcagctaaaattcataccagcactctcaaagaagatagttctgtgtaaatttgaaattctggctgatgcccatctcatgacaatttgagcagtataaaacgtagaacaggttcccagcagacaatacagctcacgatatatgccacacaagtagaactctactgcacaagaactccagaaactgcccgagcaggccataatccatttcatgcctccagaaacagtgcgatacaagctcgcgtgttgaggagatctcatgagaaacaaactacaagatgagaaatccagccctctttacacgcatcctggaagcagctgcaaccaattgcagcccatcctagctagctgcctgctcagctttgcacctaccagaactaattgctcattcatctcgccctcgaattcaagaatcttttccctccaccaaacccaaacccaaacccccagtagaaccacttgccccaccacctcgaaccaccttcatccaccaacgaaccgaaagaaaactcaacgagagtgagtaaaaataaaatttcagctaagctcactggcgaggcaacacagacaaagagccccccaccacaacctgctctcgattccgaatccccacaaccacccggcgacgaagcgcgaccgcacagagagaagcgcaagtaccccgccggtcaacggcgatatccgccgccgccgccgcgagatccgcgcgcgccgaccagatcggatcacgagccgccgccgccgcagcgcagatcgaggagaggaaagggaggggaggggaggggaggaggggctacgtaccgcggggaagcgggtgcccagcttcttcctcatcttcgtcttcctcctcgcgttcgcctccgcctccgctcctccacgctatcgcagtcgacctttttttctccttttctttttttttttggctcgatttttttttctttcttttgggacgcttcggtttcttcttttgtttttttcttcttgctgcgccaccacgagagtcgagaggagaggagaggagagcacgcgcgggcggcggcgacgtctcacgatccggatccgacccgacacgagaggcgttcgtgcgtgtcatgtgtgcggcgactgtgttcctttcgttcgtcagcacaaaaggcggggcccgggttggcgggatcgatccggcccgttaggcctggagaacaaggcgattccgtgtgctttggggcccaacttggcaatttaattctttttatgcaaggagaaataatccgtacatacgaaaatttgtcttacccagcttctcttttttaagaaccacgttacagtacacaggcactcataccctcataaacaccttctagagactaggccaatgtatcttgaagttgacaaaatcaccatgaatatctcactatcgatagttatgtcgcctatcactaaaagaataattatggtaaatacgaacactcacattgagtgtagaacttaaacccgaatagactgattccaccacaagtacccttagagcaggtacaagccaactataaacatatcgagaagataaaaaagtagagaagagcgacatgcaacatatttgtagccaactgcagcacagactccaaaacacaatgtgtgcatgacagatgggaccatgaattaatagtgtagtacatgtttataagtaactattatataaattagctattaaatttaatatagataatttggagctagtagctaagtatactattaaacttgcttttatagtcaagaaaccttagttgactatgctcactttttacacagttcttacaaattcttactacactgatgtagcactgtgtaattaaatttcgatatcctataacctacatttaattaaatcaaacggtttgagaactttgtttgattttccaagtaagcctatcagatcacaatatgaaactttgctaccaggagcgaatagttaatattaagtgaaccttgctaattataaaaaaataccaaatagattttgaaatagtaaaaaaaaaagctgaattcctcctctaaaataacactataagtgatgaactaataaaataactgtccgatacaggaatgtcacgccgctttcaaactagagtctacaggaatacacgatcgaaaattcagataacaaacctgatatatattatacataataatgagatgggagctacaagaatcatctgcgctaatgtttcaccaacgctagagctaaagaatatgtttcgaataaacagaataaactcataagttaaacttctgaacaactgcctccatccacgcacggacagccaactaggcgtctaggccaaatcaacatgagatgaacttgcatggtcagaattgcctgcttccaccttagaaaccgcaagaatcaatcactgtcgtgctcagcatctgcagaagcatatggattttattgagaaaaagagatatggaatcgcttggaatgcgaaataacactgaacatgctgtaaatgccactggatattcccct

SEQ ID NO: 28985 - DNA, 1199 bp, Oryza sativa
ctataggcgaattcgagctcggtaccctttaacaacaaatgaacttttcccgcacaagttattgtaaacaatttaacaacaaatgaacctttttcagaggggtttgttgacaatccttctttttcaagtatatcctccaactcctttatcaaacaggcttcacgcttgctctcaggagccatctttgccttccgatacacagtaggtgcgatactagttaaaaataaacataagtcggtaaatttatcattccgaaaatccataaaactgcattcaagcatgcagaagtacctcattccacaagatttgattattgacttcagccgttccacccgtttcccgtaagctggagctacttgtcgttttttctgcatattgagatataaacaagttagccaaaattatatttacactaatcatgcagtcaagaactcacacaaaataccttattatcttcttcagctgatgaatttgaattatcttcttctgatccactccgctctttacttttatctaaatcttttttggcaacctttttagcctttgaatttgacagttgtttctccactgtagtttttttctgcctttttacagctttgcccttttcagcctttttcttttttggccttgcatcctcatcactgtctcccctctcacaatggctatcatttatttcagaagtatcagagtcttgacgagctctcttagagtttttgcttgtcttctggccagaatccttatgagattcagttttactagttttctttgtcccatttgcaggttcttgaagaatctgtcacacagaaaattaatgaaacacaatgagttcgacttcttagtccaatcatcaacatgcatctgaactaatacatgtgtgcaccgctgcaccctcaatccaaactttaaacttacattgtctaattccgtcgaaataaaagacttgtaagcatccaaagctttcttctgaagcttgagatcttcttctaaagtccggcgaactccttgtaaagtaatagttctgcattgctttcatattgtgaatacatgctgaagctgactagccaaatgcaatatgagcaggtaaagtggacatcgaacatgcttttggtggcagcaagcatccgtatggcgcagaatccaaaatttaaaccagaataaagtaaaatgctgaagtaacatgattggacatacttaggaag

SEQ ID NO: 28986 - DNA, 658 bp, Oryza sativa
ctgcatgcatatcgaagttgattatatcatgattaaatccataattaaatattaaggtactgaaaaccccattccaggtttccccgacggctcaaaggagaaaatgccgtcaggaaaatgattagttaccttgaaatggacaattacatggccaatctggagaccgattaagcatgtcacaatcgccatcaacgagctgcacattttgtatgtgtccatttatatataaacaggccagcatacaacatttaggatgcatttatgctgtactttttatgatttaaaattcaattagagaactatataaaaaaaatctgttttgttcacctaagaagcccttcaggatcaaatggagcttcacaccatgatggggcattaggtggaagagggccgttgcgtggagaggccatgctgcattgctgcaattgtcaaaaaaaaagaaagagaactcgaaattactcccaatatcttagagggattggaatcttctcacataaagacgtgatcgctgatatgtaggccccaccacccttaaacccacatgtcagggatcacgtactcacattaggtgggaagttatgtgagatgaaccctctccatcttagagacacaaaaaaaagaggaagggaggtgcctttgcgttcataaaaatttatgg

SEQ ID NO: 28987 - DNA, 2976 bp, Oryza sativa
  unsure (1)..(2976): unsure at all n locations
taataatcaacgatcagattattatattagtactccctcagtactagtaaataaagtcgttttgtacagcgacacggtctccaaaacacaactttaacttgttgtttctataaaaatatttattgagcatattttttaagcataatttttacattttcaaactcaacatctagatagttatttatgacttatattcctaagatttaacttaaacattgtcttaaacgactttctttacaagtacggaggaagtatgtgcgagtcctatagtgatgttttttttcttccctttcgaaatacggtataaacgaaggtactcacaacactgtgtgttcgctcactcctatgaacacacatgctcattctatctttacgagcacatcttaaaaactaaaccgcgatatatcttaagattgactaagtcaccacgtacgcctcgctgttgacgggtacgccatctatcactaaaagaatagtgagctgtgaatgatgttcttttctataataaagataagccagcacacataaactaccgtataattaattaagttttaattactataaatttattaaatatttaaaaataatttctatacagaaagttttcgcacgaaacgaaaagtttaataatttgaaatacatgcaactaaaatcgatgcaaaatctatatcttggtttcaaaaaaaaaacaccatctacgtatgaaagagaatcatcaaattagtcttctagtacattgttacttaatcaaggaaaaaaaaacaaaaacaaaaggtgagagagaaaaaaaaaatcatgtgcatatgtgctcgcttttcaggtccggatccagcaatgtcgccaccaaatcctgcccccggctcggctgcctcagatgccgctgcaccaccgcatataataataacaaaaaaaaaaaccatatcccgatttcatcgatccatccatccaaactggggccaaatggccaatactctaatcacaaaattaacaatcctaattgctccaaggtacgtagtacaacagtacaggacgcaaagcgatgatataacgcccgccaggtcatcctcgcacccttcttcacttatcacccccagatcacaccaaagattggaccggatttgtttagtttaggtttcgattagcttaacgatactgttccattaaacaaaccaatcaaccaattaattaattaaacatagatcagcagcagcagcattagcggtggcggaatctgggcccccgactggtttgactgaccgctctgttcccgtctccggtgggcccgggcccaccgtgctctcctccttgccggccggcccacgcacgcatctgccactaaaacaaaagagaaaaaaaaatatagaccagagtatataaaataaaaaagaaaaaggagaggtgtcacagcaaagcgaacacatgaaaaagcaggcaaaggatttttctactccttttccctccaaataaaaaaagtcaagtcatgcgtgtggggccacacggcgatcgacccctcacgtgggccccacctccgtggttgcctcctcgttcgccaacctcccttgaacgcagcagcatcaacaaaaaaccaagaaagtgacacttttaatatctttacagatttttctttttaatatcctttggatttctaaactccaaaaaaatatcattattattattattaaaaaaaaggtgaggttagcagcggtggtgggatgactgatgatgaggagtgatgagcagtggagaaaaggcaagcaagcaaaggtggacaaaaagaaaaggaaaggacgaaaccacctcacctcatctcatggcgtttttgttatctgctccacctcctccaccacccccatctgctttgattccatcaacgccacgatacaataattactccgtattactctctctccctgcttaatgccgcactaacccttttttttctaatctggaccggcaagctagcctgtgtggtgtgatcagcgcctcggaaagcgacgctcgcagagatccccggatcggattagccagctctccctttttttttctctatcaaatccagagagacacacacgaaaaaaatatacaaattcaacagtttttaaacatgtgcacatgcactgtgctgccacgacggaggtggggcccacatgggcttttcgggtgtgtcttggtcgtagggacatgcgaggattagatggatggatggatggagtggtggttgtcattattgcgggggttacttaattaattaatttggtcaagcggtcaatcacctggtttagcgctaacccttttgtttatccattatattatttaatattttaatattntgtctcgtgtgcgagtgatcgatgcttcccaccaccatccatccatgtgtcacccctcctccgcttgctttatatagcccacgcgcctccctttcctttgccttcgtcttcgtcttcctccagccacgccattctgtcgcctcctccacttcttctccttcgccatggctgtgcaggcgcagtatgggggtgggatggcggcggggatgtgcttgccagaccatgaggtggaggcgcagatgcgggagctcggcgcgatgttctcggcggcaggtggtggttgctacaacggcggcggtggcggcggagggtatgactgcgccgccgtggtgagcggcgcggcgcagagcgagctgacgtgcaacaacggtggtgtttgtggtggtgcggtggggatgggggtgggggcggggaggaagcgggagagggaggtggtggagcagtatgcggcggtggcgtcgtccgcggcgctgctgccgatccccgggatgatgaaggtggcggcgccggtgagccggttggtggagtcggggatgacgtcgacgagtgggaggtcagcggcggcggtgggggatgcgctggtgtcggagctgtgcgcgcagagcgcggagatcgacgcggtggtgcggatggagtgcgagcggat

SEQ ID NO: 28988 - DNA, 1160 bp, Oryza sativa
atctcgctaactccagatgagtaatttagctagacatagattaggtagggggattagctgaattgatccagttcgttttgttcttttagtattagggtaaaaaaaatgatgacatggttaaattcaattggcgttttgtgttcatcccctctctgtaaaattaccgctcagtggaaaatttcaccgtgtcctcttttggccttccgggtcaagaaaagcttacaagttgtaaaaaaaaaagtcaggcatctgattgtaaaaattgaatgcatggccctttttttaccattttatttattactgtcaactacttatcccattttccatgggaaaccaaactgttcgagatcaaatttcccatgaaaaacggaaaaaaagatttaaaagaaggggggttaattaaattgtgccgttacgtccggaaaaggtgggattctttcggtgggtgaggcggcagttttttttgcatccgggcattaatcaccgcaggattaattgtactactgtacccaaatcggcacggtttccgaggcggattaatgagatgcaggataaagatatccacatgaatgcacccagttcagtgtcagggggtggggtgggttggatacttggattggatgactggtgatgtgaaaagatacccccagccacgggccactgcactactgcactgcacagctttgctgtagctggtggtactggagttgggagtagtagtagacagcgagattggcaatggcaggaggcatatgcatttgccttttttttttcttttgggttttacagtacacacctgacatctccttgtgcttcaccacactgcctttgctcagctttcctttccctttttttttttgtgagtaggagtgctagccggatcggattgcttcatctctttgaaaataagtacagtactgaagtattactactccggacaaatagtacattttagaaatacacgcagcagaaatgcggagctgggagcatgttgctacttctatattttagaacgggtggttatttattaagttcacttttcaaaatgtttgattcattttcataattaagcagataaaataatctgtctctctctctctctctcgtttggttgttccgactagtagtaataataataataattctacagtaggagtaaa

SEQ ID NO: 28989 - DNA, 2060 bp, Oryza sativa
gtggtggtgggatgagagtcagagcggatttttgtccctccactagtttggctagtcttcccacaaggagtgcggtgttgggtaatcgtaggatcagagttcatcaaggtaaactcctgtatattacaagtttttagtcaacctcgcggaagataaaagcatgctttttagaaaggctgagatattaaatacataccggtggaggggggttgaaagcattgtatggtacaactggcagcagatgtgaatagctgacaacgatagcatttgagaagatcttgtacattctttccttcatgaccttaaagtcaagagagtctggatcttcacgatttggatcatgtttgccatcaaattcaaaagccgtgcgggatctctctttgattggagctagccgacttttgatgaagtgccgagtgatctgctttccctgcaaaccttgttccttcagttttagcatgcgctccatcagttccactggctgagcagcttcatctcccataggcaatgaattccatgtgtcctggcagaccggagggagacaggagtactcggggagtgctggttcaggattctgaacgtaaaaccagtttgcgtgccagcctttgtttgaggtcttgaagggcatggagaaatacttttggcttagtgttcctctgagttggaaaccagcgcccccaacaacgcatggtttgctcttgttcggctggggcttgaggaagaagatgcggcggaacaaagcaaaatgaggtctaatgcccagaaaagcttcgcaggcatgaataaaattggcgatatgcactatggagtttggattcagatgatgcaggctaattccatagaagttcagagttcctcggaaaaatcctgaagttggaagagaaaacccgccataaaagaagtgagaaaataccacgacttcgtgtgtatagggggtcgggaacgcctcgctgaacgctggtcaccacccgatgatctccttcactggaagaacgccgtgtgctaccatttctttcagattctcctccgtcacatcggagggcgcccactgactctcaaaactttctctctcttccgccatggatgcgtgtggaatggtttgatttggtccaagatatagctggaggggaatgaggaatcggagcggaggacgcgcggagaagtttcgtgggatttttgagaatggattggggcggattgatgaaccctagcttcgtcggtgcggtttttaactgtagcaaggagtggggaaatggcgagagtctcggcggggaagacgaagcgtcgcttggacttcggtgttttgttagggtatcgggagtactaatgggcctgggcctgtacagtacttcagcccaatattattatcagcgtggcccgttgtgatccttagggacttaggcgctttttgctttggcaatttgtgctcataatgatgtgactcgatgctgctaaaatcctttttgatgcagttagataattctttggaattactacgatgcaaataaaaaggtgcccaacagaaaagtgttatactaattttgtaggccttttaggctgcaaatgctgttcgggttttcttgagatgattggttttaatgcagtcatccattcggcatgttatatgcttattttgattatggcatgagtcatagcctaggctatttaaactcatcttttatcaaattttatgccacgtttgataggtcttttgagagtttttactcggccttttatcatctatgttgatttataaacctttagagtgcttctcgctcgggtttttctttatgtttctttggcgcattaaaagcagtcggcaggaggttttatcagatgctgcacatgcttagccttagaccgtttggtttaaaaccactcggatggatgtcttgatgcactctgactatatgtttagttttatttaactaaccacatagtcgggggctacacctaattaggtgcatctagtcgatgcacctgattttttctattcttcagcccttcacagtctttgattttattactcgggagaccaaaacagaggaagttaaagcact

SEQ ID NO: 28990 - DNA, 2092 bp, Oryza sativa
  unsure (1)..(2092): unsure at all n locations
ttcaagtttgaacctttgactaacttctcaaaggctttgtgctatacccgcattctagggaggagctgcggaagtggtttctctccatggagactacgctttttcgctatcgctttcggctcgagagtcctgaatcacaggtgactttctgtccttttcttgcatacaaggaaagctatcatgctttaaccgttccttgccacactgtatttttcagaggatgcttatgagtgagtttcaacttccatacaaagcattgccacactcggaatttgaggtatgtgttatggtcactctgttgacttggaccttgatgatttcagtaatatttacagtagtgagatgttcttgttttcacgtttttaggctgtcaaagacaagttgagccaagttgcacgcaccattggtcaatctgcagctggtatggaacatcttactatgtgatacctgttctttatgttgtttcagcacaatggtgcttcgctgcttgcaggtgtgatctttcacttgctaagtttgttctatgttttcgttttgcagttgaatctgtgttcttcaaggtatttgcatcagtttattttacctcttcaattccatatccagtagaaaaaaattgttcgtgtgattacccagtctaaataaaccttgttcgttccatgtaaggtgccttttgaagaagttccagatcttgttgccagccgccgagtatttctttcaaaaggatatgcttatgttgcgatgagtcaggtttgctgcgaaaacgagactggaaacttctatgtactttttggatgttgtttcctgcccattctaaacatacttgtataatttaataggttgattcgcttgtggttacccaattccgctgcaatatctcgaaagcacttgttttaacaaataggtacatggtacaaatgttctactttactctgcctagctacatatcatgtncgggagtgtgctttcttagttctttgctggaaaattgttgcactcttaggtgatataattaggaacattaacagcattgtctactatttgccaataatttacatagaacaaaagccccttgacagttggatttatttctcaacttagaacactctttagtacaggctgtactaagctataatataaataattcgatgtacagaaaatggacggccaccattaaggaacaagaaaaggataggttgactcctgtgagtatcaattaaccacttcccgtattcctccagacaatcttttcataacttttataatccacactttttatcttaacagattgtcgaagcattgagtaatgcatattttggacctgattactctcaggtatgttgctttatctataggtgtttttccagatattgttaatgggattttcttcaatgctaatgtttactatatttgttattaattgtctggcttatcaaatatccaatattctatacagccaaaggatgctgttgagatttctctgaaggatattgaccaactggctaaaacttctttccctctttgtatgcgccacatgctagagaaggcaaggcaccttaaaagttcacatactttgcttaccttatgatcaggttatttagtgattgcttttatttttcagttgagagaaaaccatcatctgaagcatgggggcagaatgcagtttggtcttttccttaaggtaataacttaatgaattatcttaatactggttctgttatcagtgaacacttattttatttatgtcacattaacttgcttcttaaaactatggtttaaggagctggactaaagttggaagatgctctagcattttggagggcagagttttctcagaaggtgcctaattttctttcagaatgtaaacagcaactatgttttggaaatagcacatgcaaaccttttctgtttctttacaatacaagtaagccgtgtcaagaaaattttctataggatcgtgtactgcattcttatctatagtgttgaacattgagttaaccagtaagaagccccaaactaaacaagtaataccccgtgttgcattgtgcaagccatcacaaattatattgcttcactgatgttgggttttctttgg

SEQ ID NO: 28991 - DNA, 2065 bp, Oryza sativa
ctatagggcgaattcgagctcggtacccgttctgttatcagtgaacacttattttatttatgtcacattaacttgcttcttaaaactatggtttagggagctggactaaagttggaagatgctctagcattttggagggcagagttttctcagaaggtgcctaattttctttcagaatgtaaacagcaactatgttttggaaatagcacatgcaaaccttttctgtttctttacaatacaagtaagccgtgtcaagaaaattttctataggatcgtgtactgcattcttatctatagtgttgaacattgagttaaccagtaagaagccccaaactaaacaagtaataccccgtgttgcattgtgcaagccatcacaaattatattgcttcactgatgttgggttttctttggataaggttggctctgagcgatttgacaaggaatatgcctacagtatcaggcataattatggaaaggaaggaaaacgaacagtaagccccttgttctatttttggtgcttgattggataatcaacttattcatctctcagacaaatggctcctccaggattacactccgtattcatgtcaaaagattatctctgcaacacctggtgttggtgatcaccatggttgcccttatcgacattttgggtataatctcattctaccatgccattaacagagtagttaagcatttatttgttttatggttaactttctgttatcagtagactatttatcgaatatgtcaatgggacatgggatttcatatcctaaaactctctgttagcagtagactatttatcgaatatgtaaaagaacctacagctatcactgtctttgtgagttacatgtgtccttttcttgtgtgatatttctagtgaagacaacttgagagcagctctcaataaaatgggaatcagtggtcatccattagaagagataatggataaagtgaagaacaggcactaccaggtactgcacctcacagttctacctttaataagcaatcttctaaacttcgtctgcttgaaccatctgagttatgaaatacacagctagcttgcacgatgacttttgaggcagaacatggtgtctcatgtgatactggaatcaatcatcctaatcagtatttcagtgaaagccagaaagtcttgaaagcaaaggtgagtcaccatagttgatttgcattcatttgtgcattttgtcagcatatgagatgttcaaattgacagtaatttcgttttattccacagaatcaagcagtgcagagccaaggaacaacctaaactgtaatgctgctggcaaaagtcagtccatccaaatgcggaatttcaggtttcgacactactagtctgtcagctgttgcgatgcattgttttctaatatctactggttattggcaacaaatttctaatgttcaattgtgcgaacataaacatcattctcaccctttgcttttttatagctatttttcagtattcagcaatcaaatccatgatatgtgtacaattggcagcaattctaagttatttttcttttaatttctgtttttagttttgatgaaataattttgctgtttttccatatgagatgtttttactcctagatttaaccatgaattaaagttttactcatggtcacattggacgattttcaaatgcccattttttgattcaacggtagtttctaggtttgcactacaaattttcccatttatctttggcttctaaattgcccatgaagttgtggctttgcattctgttcaagtgtgcctcgtcgtttggcctgtctattgttattggaaaggggatataactctatgctaagttctgatctagattttaagagagtatttttctgagttggtttctatgaacttcctgcaaaattcttactctaaacagggttcaaatatcagaacctgctattcctaaactaaggatcattgctgtaatttatacacaacactagcaagactctttgaaacttgtagaataataataataccgattcatttgctaatactactgggatgtctgtaaataagatttgcgttaat

SEQ ID NO: 28992 - DNA, 2074 bp, Oryza sativa
caaaatctaaactttattaagcatgaaacaaaacaaactttggcaaacattggggttaacaccattgtgccacattattcatagcaagtgcttacatgattggaaaaataaaaccaagcacctactactattttattcatgggaaaggaaacatctaattagcataatatatatttttcttccccatatctatgaatgcacgcttgattttagcgcacaaaccatgactaagggtatcgaaattattcctaatttcagcaagctctacccctagctccgcgttgcgatccctaagctctatgttctccttgcggagtttcttcacttgcgcagcgagcttatggatcgagggctccggtgatttcacctcattttcttggaattggccgggagccctcacaattggagggggcgtcaagtgacgcttcaccttcataggtggatggctacgggattccgctgccccctccttctctgatgccatcaaaggcgggagtaaacccttaccatacctaccgttgggagttcgcactccctgaatgcggaatcgctcctccttcggagtggatggagtagcggtgggtgtggtgtacttgtgagcacctcatccactgccttggtgaacagggtgcccacataacactcggtgggaggcggcgcggccttcccgtcatcttgaaaaaggcgacatgcctttaagagaccgagctctcccatcgtcagccgttgagcagccgaatccccccgaatttttgtccttgtgacatggcgaggggagagggatcgcgctgccgaacagggggccgaacggggccgagaagggtttggccgaaaccctggtttggtcgaaccagggagctcgtcgacgggctccagattttcaggggagcccggcactgctgcgaggggctgcacccacagtgcattcaccccttccactgtgtaattttccaccgggatgagttgattcgccggtgttggctctccggtgaggttgtccggttacggttcgttgcggaattagttcattttgagcatttgcaacgaccgtcatttctcctttttcggcacaacctggactgggctaacccactcactgtatggtacgggataaataatcccggcatgcaggagtttcaagacctctttctttacaacctctcgcattgcattattgagccatcgttgaggttccctggagggagtactctcggggtcaataggaatacgatgggtgcaaagcgcgggattaatccccctaaggtcctgaagcgagtagccaagaacagaacgatgcttttctaacacggtgagaagacgttgagtctcgtcttcagagagcttgtcactgattatgagacaggggcctgtcacgcccagaaattcccgaatagaatttcaagcagaatgtgcattaaattccccgtccaggaccggccggggtacacaaacgacaatgttgacattcagatccacgtcttacaaacatcataaaagtcttacaaaaaatgcagcggaaagaaagaaagacaacaggagctaagccttgacttgaactgcagcgggaacaccactccacaggcatcctcgacggcacggacaaagcctactcctcggagaaaccttcatctgacccgaactcgaactctggggttgggaaaagtagagcaagactgagtactacccactgtactcagcaagtcataccggaataggggtatgatgcagggaatcatcaaaggagagctgaagtggttcatttgcataaagcgagcatttataagcagaaattgaaagatttaaacggttgtaataattaattaatattaatcatccgctgtccaacgctaacccacgttgcgacaggcccaaccatccacctaaactatccaaattcaaaagattacactagggtgagactaatcacggtgaatctggttgaccgcccataaccgcgggcacggctattcgaatagttttactctgatcagaggtgtacaactgtacccacaagacacagccccacgacacgtttccgtgcgccgacatgccaccacgacataccggaaagagg

SEQ ID NO: 28993 - DNA, 606 bp, Oryza sativa
caaatggacgatataagggatcaaaagagggggaattaccatgagacaagataattcaccctcgagagagggaatgtgtgaatctatttcaagttgtgctaggaccaaaattcattgaaaaatgagatccccgtacacatagattcaaaatctccacaaaaaaaatgactagtgtccatccatgaattgaatgaccattttgtcacaaagtggtatgcaaacctattctaccaagcaaacatgcatgcaatagatcaagccacattccgagaatccaaaatatttagttcactcctcaactcacaaaacctagctttatctagaggcttggtaaatatatccgccaattgtttgtcggttctcacatgttggatgtctatgtcgcctcttgtggaatgatctctcaagaaatggtggcgaatatcgatatgtttggttcgggagtgttgaatggggttgttggctatcttaatggcgctctcattgtcacataggagtgggattttggatacattgaggccatagtctctcaaggtatgcttcatccaaagaagttgagcacaacaactccccaccgaaacatatcccgcttcggcggtggatagg

SEQ ID NO: 28994 - DNA, 1831 bp, Oryza sativa
  unsure (1)..(1831): unsure at all n locations
aaaggnaagagatacccttagtggaagnaggagtgcttagtgcaacctcttgaggaaagggttagccaagacccggctctttagtgagctcctcaacgtagagtagaatcccctcaaggattcgaacttcgggaacaacctcgtgagcttcatctttggtgacttaacttcctccctctcctctagctttgcttgtttgagccgctataggtctagttgctgtttgtgctagcatattcttgttgtaggcaactagatctaggatttactttcctgtttgtgctaactccgaaaattttcggatatatccgaaaatttcggaaatatccgaaaattactgcttccgcttttagttgatttttgaattagcctattcacccccctctaggcctaattgacactttcaattggtatcagagcctaatctcctaattaggcttaaccgcttggagagatcatgtcgggccaaacgggggaaggaaaacatggtgataagggagctacgtttccttatgactatccacctacatctacatcttatgtgagtacctatagcggcaaagctccgtacttcaatggtacggactatgccgcttggaagcataatatgaagatgcatttaaagtctattaacccatctatttggagaatagtcgaaaaaggctatgttttgcagaatcccgaaaatcccaccaaggaggacgacgagaacgagcacaagaacgctcaagccgctaatgcaatacttagcgccttgagtggaagtgagttcaaccgtgtggatggcattgagagtgccaaagtgatttgggacacgcttcggaacttgcatgaaggcacggatagtgttcgtgagtccaaggtggagatcctcaaggggcaatttgagagatttgtgatgttggatggtgagagcccaagtgacatgtatgaccggttgagcaagatcgtcaatgagatcaagggacttggctccaagggcatgaccgatgaggttgtggtcaagaagatggttcgagcaatcactccaaggaactctaccttggtgactatcattcgtgagcgtccggacttcaagactctcacacctcatatttgctcggacgtattcttgcccatgacatgctcgtgcaagagtccaaggatgtcatccaatacatcaatcaaagttcaaccacaaacatcaagaaagaagacttggcgttgaaggcgaaggaagaagaagaagagaatcgcaagagcaagagcaaggcggagatcgatgatgaagagatggctctcttcgtcaagaagttcggcaagttcatgaggcgaagcggcttcttcaagggaggttcttccaagcactactccaacaagtcaagtggaagacactccgcaagagtgtgctacgtgtgcaaagagcccgggcacttcattgcggattgccctcacctcaaggatggttcccacatcaaggaagataagaagaagggtgagaagaaggatgagaagaaggagaagcacaagcatagcaagcgggaacattatggccaagctcaccttgggatgatcttcggctccgactccgagtcaagctcaagtgatgaagaaggagtcgccacatttgccgtcaagccttcatcaccaccgagactcttcgactactcaagtgatgaggatgctcccatttgcctcatggcaaaggagcctaaggaatatgtctccggtggaagaagttgggtgattgatagtggatgcaccaatcacatgaccggagaagaatcaatgttttcatctcttgatccaaatggctcttcacaagataacatagacttcgaggacgatggaa

SEQ ID NO: 28995 - DNA, 757 bp, Oryza sativa
cggttgcagtgatcaccctcctcgacaccctcctcaaggaagatgcactcaatcaggccgatcatgtcgtcaacatcttgaatcagacgaagaccatgatcgccgcctcgatcccagctaactccgtaagcacccgcacgccgactggcagccgagtcctccctctccgatctcaagactatcaccaaccaagcctcagcgtcgttggcgccggatccaatcgcaggagcaggggtcacgacgagcgatctgtccattcacctcccgaacgacacagggagcgccgagttgaacgacctcgcaggcaccccatcgatcttcacgataccatcaaccagcgccgcgcggcaagaggctacgctccccaccgttcaccagactgctacgatgacgacgtggatggtgtagctaccttcacggccgacctgcgtcgagtggattggccagccggcttcaaaccgactggaatcgagaagtaggacggcaccactaacccggagtcctggctcaccgtctacggtctcgcgatccgcgctgcaggaggagatagcaaagccatggcgaattatctgcctgtggccctagcggattctgcccggtcctagcttcacgggttaccccgtggcacaattggatcttgggtggaacttcgcgaacacttcatcgccaatttccagggcaccttcgaacgccctggcactcagtttgatctttccaacgttgtccagaagtccagagaatccctgcgagattatat

SEQ ID NO: 28996 - DNA, 1288 bp, Oryza sativa
ggacttcaaaactctcacacctcatatttgctcggacgtattctggcccatgacatgctcgtgcaagagtccaaggatgtcatccaatacatcaatcaaagttcaaccccaaacatcaagaaagaagacttggcgttgaaggcgaaggaagaagaagaagagaatcgcaagagcaagagcaaggcggagatcgatgatgaagagatggctctcttcgtcaagaagttcggcaagttcatgaggcgaagcggcttcttcaagggaggttcttccaagcactactccaacaagtcaagtggaagacactccgcaagagtgtgctacgtgtgcaaagagcccgggcacttcattgcggattgccctcacctcaaggatggttcccacatcaaggaagataagaagaagggtgagaagaaggatgagaagaaggagaagcacaagcatagcaagcgggaacattatggccaagctcaccttgggatgatcttcggctccgactccgagtcaagctcaagtgatgaagaaggagtcgccacatttgccgtcaagccttcatcaccaccgagactcttcgactactcaagtgatgaggatgctcccatttgcctcatggcaaaggagcctaaggaatatgtctccggtggaagaagttgggtgattgatagtggatgcaccaatcacatgaccggagaagaatcaatgttttcatctcttgatccaaatggctcttcacaagataacatagacttcgaggacgatggaaagggaaaggttataggattgggtaagattgcaatctctaatgatctttccattgccaacgttctcttggtaaaatctctaaactacaatcttttgtctgtttctcaattatgttctatgggttacaattgtctttttaccgatgttgatgtgaccgtctatagaaggaatgattcctcgatagtctttaagggtgttctcaagggaaagctttaccttgtggatttttcctcaagtaaagccaaacatgagacatgcttagtggctaagtccaacacggggtggctttggcatcggaggctagcccatgttggtatgaggaatcttcccaagcttctaaagcacgatcacatccttggtctaacaaatgttcaatttgagaaagatagggtgtgtagcgcgtatcaagccggcaaacaaattggagcacatcaccccgtcaagaatgtgatgaccactacaagaccattggagcttctccatatagacctcttgggtaccgagctgaattcgccctatagtagtc

SEQ ID NO: 28997 - DNA, 1769 bp, Oryza sativa
tctcatttgtttccaggatacggattggtttctcaacataagtcaaatcctcttggacttctatcttctcaatattagcttcttcggtaggtacccttaaacattttttcaattgtgacacatggaacacattatggactcctgccaaagattgaggtaattctaactgataagcaacctctcctcttctactgacaatcttataaggtcccacaaaacgcggtgccaattttcctttggtgtgaaaacgatgaactcctcgaagaggcgtgacacgaagatacacatagtctccttcttcaaaactcaaatctctacggcgattgtcggcataactcttatgtcgagactgagccactcgcaatctttcttgaatgacctttaccttttcttctgctttccttaggatatccgtcccgaaaacctgacgttctcccgtttgatcccacaaaagcggagtgcggcacttccgaccatacagtgcttcgtaaggagccatctgtaaactagcttgataactgttgttgtatgaaaattctgcataaggtagattcttatcccaacttccaccgaaatctaaagcacaagctctcaacatgtcttccaaaatctgattcaccctttcggtttgtccgtctgtctgtggatgataagcagtactaaagttcagcttagaacccatctcttcctgaagtttcttccaaaaatttgaagtaaactgactgcctcgatcagacactatcttcttagggacgccatgcaaacacacaatccttgccatatacaattccgccaagcgacttccggaataggttgtctttaccggaataaaatgagccactttggtaagtctgtcgactatcacccaaatagagtcatggcctgatgacgttctgggtaaaccagtaataaaatccatacatatttcttcccatttccattcaggaatcttcaaaggctgcaacaaaccggcgggtttctgatgttctgccttgactcgctgacaaacatcacatactgctacatattccgcgatttcacgcttcatacttgcccaccaaaatctttccttgagatcctggtacatcttagtactaccagggtgaatggagtataaagtatcatgagcttctttcataactgcatcttttagatctttgttgtcggggacacagattctctcacccaaccatacagttcttgctcatcctccaagaaaccaatagcttttcctcttctcatattcttcttgatctcttgaatatcaggatcattaatttgggcttctctaacttgatcaattagagtgggcttcgcttctaaggctgcaacgaaacctctaccgacaattcccaaatttaatctttcaaattccttgcataattccaatggcaactgtcgtccttctgtagcattgcaatagccttttctgctaagagcgtctgctacaacattagcctttcccggatgataatgaattcccatgtcataatccttaattaattccaaccatctccgttgtctcatgttcagatccggctgagtaaagatatactttaaactcttgtgatcggtgtacacttttgtacgagtaccgaaaagataatgacgccaaatcttcaatgcatgaacgactgcagctaactcaatatcatgagtagggtagttcttttcatgcggacgtaactgtcgagaggcataggcaaccaccttcccatcttgcatcagaacacaacctaacccaagtttggatgcatcgcaatacactt

SEQ ID NO: 28998 - DNA, 1600 bp, Oryza sativa
cgaagatgttcctcatgctcttctttggttcgaaggtagataagaatatcatcaataaagaccaccacgaacttgtctaggtattccataaacaccttattcatcaagttcatgaagaaagcaggggcattggtaagtccaaaagacataacagtacattcgaacaacccatacctagtggtaaaagctgtcttaggtatatcttcctctttgattctcaactgatgataccctgatcgaagatctatcttggagaaaacagtggcacctttaagctgatcaaacaaatcatcaatcctgggtagtggatacttattcttgatagtcacatcgtttagtgcacgatagtccacacacattctctgagtatggtctttcttttccacaaaaataaccggagctccccatggtgatgaactcggtctgatgtatcctttctgtagcaaatcatctacttgcctcttaacttctgccaactcattggctgccattcgataaggtctcttatggatcggagttgttccaggtaccaaatctattctgaactctatatcccttttaggcggcataccaggtaaatcatctgggaacacatcaggatactcccggactataggaatctcttccaaagttatctggttcagtcttgaccttaaagactcagatgacaatgcatgaacagttacaactcgaccatcatagctggtgagagttacttttttgttggcacagtctatcacacctttatatctggctaaccagtccatccctaggatgacatcaaggtctttggattctaataagataagattggccagaaatggtactccttgaatttctattctgacagaggggctacgttgcaaagagagtgcttgattacttggggtactaaccatcataggacgtctaagatcttctacttccatcccatgatttcccgcaaaactcatagataagaatgaatgtgtagcaccagaatcgaaaagcactgttgcaggaactaagttaacaagaaacatacccataatcacatctggagcatcttgagcttctgcagcagcaacatgattgacacgggcctttgatgctggtgcggtagagttgctctgggtagggacaaccttcacacgtcggggcttcggacacttgtcagcgtaatgtcctgggtctccacagttgaaacacaccacgggcttgctgccttgctccctcttggcaggttgttgctatgtcgaggctgcaacagggcgtggagcttgattacgaatgttgttgccggcattgttgttgaagaactgacgctgcggacgaacaacagacgaagaacctccctgtggcatggactggggtcttaaagtaagacgcggcttttgattatttccctgttgtgtcttgaattgagcaatccggcgtttcttttgctccatgcggttgtacttgtcctcctgacgaatagccttatccactaatttctggaaatcaggataatctccagtcataagtgggtaagaaagctcatcattaagtccttctcctggcgctcttcatcagtgcgtacctcttccggagcataacggggtaccgagctgaattcgcc

SEQ ID NO: 28999 - DNA, 2101 bp, Oryza sativa
tcccccattgctgcgagtgttcaccatctggcatggacagggcacaagaagagaaaccggggaaactacttaggacagagaattactttaacttttattgatcttaactgagtttcattattacaaactaaagattctcacaccactaaactcaccaacttcctaacactcaaaagcaaacaaacgcatgcacttacatcccaccactgatgtaaatcacatgcgagccacacacaagcaaactttaagcaagcaaactaacacaacgatctaagacaacgacttaacaagtcactctagttcttccaagcatcggaggtcgattgaaggctcgtctttatcatcttgagttgctacccactcaatcttggaattgttgcgcttggattcttcttctccatcactacttatgatgatgaccggaggatccgcttgagctggggcaacttctttctccaccacacgaacctttggcgccagttgatagcgagggacaaatagagctctcttccttgcggtaagacgaatcctggccttctgcggcggtgcttctcccttcaatgcggctaattccttctccaaacgatccaccttgtcttctaacttgcaaatcttaccacgattccggtcttcacgatcttgagcggctaacacagtctccgcacgactttcatccatagcccacaacatctcaaccaaatgcttcgtggtagcatcattctcaattccttcagtctcaaggtaactgccacggtcacttccctggggttggcgaggatggtagcgatactcagtgtcggccaattgatcactgtagcgatcacggagctctcctatggcgatccttgccacttcctgacatgcatggatgtagtttcttcctccagcttcaaacatcactgaggggatatcttcactattactgttcaaggtgactttgactcggcacttctcttcatgacgatcatgaggaatctgggcataaaaaggggcagtcccaaatccaatgacaaaggacatcgtacgcaactcctggacaaaaccctcaacaccaaacaggtactcaggcttgtaacgcggcatctaaagacaagtgaaaggagggagttaagacctttatccaattaatagcacaagtttttggattaatttgaataaagttagaaaatcagagtaaaaaggtaagtaaataaagtaaaccaagctttgcgagataagttaaaacagttggaaacgaggtcacaaattttgtaattttgaataactggtttcaaaagaaatgaaagaaaattataaaatcaacatgctaaatttattttattgcagcaagattaaataaaacagtattgtaaaacttttgctggtaaatgagccattagtacagtaatagatgtacagtactaataacactggaataaatttttaatgagaaccattaaaagagattatgaagtgcatgtgccattagtttggtttaattaaaagagaaagggaggagaacagttctacttttccaatatttttagagggcttctatggataaccatttggcataacctagggtcaaagaggctctgataccaacttgtcacgcccggaatttctatccaaaattccaaacgcttacatgtgtgtgaaccctcgtccaggaatcagccgaggcacacaataacaaattgataatagagtacaaatattactctaattaataagcgaataaaatgtcattacagaggtagatagttcctctcaatcaataaagatctaagcagcggaaaataaataaacggcgcagacggctccactccacaggcagcttgaccaaggctacacctaatcctccacaccatcagcctcattgtagaactcttcctctgatgaatgattgcaaggtgagtatatgacatactcagcaagccacgcagcaaatatgcaagtgcacaggataacaaaggatggcatagtagggttgcatttgcaaaagcagcatttagcaaacatctgagaatttgataaaacagttaagtcattaaacaatattaatccaacgctatacaacataccctgttgtataggccccaccattcttgacaaccacccc

SEQ ID NO: 29000 - DNA, 914 bp, Oryza sativa
atcgaacggtccacgaccggctcacggcgggacgaccccgatgacgtcagcggtgacgtcaccgacagcggcggcggctcggcggaacggacggctcgggcggcgcacgcttgccggcgaacggcggcaccaggacgcaaacggagggcaccagcacgtagaggacgacgcggcgaacacaccggtgaccaaaacggcggcggaagaacaacggacgacgacgacgacgaggaggaaacggcggaaaccttcgggttgtcgacggcgacgaagctccggcgatctccggcaacggcgaaggggcggacgagaacggcgacgcgacggtgaccacgacgacggtcttcccgagcgacggtgacggctgaagcgacggcggcgcacggctggagcggcggcggcgacggcaaagctagggcacacggcgctagagctctttcggcgacgagaggcgaaggcgagggtggcggcgggtagaggagacaccgagggtccttttaaaggggctcggaggcggcggcaaaggcccacgacggcggcaacggcgaaggaaactcgcggcttgaaggaaagaggtcgatccgaatcgaactcgattccacgaacttccaaaccgatttagccgaagattccaaaggagaaaaaggtagaggagatcccggagattgtttcccctcttttgattcgaccagagaaggaaaggaacggccggatttggaaggaaacggcggcggcgcgaaactagggtttcggcggcggcggccgaaggaggacgaaggtcctgacaggcgggaccctcctgtcagcgacagcgagagggcgcgcgcgcggcggactgggccgaactgggccgaggagagagagaggggttttgggccgactttcggcccaaagccaaaagagactttttaaaa

SEQ ID NO: 29001 - DNA, 629 bp, Oryza sativa
aggtgtgaataaaatacccagctccaaaacagagatatggcggactaactagcttcattccatattacatcatggcactgggagatacattccaaaaggggagaatgggactgccaactacaacgcaacgcccaacaaggactcacatacttagccttacacagggagacaatggaggcgagagtggatcgatcgatagtggaggcttcctacgagttcttccgacttgttggcctaggtcaggttgacagtcgcgcgtgcctgtgcgagcagagcagaggtgttcttgtgggagagctgctggaaacgggcttctaggtctgtgtaaaatttgcttacaacaacagttaccatgctagcattcgaatggcaccctatgaggcactttatggaagaaagtgttgatccccattatgttgtgattccataggggagagagctgttttaggacccgattgggttcaacagaccacagaacggatagcagaaatacgacaacacatgcttgcagctcaaagtaggcagaagagctacgccgatgtcagaagacgggaattggagtttaaagtgggtgatcaagtacttctaaaggtatctcctaccaaaggtgttgtgagatttggaatgaa

SEQ ID NO: 29002 - DNA, 774 bp, Oryza sativa
  unsure (1)..(774): unsure at all n locations
aatttaaaatttataaattgttgtttaaatggaatttttagaaataattttaaaagtcttgaagagaagatctagttttaattaataaattccaatataaaatgggcccagataaaatttcattaaatactttgcttaattctataattcctagatttttctgggatttatttgagctaaggaagtatttttaataaatggaattgcatttaagaaataatttaaattgaaaaaggttttaaaaagtctcttttggctttgggccgaaagtcggcccaaaacccctctctctctcctcggcccagttcggcccagtccgccgcgcgcgcgccctctcgctgtcgctgacaggagggtcccgcctgtcaggaccttcgtcctccttcggccgccgccgccgaaaccctagtttcgcgccgccgccgtttccttccaaatccggccgttcctttccttctctggtcgaatcaaaagaggggaaacaatctccgggatctcctctacctttttctcctttggaatcttcggctaaatcggtttggaagttcgtggaatcgagttcgattcggatcgacctcttttcttcaagccgcgagttttcttcgccgttgccgccgtcgtgggcctttgccgccgcctccgagcccctttaaaaggaccctcggtgtctcctttacccgncgncacccttcgctttgccttttgtcgacgaaagagctctagcgccgtgtgccctagctttgccgtcgccgtcgncgattcagncgtgcgccg

SEQ ID NO: 29003 - DNA, 986 bp, Oryza sativa
tcccgttgtcttggccgtttgcggtttgggggcttgacatggtcggcccgttcaaaaaggcagtcggcggttatactcaccactttgtggctgttgacaaattttccaagtggatcgaagctaaaccggtcattacaattacgacagacaaggctagagatttcttcatcaacattgtacaccggttcagggtacccaatcggatcatcactgataacggcacccaattcacaggcggagtattcaaagatttttgcgaggacttcggcatcaaaatttgttatgcctctgtagcgcaccccatgagcaatggacaggttgaacgtgccaatggcatggtacttcaaggaataaaagcgcgagttttcgaccgattgtgtccttatgccggcaagtgggtagaacagctgccatctgtactttggtccctacgcaccactcgtagtcgagctaccggctagtcgccttttttcctagtttatggagcggaagcaatgttgccgagtgaggtggaatttgaatctctacgatttcgcaacttcagcgaggagcgctatggagaagaccgagttgatgatatcaaccgactggaagaagcccgcgaagcagccttaattcaatcggctcggtacttgcaagggttgcgtcgttatcacaatcgcaatgttcgctcacgagcttttttagtcggcgacctggttctgagaaaaattcaaactacacgggatcggcacaaattatctcccttgtgggaaggaccgttagttatatctgaagtcactcggccaggttcttatcgactcaaacgtgaggacagtactcatatcgacaactcttggaatattgaacatcttcgtcgtttttatgcttaggcattacttttgtattttcctctttgacttctaacatcaagcctttccttgagttatcagttgggggctactataataataacggagtgtgatttttatcaattcaatttgctt

SEQ ID NO: 29004 - DNA, 3281 bp, Oryza sativa
atccggttgtcaacctccacatgtttatcaaccgatcgcatgtataaaaggatataaataaatgatgagtattaatcaacaccacaagtgtcatatacttaaatatatgctcaaatgtaaatatcttaattaaataaaagtgaataacttggatcgattacatgcataactaaagtataggatttgctacccctaaatgtatgcatacaaaatgtttgttgtgtgaagtaagaatatgcataaaagaatgaaacattaggagcttatcctatacaagaatagaaggcatttatcaaatataggcattaaaataaaaacataccttcatcatctccatgttctgaatgtaaatagactaaataagatatggctcaaacaaaatattagtctcacatgcttatgtaatcacataaaaatattatatatgaatatattaatatgtgcacggagagaaagagtgtcatatatagcttgatctccatgcatttcatccttgttatttaggtacaccatcaatgaacgtttctctctcatattccattttcatatccatatgagactagtagacaaagaaatatttataacaatgttagtctcatgtaattggatttgtcatttatcaccaaaaccaaattaaatggatttgtcatttatcaccaaaaccaaattaatggcactcgaactttcaatttacaagtagattttcttgactcgaaactagccgagccgtctaatgtagtagcgagttgaatatacttttctcctctcttttttttttaagtgaaagcggcaaagcattatcgaatatattagaaggccagaaataaagtttttacaatagggtgattacatatagcatttgtgagcatctaggagatgaattaacatattaagaaactataattgaggcgtttggaaggcgaagtcacactcatgcagatcttccgggactggacgtgccgttctctgtgtgttcggttcctccccttggaaaattttcatgtttctctgaagccaaacgtgctaccacatccttattagggttccaattttactcatggctttccaacctgctcctcgttgaagctatgcttgtcatccattcaataatactagagcctggggcgcgccgttggcgcgccgcctgtacacaacgaaattgaaacaacacgtgataagcagggaacaaataggaaaaggaacagggaaaaggagagaaagcagggagttatagataaacaaactgcagcactaattacatatatgtatttcgatacataggagtctttaataataaacatatatagatggtagtatgtaagatatgtaaggcagctcagtacttctgataagaagtgaagacgcagagctaattagcatagtaatagtggtagggttggtgagtggttcatcttcatagcgatgaatgtgcttactgctagcaaaaggatgatcctaatatagttatgatcgttcagatgctgttcacagaacatcgatagttacttcaatgtgagttgccttgtagaagtggaagatgcatactaatccagcatatatgtgattgtgccttgcaaacttcatccaccctttcttcaagttgcagcgaccatcagatgaaacgtggaggatcacgttggttgaaatacactgataggtcacggcaattgagaacaacagctcccaaattcagcaccatttcgatcaacatctgagtagatcctccacagcttccactattccagtagcctggcagcatgtaaacaaaattttcaatgataattagtttctcactccaaacaaaaacgtacaggaggcgcgcaataattagtttctcatgatcgctaaaaactttaatcaaagaatgaaggaggagatgcgggcagcggcggcggcgagggcaagagagggagaatgaccatatcaacacgcacctgaaaagacttgagaagaatacaattggtcgtccataccatcaggaagattcacagcttgaatcgttctccgatttcttgaataagtcatcacttttcttgagaattccttaactaatgaattatctgaaaacgtcaagggaatctctcagcaattggatccctcacataaaacagtcgaataggcatcctttcaggatcatcagttggagtttcttcaggtatatcatggtacagatgtttgagaatgaagagagcagtatcatgatctcgccaataattgctacaagaataaacctgcaggccagttaaatggtgaaatagacatgataaaacaattagcaaacaacaggattggttatggaacctacatatgagatccaagggcagataagtataggtgttgaaatgttttctcctgaaatcagatgattcagactgtaagctacaacatatttgtactgacaaataatatacaagccagaaaataaaggggtcaagggaattggtgatgctgacaaaagggttcgcagtcctgacacaggaaccactaaaccagcagagactggggaaccagccaattaagcttgccagtggttatatgatttccactgtcagttccttcaaggcacagtagttggttaagataggttagctaaagggttactgaacatattaggcatattttaaatcatgttctcactcatttggtatataagtgcatttaacagtatttaacctcttggatttatgtgctcttttatgagccaaaatttaaccaactttagagtttatgggtttaactctcttgtgaagattaaccctgaagctaatttagggtgttaaactaatcacttatattggttagggtgatttaagctctcaccattcatgtcaaaagcaatgtacagtacttttcatatccacagcagaccacacaatttcaatgcttacacatacaccagcagagagtgaaattgaacttgctttaataggaaaagtctgataacctgaagtacatggtcaatccgaccatctggtgaacctgtcagcctttccatcatcatgtaaccatatgacttctctttctcattattgctgtcaacatcctctgaacaaccaaaaaacgtaatcagaacattgctttttgtgacttgcaatgcgtagaagacagaaaaaaaatctactatatgcataccggctgtgtcatttctgctcagtgatagcaaagcaactactgctttaacctaaacacaaaagggagattaaaggtcccaactcattaagaaagagctacgtgaacagctatgtttctagatcattcacaggtaacaaagcatttatgta

SEQ ID NO: 29005 - DNA, 1354 bp, Oryza sativa
gactactatagggcgaattcagctcggtacccctagatagataattacttatatgtatgcggtcctctagacaatacatttcatcatgaaaagaaggtgtagtcaaattcgaacaaatatatactcgatgaacattatattctcctttactatcataattgccaataatatgaaaaatcacatcagaagggcatggcaattccaatctagcaaatagtttcttctctaaacagttgagtggacaaagatcatcaaattgaatataaccccaagtatttaaagaagatagcaatttaagctcttcattctcgctagcaatgtgaataacatgtttaaactcaacacatagtggttctactatagaattaacatgttcattcactagttgtggcatggatataagtgaagcatcgcacaactcttttttatcactaaaaacatcaagcaaattgttttgtgacaaaggtatttcaacaattgtttccactatgggttgctctaacgtagcataagtagtggacatagttggcacaacataaatatgcataccttgaatagctatagcaccattatcattaccttctttctcatcttcctcttcgtctttcttctcttcctcattaccttggttgttctcagatgcatgcaaaatattagtatccaaagcaataggcacaacaatacgttcattttgtaataattcaggaggcccgaatccgaatccaaaacgtgtagaactttatctctgatcttctatggaccaaaagtgacgtgatgagatggaagtggacttggagaaggtcttgatatggtccccaatcaacttctttgattatccatgaattcgttacgctcagtctcctttcctttgcccaagcaagtacctctgcaaaacaaaaacacaggaaactcatagtgtagcaacgtttgtgttggcaactttttttgacaagttgacaagcacgatcgcaacacctaaacgccttgcggtgatatggagtcgccaaccacctcgatctagccaaagggccaaatcaagatgggttttgtagaaaaacaactaaaccggctaccggctagaggataactacccgtctcgtgggcaaaacggaaggttttcaggacaaacctacaaagaggtgtcgcactctcgcagcgacggcagacggtttacggcgcaaaccgacaaagatggactaaaactggggtaaaatagaaaacatagtaaaagaacgattcaagtagattgtattctggggttttacaatgaaccggccttgtcccttaaataggggttggtcttgccctatacaggcccttctccacgtccaactcgggatagaaactaaagaaa

SEQ ID NO: 29006 - DNA, 1712 bp, Oryza sativa
aagtaatccagtgcatctagcatgaaccaatgcccttttgataacgaagaataaatctgaccaatgaaatccaaagccctacctcggtacggtcatggttccatatgcgcctactaaacatttccaatccgttgacgagcttcacttcctctgtagcacttgaaataatcatcaattactttcggccaatagaattccactcttataagcaaccaatgcatcttatgggccgattaatgaattccacaaatcccttcatgcacatctcccctagcaactttagattaatcattgtctaaacacatcaatagcattccatctatatttcagcgatataatatttgaacgcttgccgccgaatcttccggtcaaccccaagactaggatctttcaaatattctattcaaagggattctccaatctatttctgacttatgggcacaaatgtccgaattcacaattaatccggtctttaaatcaattgtaacgtgccccccagctctctacccgggatcggtcagaccggacacacaatgccggtcagacctccctgtctatccggtcggaccggccatgcagagccggtcagaccgccggtcatcaccggtcagaccggccatgcaatgctggtcagaccgcccctggtccgtgatttggccaatttcatccaaagacttaaaaatcaagcaccgacttttctagtaaaaaatactcctttcttcatattataactagatgcttggtgtatcaaactattggaccaaaatccatcctctctagacatatgaaaaaattataacatccaactaacatgtctagatgaatactaattcaaatggcttttgaaacaataatcatcatggcatcaaaacacttagccaattgaagtatgatcaataatgaatcaccaaagtcatatgtgtcacatgcatagattccaataaactacaaatgtaagtaatcggcttgagtatgtatgtaaaatattaacaatgccaatgttcctaaatacaataactctaggacaaatcatcacattgaccattgacactagccgaattactaataagcaaaactttcatggtgcaataaatatgaaatctatatattatatggtgatccataaaaacacatatgatttggctctaaataaatatcaaagactcatgagccaaatcatactttaaacaaattatatgccaacctaccaattccactacctagaactggcatttgcaacatgtatgtataatatcaatttgataaacaaaaacacacatgtgctagatagcaagcaatgttctaacatggcataggcatataatataacgttgaacacaataaaccaataaacccataccttgccttagcatccaacaaacggcggctcaaagatatgatgttgtatccatcgccgttcatcttctcttggttccctcataagcataataatgtcttgccccccaagcaaaatcagctttctagattgtgcgatttcgaaggcaagacggataccgcactaacacccatagcatcatgtgaaggagacttatctctaatgaccgatgattcttctctcatcaaattggatttacctctactatgggaaatcaccggtctcttaacttttacctctttggatctaaacacttgcctaggtgtcgttcgaggctctaaattataacatgttttgttctccacatcttcggcct

SEQ ID NO: 29007 - DNA, 738 bp, Oryza sativa
tgtgtctcactcttgtcatgcaaaaagaatacccacgtgaagcgtgaaaagtcatcaacaataacaagaccatatttgttacctccaatgcttagataagcaattggcccgaagaggtctatatggagaagctccaatggtcttgtagtggtcatcacattcttgacggggtgatgtgctccaatttgtttgccggcttgatacgcgctacacaccctatctttctcaaattgaacatttgttagaccaaggatgtgatcgtgctttagaagcttgtgaagattcctcataccaacatgggctagcctccgatgccaaagccaccccgtgttggacttagccactaagcatgtctcatgtttggctttacttgaggaaaaatccacaaggtaaagctttcccttgagaacacccttaaagactatcgaggaatcattccttctatagacggtcacatcaacatcggtaaaaagacaattgtaacccatagaacataattgagaaacagacaaaagattgtagtttagagattttaccaagagaacgttggcaatggaaagatcattagagattgcaatcttacccaatcctataacctttccctttccatcgtcctcgaagtctatgttatcttgtgaagagccatttggatcaagagatgaaaacattgattcttctccggtcatgtgattggtgcatccactatcaatgggtaccgaggtgaattcgccctatagt

SEQ ID NO: 29008 - DNA, 2039 bp, Oryza sativa
atgtggtacacgcgttcccgtgtgtcctgtgagctttggttcgtcggagtggccggggacttcatcgaacagctgagggctcccaccggcggcagggaagacggcggcatttcgggcggatggaggcagtctttgatgggcgaagtgagggtggtgaaggaggagagtggtgaatcttgtgggcaaggtcttgggcgctttggctgggtttacgacataagttggatggggatgtcacgagctcgtattcacgttcacggcctcactgcacagcgccctgtcctggcgacatccagcagaacggatgggacaacacggatgggggagtcttcaaggctcgaatggctgccactctgccagaggtggagtaaaggagaaggatttggtcggggcgtggaggatttggccgggacggcgaggtgacgaggtcgacacggctcagccatacccgcgctggggcgcgtccatgtggcgcgggaggttgggtcggcggacaaggggttgtacagcgtggcttgggtgcagggtttagtcgagaatgaggggtggagccaggtctgggacgaattgaagactggggcgctcgttgtcttcttcggaagacatagcacgccacgtgttcgacggattgcccaagagggcagagtgtggagaagaggaagggaatgggttgggcgtctcctggggctttactatggatgacaagtggggtcagtgcttccagggcccacgaacagaggaagggtgagtagataggccagtaaacacaagatttagtcaaattccaggatttttccctctccctctctttgaaaatcgatttgaccaagatacctaagggtagacattatggttgatttttgtggaggtaggctgtggtgcataggttccatttttcaagatgccactccaaatttcgaagtggattgctcccagaaatcaaataaaagggctcttgctgaaggtttgttgaatttttagaggggataaactgactgaataaattctggaaaatttatattacttcatgataaataaactagtatcttaataaattatataatgtatatgtttctgttcaatttgtttactatcctagggatgtatcggcttagccgatgatgattttgaattaatttaaatttgatgggtttgtttgggctatcaatctaactgagagctatctatgatgcttagtatttatgttgagtttactggaatttttagacacatagattagtcaggatgatttcataattggttgtaaggcatatgagtgcaattatggatgcatataaaatccaaaaacaagccaaaataaacatgcaacacacagggggcacactctattccttagcagtcagcacaagagattacacctcgaaatgcttggacttcgcggtactaagatctaggcaggctatgctagctcgcgcttaattagttcgctcaattcgccttaacacgtggcctatgcttcaacatactcgccttttatgcttgcgcatggcttgctcttcagcttatatggttcaaaaatttgcaagccatttgataggatttatttactgtacccaggttcaatagcttaaattttatttgtcgtcccatatttcttgtgtgtgtaggatttgattagtcacgccaactctttaggttttgttgataatatttaaaagtgtcatggcattctctctagattaaacactccttatatttgaccttaattatcattcagacatttagtaaaaaaaacattttctagtgtcttttattctcaagcatgtgtgctcgaatgctctattgtctttatgtggccgtgtctaatttattacttccccacatcttgattttattttctttgccaaaaatgcacagggaggaacaactccataagtttttatttttaatgatttcagaataactgattttcatatttttatttcttggtatgtcacatgtactacccttgactagactcatagattttaatactgcatagtgtagagatgagagacatgagaaccttgcctaatgag

SEQ ID NO: 29009 - DNA, 3452 bp, Oryza sativa
ctatagggcgaatcgagctcggtaccctatgtattaatcaaataaaggtgcatatgttctacattagatttacttgttatatatttgaacaaacgttgctacacaataagtttcgtgtgtttttgtttgcaaaggtacttacttgggcgaaagaaaagagaccgagcgtaaggaatgcatggatgaaagaagacgatgagggatgttaggtcctgatcttccgataggtattgataaacagtcaatttgggcggagtcgcgacacaactcgatccggcttctgaatgaatacactactgagccccgcaatcgcagcaccacgtctcctctggttatcaaccgtgccgaaatccggttgacctcgccgagagggctaatccctgcatgcgaatcgaagaacacaagcaagaacaagatagattgcaaccaaattgcatatgaatgattaagcactcgaatttggggtttcacaaaccaatctagcggcaaaacagttcttgatagaataatctaagcaaaacccaactctaaatgatgacggctactgaattaatatgattagggacgtcctagggttgtcctaaggcgcacacccccttggcctaagcccacgacataattacaaggcccaaaactcaaatcagattcggactggatgagatacgtggtttgttttgcagtttcccggcagctcggtaggaattttgacgtgggaccaaaaccatctgaaagtagactccataagctttccaacaagtactcatgggccgtgaaattccttctagatcagcggctaggttcatttgaagttgatgctgtcaggcggcccgaatccgaatccaaaacgtgtaaaactttatctcttgttttctatgaaccaaaagtgacgtggtgagataaaagaagacttggacaaggtcttggattggtccccaatcaacttcttcaatcatccatgcattccttacgctcggtctcttttctttcacccaagcaagtacctctgcaaacaaaaacacacgaaactcattgtgcagcaacgtttgttcaactatataacaagtaaatctaatgtagaacatatgcacctttattttattaatacataaggtactcatggttatatctgagcaagttatgtcctcatcaggtttggcgtgaacgctccagatcattccctaatggcggttacggggcatttcggacatttccctttcgccaaccgtcatatctacccctatataaagacatcagtccctcacttcacacacacacttccaagcttgagctgaattataagaggctctattgtactatattgtatactagaataggaagagagtagagtaggagttggaagaattccggagttgtcgctaatcttctcctatttcttttattctgtttattactctgaattcaatataatattcttcttgagtaatttagatttatcttgtgagaattatctcttggttagttcctaaatagcatataggattattgttcactataattaactaaaatatagtgattgctttgatgagttataaacactaaagtagatattaattgcttagacgtggtgtttaggtaattgttatccagtaattgctgcgtatcccacagtacgtttgaggtgggtgtagaggtggtgacagccctcgagatcacttaagtcctccctgttcgagtacgtagtagagcgacatctggaaacagtgggttgccagtgcctgaagtattgcgttggaattgaagttaagctttccctagacactgtttctcactagtgaatcctctctatcctggcctatcctttgcttggtgtccttggatgaaccagaggaagatctgaccacacacgttcccttggattcgatacccttggaatactccgtaggggaagtgctacatcggtatatccgtgcgcttgcggattttatttgtgaccgtattaaataccaacaagcatttctggcgccgttgccggggaacggttgctgatcattttcgaacccagttcatcctttatcctttttcattttttattctaccttcacccctgctatcctagagaagtattcctgtcaaactcttctcgaccttggagcaacctctttttgagctatctgctcctcggggcgaattctacgagccacctccttcatcggagcccatttatacaactggctatgaaattcgtcccgaactaattagtatggttagggaaaatcctttttctggctttgatctagaaaatccctaccatcatctgcgagactttgaacaagtctgctcgtgccttaagattcgtggcatgagacaagaaactgtgcggtggaaattgttctcgttctctcttcaagagagagcaaagcaatggtatacctctaccgttggatgtgtaaacggtagctaggaaaagctgcaagacagattctgtcttgccttcttcccagttacttgtatcactgcccttcgagtagaaattctcagttttaagcagatcgaaaatgaatcaatcggtgcagcttggtccagattcactaatttagtgcagtccggaccaaccctgtccttacccgagtatgtgcttctccaacatttccatacgggtttggataaggagtctgcattctatctggacataactgctggaggatcattcatgcacaaaacgccgtcagaaggaaaaacgattttggatcgcattctagaaaatacttccttcatgatgcagtccaatgaaccccagctggaggcatccgtgtccaagatagaggaacttctaacaatcgagccacttgctgaaccatccacttctgctagctcgattgatgagaaggttcctgtgtagccgtccgtcgggaatgaagaaattcagactccggattgtaccgtaattatgttcagggacagttttgacgaagactacggcaataccctgaactattttagcaagaggaaaccacccgttcctttgtcacctcccgatcctatggaactcgggttcctgtgagaaactgtccgagttgacatccataatgagcaatgaatggctaagggaggtagagctttcatccgaagtaattcagataaatacggctccccgaatcattccatgccatctagaagggaacgatgtcggtattctctacagtccatctgtgggggccaacctcgtctctgagtcttttgcactcgcttatttaagcgataaggcagtgtccccgacaaacaaattcttcaagcatccgaacggaaatatcatcgaagggtttgggattgtgcaagatgtgcctgtctgctttgaagacatggaggcgatcttggatttccacgtctttgaaattcaagatttcgacattctaatcgggcttcccattgagcaacttcttattaacacaccccgattaggtagcctcaaaataacactgggagagaatgaa

SEQ ID NO: 29010 - DNA, 633 bp, Oryza sativa
ttgatatgtatgcatagcttctttggatcctatttcactattatcccgcaagacattgtcattatcttttccaacatccacatgaccgatttgtgattcgatcttaggtgacaatgctatttcatctttgcttgtaatacaatccgaaccgtcatttagatcggctatatcttcaatgatgttattctctaagctagcaacacaatccgaatcaccacttggttcggctattccatcgttgtctaaactagtaacacaatccgaaccaacacttggttcggctataatggttgttgcattattatccaagctagtaagacaattcgaaccaacatttggttcagctatacttattatggcatcattgcacaaattattaacacaatccgaaccatcgcttggtttggctacacatgatattgcattttcatctaaactagcttgtaagctattgtcatccactcggctttcctgagctagagcttcatgcaacacatgatcaacatcaagaaatatctggccattcaatttctctttaatagaatcaagcatctatcatatgcaatgttggctaaatctttgtcagttattttcaaattgaaacatcagtttttaacatctctaaacctttca

SEQ ID NO: 29011 - DNA, 645 bp, Oryza sativa
cggggcaccagactgagaagtggctttgataagcccacgggggtcgctggggagtgcatgccttgtttataagggggtgattatgatccaggaaggtgcgctgcagcggattgtgttatgcgaggggtattgtcacaactactttccgagataccgcggtggtattgaggcacatggcgacatgatgtggggttgtgtcttgtgggtacagtggtacacctttgatcagagtacaactattcgaatagccgcgcccgctgttatgggcggatctaacaatgactttcgagattagtctcacacctatcatcatatgaaaagatgcttaaactgataataatttgattagctcctggctcggaatgtgatattcctggagcggagatagaactgtgcagccggggtggttgttcagaatggttgggcctatacaacagggtatgttgtatagcgttggattaatattgtttaattacttaactgttttatcaaattctcaaatgtttgctaaatgctgcttttgcaaatgcaaccctactatgccatcctttgttatcctgtgcacttgcatatttgctgcgtggcttgctgagtatgtcatatactcaccttgcaatcattcatcagaggaagagttctacaatg

SEQ ID NO: 29012 - DNA, 730 bp, Oryza sativa
ctatagggcgaattcagctcggtacccaggtgattgagcactctttacatgttaaggaagacgctaaacccatcaagcaacgactccgtcgttttgcataggacaggaaggatgcgatcaaggaggaattgaccaagctgttagcagcgggcttcattaaagaagtccttcatcccgactggctcgctaacccagtcctggttcggaagaagacggggcaatggcgcatgtgtgtcgattacaccgacctcaacaagtcctgtcccaaagatccttttgggttacctcgcattgaccaggtagttgactcaacggccggctgcgagctactcagttttttggattgctactcgggatatcatcagatccgactaaaagaatccgactgcttgaagacctcatttattacgccttttggggcctactgctacatcaccatgccctttggattgaagaatgtaggagcgacctatcaacgcatgattcagagatgtttttcaacttagatcgaccgcaatgttgaagcttatgttgatgatgtagtcgtcaagaccaagcagaaggatggtctgattgcggatttagaagaaacctttgcaagcattcgcgctttcaggatgaaactaaacccctgaaagtgcatcttcggagtaccgttagggaagctgcttggattcatggtgtctcatagaggcatacaggccaacccagagaaaatcaacgccatcct

SEQ ID NO: 29013 - DNA, 601 bp, Oryza sativa
atactcaccttgcaatcattcatcagaggaagagttctacaatgaggctgatggtgtggaggattaggtgtagccttggtcaagctgcctgtggagtggagccgtctgcgccgtttatttattttccgctgcttagatctttattgattgagaggaactatctacctctgtaatgacattttattcgcttattaattagagtaatatttgtactctattatcaatttgttattgtgtgcctcggctgattcctggacgagggttcacacacatgtaagcgtttagaattttggatagaaattccgggcgtgacatccataaatgcctaaggcccgatgatcggcgatgaagaagtcctaaggattcaatcagctgaagattcatgcccacccattttagtcaagtggtgggatgacgacaagcaacctcagggaatcgtgataaacagacaaaaagaagatgaggaagtatgcttgctgaaaaaggcactcagccaagccactcgcattgtaaatgtaagtttccttatccgcagccgcaactatcctgcttcctattttgatcaaatgccgataaattcgtattgcagagaatccatctc

SEQ ID NO: 29014 - DNA, 1289 bp, Oryza sativa
taattttggaactctcgaggccactaggaaccagctgcacgaggtcaaggagctcgccagaaaaactgagctgatttgagggatcgagttgctgagctccaggagtccaactttgaactactaggttcatcaaaaggtaagtaccacctctgtctaacttactcatgttgccatccctgtcatatctattaatcaggaaacaatacagtacaagctgccaggatttctgaattagagaagcagatccaaagacagagttgaattggcaaagcagagagactcggctctgaaagatgttgaaggtactagtgattaattcctcatgtctttacgcccacttgctgatataagtatatttgtgcagatcgcaaaatcaagtcccaagcccaatttgacgtcctggtgaacaaaatcaagaggcttgagggagctagagatgaggttgccaacgttgctacaccactcattcaggctatgttcttcaataacaatggtccgagtgcattcgatgcttccgaaatcttcgacaagctaagagttgctccggatacatactttaagaacatcaagaaagctgggagtatgggagcgagtctggcgttggcaatgaccaagtctttgtatccgaagattgatgtcgatgccattgatggattcgcagatgggacgagcgaagaagccgcctttgacctcatcaatgatgcgcagaaagctgccgagaagatagccgttgatgtagttgatagattccaggataacgacctccggccgactggttctaataactccgatgatgaaaaaactgacaccgattgatgttatattgtagcagtgattctgatgatgatggaggcacaatttgtataatattgatgaatttatgctgtgcttgatattccaaacttagctcctgatttcttaaaagtttttatcaaaccttgttgagcctaaaacccgcaaaagttattaaaaaactttcagtcctcattgactaagccaaaaaaatcaaacaaggcaatgataaatcgagtaagcaaattgaattgataaaaatcacactccgttattattatagtagcccccaactgataactcaaggaaaggcttgatgttagaagtcaaagaggaaaatacaaaagtaatgcctaagcataaaaacgacgaagatgttcaatattccaagagttgtcgatatgagtactgtcctcacgtttgagtcgataagaacctggccgagtgacttcagatataactaacggtcgggtaccgagctcgaattcgccctatag

SEQ ID NO: 29015 - DNA, 1806 bp, Oryza sativa
atctttgaatactccgcctgtgaattgggtgccgttatcagtgatgatccgattgggtaccctgaaccggtgtacaatgttgatgaagaaatctctagccttgtctgtcgtaattgtaatgaccggtttagcttcgatccacttggaaaatttgtcaacagccacaaagtggtgagtataaccgccgactgcctttttgaacgggccgaccatgtcaagcccccaaaccgcaaacggccaagacaacgggatggtttgcaactcctgagatggtaaatgagtttgtcgggcaaaaaattgacaaccctcgcatgttcgcacaattttgtcggcgtcggatacagctgtaggccagaaaaaaaccctgccgataagccttgccaatgatggttcgtgcggcagcgtgattgccacaaatgcctgaatgtatatcctttaacaattgtcttccctcctccaaagacacacagcgttgcaggattcctgatggacttttcttgtacagctcggtctcatgtatgacataaagtctgttgcgcctggagatccgctcggctttgtctttatcctgagggagttcttgcgtggtcaaaaatcttatgaggggctctctccagtcggcttcaaccatgcttacatcttgggtgtccgcggcctcgattatttctttccttggtacagtcggctcataaagatgttcgacgaatacgtcagaagaagctgcttctcgctttgaaccaaaatgagccaatctgtcggctgcctcgttgttgtgctgaagaacatgagtgagctcaagtccgtcgaatttgtcttccaatttgcgtaccttctgccgataagcagtcatattatcatcaaggcaggaccactctttcatgacttgattaacaaccaactgagaattccacggacgatcagacgccgaatgcccaaagagatcgcgatccttaatccatgaagcagcgcctcatactctgccacattatgggacgcagaaaaatgtatccacaatacgtagctcaatctttctccagtcagggagatcaaaacaaccccagctccagtgcctgaaagcctcttcgacccatcaaaatgcatggtccaatactccatcttctcctcgggcatgtcttcttggcactcggtccacttggcgacaaagtcggctaaagcttgggacttaatcgaagttcgtggcttgaaggatatatccagggacatcaattctaaggcccactttgcgattcgtccatttgcttcgcgattacgaagtatatccccgagtgggaacgatgtgaccaccgtgaccgagtgaccttggaagtagtgagataatttcctaacggtaattaagataccatataataacttttgaacctgaggatatcttgtcttggagtcggccaaaacctcgctaacgaagtagattggtcgttggactttttgaacatggccttcttcttcatgctcaacaaccaggaccgtgctcacaacctgagaagtcgctgacacgtataacaatagtggctcttgcagatatggtgaggccaaaattggtggagtagtgagaagtttcttgaagtcttcaaaggctttttgtgcttcgggtccccactggaaattgtcggttttcttcagcagcttgaaaaagggcatcccccgctcgccgagtcgtgaaacgaatcggctgagcaccgccatgcaaccagtcagcttttggacatctttctgggggctcggcggtttcatgttgaggatggcgttgattttctctgggttggcctgtatgcctctatgagacac

SEQ ID NO: 29016 - DNA, 1088 bp, Oryza sativa
gggcgaatcgagctccgtaccctgataggtcgctcctacattcttcaatccaaagggcatggtgatgtagcagtaggccccaaaaggcgtaataaatgaggtcttcaagcagtcggattcttttagtcggatctgatgatatcccgagtagcaatccaaaaaactgagtagctcgcagccggccgttgagtcaactacctggtcaatgcgaggtaacccaaaaggatctttgggacaggacttgttgaggtcggtgtaatcgacacacatgcgccattgccccgtcttcttccgaaccaggactgggttagcgagccagtcgggatgaaggacttctttaatgaagcccgctgctaacagcttggtcaattcctccttgatcgcatccttcctgtcctatgcaaaacggcggagtcgttgcttgatgggtttagcgtcttccttaacatgtaaagagtgctcaatcacctctctaggaataccaggcatatcagatggtttccacgcaaagatatctttattattttgaagaaaggtgatgagcgtgctttcctatttacaatctaactcagcgcctattacaacagtcttagtaggatcagagggatctaaaggaatctttttggtcttggcgtcgctttctccactcttgggcatcttggtcgcgggcacttctccttcgcctactgtggacgcagccagtcggatttcttctcgggagagcgcgatctcacgggtctgggccatctcgcaactttccttatcacatgtgacggcttgcttgatgtcgctccgaagggatatgactccttgaggacccgacatcttcatcatcatgtaggtatagtacggaacgaccatgaacttggctagcgccgggcgtccgagtatggcatgatacgccgtctcgaaatcagcaaccttgaaacatatgttttccgtgcggtagttttcccgagtgccaaaagtaaccggaagagtgatctagccgagtggtgtagcagatagccctgggatgctccgtgaaagggcgcgttactcggctttagttcctctcgagggatctgcatgtcgtccagggtcttggc

SEQ ID NO: 29017 - DNA, 666 bp, Oryza sativa
ctgattgagtgcatcttccttgaggagggtgtcgaggagggtgatcactgcaaccgcgttttgctggggtgtgcggaaaaccgctgtcccgtcgacgtcttgttgcccgatgagatctcgtgctcgtcgcccggattccaaggcgcgctgtcgtcgatcctcaacctccttcgcaacccgttcgcgatcttgttgttcacgctgtagtcgttctcgctcttgttgttgtcgttcttcctccagtcggcgacgttcagcttcttgtcgcgtgcgctcttcttccgcttctcgggctcggcgttgttctgccgtctcgttgtcggccataaatacgccgaaaaagagaggcgtgtagtcgtcctcatagccatcgtcgaagccgttgaagttgccgtagtcgtagtggtagccgaagtcgtcgtactcgaggatctccgttggtcaggaactgacgccgggagagctgaggtagccatccaattcttcagtcgagaccgtcccgagaggttggagtataacgccgacctccttagagctagattggatctgggctaaagccgaatcccgtctaggtcttcggatgggagacgccttggtcatgaagacagcagccagatcgtcgggaagtctcattaggattgggggataggacccatcatcttgatc

SEQ ID NO: 29018 - DNA, 2092 bp, Oryza sativa
gcgcaaagacggcggcggcaaccaggacgagggcggcagtggcaagagcgcaggcgtgtggtggctatggctggctgtagcgctctcctttttccttttcttttttcttttttttatatataaaaagactaaaaggagatctaacggcccacgtcgtttcaatccctgggacttcgttcgtactccgattgaaagtgtcaattaggcctagaggggggtgaataggctaattcaaaaatcaactaaaagcggaagcagtaattttcggatatttccgaaattttcggatatatccgaaaattttcagagtcagcacaaacaggaaagtaaatcctagatctagttgcctacaacaagaatatgctagcacaaacagcaactagacctatagcggctcaaacaagcaaagctagaggagagggaggaagtaaagtcaccaaagatgaagctcacgaggttgttcccgaagttcgaatccttgaggggattctactctccgttgaggagctcactaagagccgggtcttggctaaccctttcctcaagaggttgcactaagcactcctctttccactaaggctatctcttccctttcggaggtgagatccgaccttcacaaacttcccccggccaaccacaagtagatcggtggctcgggagcgacacctagccgcctaggagtcctcaacctccaagagtaacaaatgaagtaaagaactcccggagatgatgcaagtgctcacaaatcttcacgaagtcaacaagaagcactcacacaaactcgaatccacaactctcacacacacacacaccaaatccaaatcgaacacgggtaagaggggaaacaagaaagcaaggctcaaaagtactaaagagagagagcaagccaagggcacaaatgattggaatggaaccagcagccctcacaagtgaggggagggggctatttatagccacagcccagattctgcccgttatgcacaataattgagattttcggatattccgaaagattttcggacatgtccgaaaattccagctcagcaccaacagcaaagtcaacgaaggatttttcggacattccgaaaacttttcggacaagtccgaaaattttcagtaccaacaacatcgttctggatgttctcggaaaagtccgaaaataactttcggacaagtccgaaaatatacagaagaaaaattgactctactgatgattttcagaaaatccgaaaatcagtttcggacaagtccgaaaatatacagaaccacttttgccttcgcagtttttttcgaaaagtccgaaaatcactttcggacatatccgaaaatttccagaagcgacaatttggttctgtgtgttttcggaaagtccgaaattgagtttcggaaaactccgaaaaaatccagaacacaccaaactgaggagaaacaccttttaaaaatagattttgagcactttgatcactcctcgtatgtcaatgcatcattcctcttaatagtgcggctttcctattaactcaaggaaacgaaaacgtacaaaatatcattttctcatttgccgcatcacatcacatcaacgtattccacgggatatgcattacgctaactctttgaggacatgacaaccttcacatttgcttaaataaaaatgttagtcctctctaatcgcattgtaattaatcaccaaaatcattaggggcctagatgcactttcaatctcaccctttttggtgattgatgacaatacgattagaacacaagagagaatgaatataatttaaggtttttggtgcaaagttttagtggaagctccccctaagagtgtgcataaaagcaagtggagagctccccctaaattattgcatccacattgaagctcacaagagaataaatatatcacatatgctcatcacatccaacacatcacatgcaaatgaataattacatctcatcacaagcaccatataaagaggataagatattgcaccacattaaagataataggatccattacatcacaagcattcataattaaacaatagacttacaaagctttaaacttaacataaaaaacacaaaaaatatcatacag

SEQ ID NO: 29019 - DNA, 2487 bp, Oryza sativa
aagtagttttaggaaagggttaatttgatgcatgccactataaatatgacatattaaaaaaatagcattacaatttgtgttatcgactgggtgccactcaaaatttctaaaattaaaaccatgccactctcgtaactaatttcgtcctcctctctcaggtcgccttcctcacccgtgacatcatgcacagggctccaacggcaaggtagggacatcgtgcaccgggctccaatggtgagcttcccaaggagggcggcggcgtacatgcgcgccatcaaaccacggcccgccggagcacgaagcactcaaggtagggtaccatgaaggccacgcgcgaagcactggttcctctcatagccggacaggtcactcccaatcagctccttgatttgggacaggccgtgcgacgggccggacaccgaggtggtaagcacgtccaggtccacggtcgccgtcttcctgacattggtgagctcggcggcgagccccgcggcaatgtccgccgcctcggcggcgctcgacagggtcatctcctgcactacgaagtggagcagcgtggcttcccgtcggtgccctcgacataggtgaatttgagcagcgcttcgagcttgaacgccatggcgccgccgcaggaggtcccaacgttcatcctgttcccggtcttgagcatagcctccagcagcttcaggaataacttgctggacattagctccctgcacgcgtccttccagacaccaagaacagcatgccaattaaactccgagtataataaatttacaattacaagcaggatcgctgagaccggcggccattgcgacgaacacccaagattcacctcgagcatctcgaacgacttcctgatgtgtccgacctcgtcggcgaaggtctcccggtacatcatcgtgattaccaccttcagcagcctttccgccgagaccaggccgtcgacgtcgccgtcatagccggacaatgtcgacctcgtccttccagctgctgtgccgacaggccgttccctgcgaacaattgttatgtggggaattccctttcagcggcacgggcgaacggacgaacgccgtgcctgacgggtgatctagcgccaactgaattcggtggattcggatttgcttcacagtttgtttctgttatcccttttaattagcaagtttgttagcatgtaaggctactattgacgtaaaacacgtggcctgggagatatgcttaactctagtgcaggtccaaaactcgccttcgggtatgctagcgtgccagttgatttgatcctgcaatcaataagaaataaagacaaagaaaccgcggttaaacctataaacgatagccgatcggcttgagtgccgatgacatatcatttatctttgagccgatgtcatataggtatcgatcgacaatcatgaataaataagaaggaactaaatcaactcgatcggatgtagatattaacaatatatactccttatattgatatatacttaaatcaagtgattgggatagatcggtcgccatgccgagacaatataaatcgctttgatcgaaatatatattgataatgggactatatatgttcatagcatagccgatcagatagatctaacatgtatcggctaatactccgataccactctatattaagatattaaagcaagtagaatatatcaaacaaaggcctaataaacttaaatgcaacgagatcttaacataaaggacagatttaacatatcaacgaagcatatagagtaaatatagttaaatcaggtaagatctgatgaaaccctgatatatactatcctaatcggcaaccaagaagcaggccagatattggaattttaatcacgacttataagatcaaactcaactgatgcagctatcgagttttatagagtggtggataccttatataatctaagtcaacatcgatatctaacctaatcggctgccctctaccgacaaatgttagccttttgtaggttagatagcaatattgccagagattatgatatatgataactcgatgaattacataaacaagattagagtatcataaagatggaagcactaatcccgagaacgcaagccgccataacaagttttacctcttgttgaagatcgaaaccgatgcagctcaacctgaaagcaaaaactcgtcgaaacacaacaaaagtaaaagggtggcgatgcgcagagattgtattgaacatgtattaattaattacatggggttcggggtctatttatacccgagaattacaaactatgtccatatcagacacgactcttatctctaacaaactctaagataccataagtctttacggcagacttttgcccaaacatatctctaaggaaattacataaaatatcctaattaatagatacaactgccttctcaggactctatccatgcacagcaatcatcatgaagctcatcaacctaaaccgacaacgtttgctgtgtcatatcgtcggattcag

SEQ ID NO: 29020 - DNA, 3077 bp, Oryza sativa
gacctcctctgggcagcattgaaaatatagggctggcaaagttcaggagcaaaaactttgacagatggtagggtgaatggaaactgcatctattccatcaatcggcttctatgtacatgacagatctctttccagatgttatcccttaggtatgccttcatttaattaactccgtttaaataattgcttagccgattcataacgtaattaattttctttcctgacttgcagataagggagttcttccttcctcaccagagcaatagtggcagggacatagagtatgctctaggccttattccaaatggaggtggtccatctcctcctgtcatcggctataatgcccccgagacttcaactcttcttcaagggctcatcagagaaccagccgatgctagtaaaaagagaagaaccagattatcggctgtggatacatcggctcctgctccaaagaaggccaaattaaagaagcctaaaccaaccgatgatctgcctgccctagatccatccatttaacaagctctggatgaagaagaaatcggcgaggatgttgatcaagccacagatgaaataagcaatactgaaataactccatcgacttcacctaagctaactcctccgaccccctctgctccagcttacttctctaggttaaatatctttccttgattctctttttataactattcgtcctcacccgatttctcactaatcttttccttgcaaaaaaagagaattgctgtgaagaagaaatcggcatcaacaactctaaaaccggctccaccaataagatatctttaatgctttcactagttgatctcagccgattttgtctaacacttgtctcttttacagcctcctcctcctccttcttctcctgtacaacaatcatcgagtgaccaaactccatcggccgtagagagccatcatattgaagaagaagaacaaccaactgcttctgctatcccagtaagtttccttttgacacaagaatttagatcggccatgtctatttagctctaactccctttaaataattattgcaggtcttagccaatcttttctcttttgacataagggactatcttgacgagacagaagaggataccacaagcaaagctttagcccccttatccgatgatgtgaagaaaattcttgaagatatctctcatcggctagaggcaacatcgttagacagcttagtggttgattgtggctcaattagaactcggctacatgaggttcaagctctgatcccagatgagctagccgatgtccttactccagccgtctatcttgagcagcatcaattcaagctggagaaagccaagcaaagattagctgaacgtcaggggcgcaaggatatcgaggccacaatccaggcaaatcgacagcttgttcataaagagaaggccaaacatgatcagctatttgagggcccgattaaatctaatattgatcggctcgaagctcgtaagattgagctcttggcacaacttgaagaatgcaacgccgagctggatatggaacataaaaagctagccgatctcccaaaatctatcgaagaacataaggcaagactaaaatcggctatcaagaatgttgctgatcttaccaagtctttaaaagtcatccccagaaccaacgctcaagatccaaaagccattgaagaagtagaacaaatcaggcaaagggctatttcagctatccagcaatatttgtctcagtgatatcttgtgtaatatgtcctagaaatgttttgtaatcggctaagaaactttggctctttatcgaacttatcttaataacttttatgtcgattcaatagaactccatattgtgctcaaaaatctgcagttttcatatatatgctgtcgggtcccaaaactattaacttggatccgattgagattaatatatcaatccctggatcagtaaatattgatacatgtaatacagctggttcttcattgcatacgataaagtttacaatactaggggttttacaagggtaggtactcacctaattaaacatagatgctaatattacacagcggaagttctagtacattctaactaggaaggtataacctctaaggattttctaagttatcagggtcatcatagtaatagtcataggggtcctcctcttcacccaaatctgaaaaagggttaataagagcaagggtgagtattcgcaatactcagcaagttaccataaaaatatgttatgcgttggcaaggagtgaagttctttgcagaaagcaataatagacaatctggaaatattaaagcaagagtttgtaaaatatatactttaggtttctaaccagggtaccatatgagtcccggtactcaattccgtgagtacggctattcgaatagtttcaaagatattctactgcagcagatgtaagctttacccgcagtccatgacttgctgataatcatcagctttagttatggcccagtattaggttattaacaattgtggcacctattccatgaacttatatcctcatatgctctgaacgtaatgttaacagcagcaagaggagttctggcgttcccgaggtatttaagaggaactggtcgtatgacaccacgtcatctcggtcagggtttagaaatataccatataatttatagtcgagtatcacaaaccattcacctgtacatggtaatggttaaatttgcctttcgcggctatagttgcctcctgcgcgaggacttaaaaataagaaccactatacagaggtaccacattgctaattaacataataactaggtctgtccccattctacaaactgcgttgtacccgttcgttcgacataagtacctggtgataactatatcgatcgagacagtactagccacccgaaaattatccaattcttacgtactgtcccaatctaagtataaaatattttaaccagattgtaagcaagataagcaatactaaattatctaggtttctatggttgaattatgcatataaaatagagtattgaatagaaggctataaataaataatttgtaaaatataagcttaaaagatcaaaaggtagatagtaac

SEQ ID NO: 29021 - DNA, 1486 bp, Oryza sativa
gaaggttaggaaatggatttgcctcgtcgaggcgaaggtattggcgagagggcttggccggtaatgctccgataagggagatcgaccgacggccggcattggaggagagagagagctcggtttgatttggggaaaagaggagggatggccggctacttataggcggcggacgtcggtttgcgaaggtcggttcgccggaggaggacgaggaaggcacgacgatgaccttagtgaaggaaaaggggacggtgccggcttccgctcgtgattggctggtgatggcggctgcgtacacgcggcgacgccagggatgttgggcggcagaggaggagaagcacggcacaatgatgacgtcggcgcgactcggtggcgtgaggaagagggacacagcgacggctgcttaggggagaagaaaacggcgccggcggcggcgcgcgtgttggacacggcgacgcgcgcccagagagggggcggctgcttctgccagtgggaccggctgggccaattgagccgaagggagagaaaaggattcggcccaaaagaactattttggaattttgaatattttgcctaaggagaaagaatttatctagatatctttagaagagttttgcaaagattatgcactataacaatgtctcactaatagaagggtaatctagagaaagtttctaaattttggaatttgaaggaaatttgctaaattcactaaggtttaggatagggcaataatctagggtttattggtaaactagcttaaggggcttctaggggtaatacttgaaccaaaatcaagaataaaaagagaacttttaaagagaattttgattttgctagtctaagattaaaaccagtcaaaagccagcatgatgcagtcaaattttagtttaaaatttgagaatgttacaaacctaccccccttaaagaaatctcgtcccgagatttgcttaggagtcttcaaatagataagaggaattccaattgtaaataatattcccattcccaagttgcttcatcctctgtacgatgattccattgaactttaaacattcttattgccttagtacgagttgttctctgtgcttcttccaaaattctgatagggtattctggataggttaagtctttattcagttcgacagtacttagtgatatttctttctctgggatacataaacatttctttaattgtgaaacatggaatgtaggatgtacatcagatagataatctggtaaaaccaattagtgctcatccataaacttctccatcgagtccttgcaacatgtaagctcccttagacacaactctatagatttggaacagtccttcccaattcggcaaccacttcccgaatttgctatcccgagtcccaatcggcaaaatcaacttccatacaagttcaccttccgaaaaagccttgggcaccactttcttgttgtaatgccgagcaacacgttccttatccttggtaacctttgcaagggc

SEQ ID NO: 29022 - DNA, 1103 bp, Oryza sativa
cccaaaagaactattttggaattttgaatattttgcctaaggagaaagaatttatctagatatctttagaagagttttgcaaagattatgcactataacaatgtctcactaatagaagggtaatctagagaaagtttctaaattttggaatttgaaggaaatttgctaaattcactaaggtttaggatagggcaataatctagggtttattggtaaactagcttaaggggcttctaggggtaatacttgaaccaaaatcaagaataaaaagagaacttttaaagagaattttgattttgctagtctaagattaaaaccagtcaaaagccagcatgatgcagtcaaattttagtttaaaatttgagaatgttacaaacctaccccccttaaagaaatctcgtcccgagatttgcttaggagtcttcaaatagataagaggaattccaattgtaaataatattcccattcccaagttgcttcatcctctgtacgatgattccattgaactttaaacattcttattgccttagtacgagttgttctctgtgcttcttccaaaattctgatagggtattctggataggttaagtcttattcagttcgacagaacttagtgatatttctttctccaagaaacataaacatttctttaattgtgaaacatggaatgtaggatgtacatcagatagataatctggtaaaaccaattagtgctcatccataaacttctccatcgagtcctttttttgggggcccccaaaaaaaaccccaaaaatttgggttaaaaaagggctcccttagacacaactctatagatttggaacagtccttcccaattcggcaaccacttcccgaatttgctatcccgagtcccaatcggcaaaatcaacttccatacaagttcaccttccgaaaaagccttgggcaccactctcttgttgtaatgccgagcaactcgttccttatccttggtaacctttgcaagggccctcaatctggactgaaccaactcttccctttcatctgccatgaggttataatactcatcggctgttaaatcattttgcaactacgttctccttgagccgattctaatctcccat

SEQ ID NO: 29023 - DNA, 520 bp, Oryza sativa
cacgggcacggcccggccatccacgggccgtgcttgggccggcggctcggcacgtgggccggcacggcacggcccgtttcatcagccgtgcctaacgggccgtgccgaaacgggccgtgccggaaccgtgcccgtgccgggccgggccgtgccgcccgtttggacacctatacccatgcacgtgatggatagggagcacggatccacaatatgacttttgctaccggccacggcgcctctaggcctcaggagcttgcatccacaccaccgagcctggcatttcctccttagctcctgccgtcgaccctgcctgcagtcaccaggccttgtgggaccggatcatccagcactggctagcctcaggggcatggatccaccaaccgccagccttggaagcgtggatccactttccagcctcggaatcttactctttgacccctttttgtgatcaatttattgaatggattttgaggattgtgataagtttgtgaatggattatgggtggcaaggggaatagag

SEQ ID NO: 29024 - DNA, 646 bp, Oryza sativa
ggattacatagagattacgtacccctgttcagattcgttgtactaggatgtgtcccatccactacaaagtttgctatatatattttgggacggagagagtaattcggtttgtcaccaagctccgaaggcccctgcaccacactgggagaaaccaaaaaggagatcgagatgaagctaaatatcgatggctcttttgatccagtggaagagcggggggaatcggtatgatcctgagagatgacaatggggccatggtcttttctgcctgcagatttatggagcgctgtaatggggcgcttgaggcagagatccttgcctgcgtggaaggaattgcattagcgcttcactggactatgctcccttttgaagtggaaacagattggttaacgctgacacagatgctgcaatcaagagaaaaagacctgtcggcctctgcgcacctagtcagggagataaggaggctcattgacggggacagggaaatctctgtcaggaagatccatcacgctcagaaccaggttagtcatagcttagccaataaagcctggtctgaggttctaaatgaattctggctggaaggtggttgtaattgttggaaatatggtcatgaatcggcatattttaatccaaaactttaaagcaataa

SEQ ID NO: 29025 - DNA, 1561 bp, Oryza sativa
  unsure (1)..(1561): unsure at all n locations
cccctctctttcacctctcctctccctctctttttattttgtcctctccctctccctctatgagagtgggtgccggcagccgggagcaagggcggcggatcagcggcgcctccttcgggaaggtcagattcgtcaccctagggagcggctgcagctaccgcgacggcgggcgcgcaattgggacagtggatccagcgagtgggcggcaacgcgggcagcggcgccaccgccatccccttctcactgccaacgccgacaacgacgacgaggcaaccctccccccctcacctccgccatctcctccagcagcggtggcggcaactccagacatggcgagcagtcgtgcgggaggtactccccaaaaacctgatcacccgcttacccggtgtagatctcaggcgaaggtgtggtttcggaggcactgctacttccaatctctcgtgcgtgcaagagatcagaagcgaggaagcgagaacagtacaggcgcggaggaggaggaactaacaccgggaaagaagcaagcgatcagaatagatcggactcgcggcctccttatctatcaggagagagaggcagtcgtgggaacgtgaacgcgctgttgtgaaaaaaaaaaaggggaaaaagggaaaaaggggtttccccggtttgggggaaacgtgggttagtggctgcaaaagaatagcgacgtgacgcacgcacgccgccgccagccagccacgcctcgcctcgccttcgcccacgcccacgccctcggcctcagcccggcgcgcacgcgcgcgcgtgtagcattccgacccccacctcaaccagtcaacagggagcctccaataactccctatttaggttgagatattcctcacttaaatcctgagatagtattattatccttaacacttattatgggcctttgagatttaataggataagttgggcctagcccaattattctaacaatccccaccaaatttcaaggctcataagaaatgttctcaaatgttgtgcctgtgttgatacccacggttttggtgagactgttaagttgaacttccccctaggaaatgagctacatcagacccattctgaacaatggatctgtgccttgaattgtcagttttgtgtgatcaggtttcactcagaaccttgactggtactgggctgccgttcgcatcccctctgtttgggggaaaaaaggggggcccaaaaatttaaatttaaaaaagggttccaaaanctccaggcctttcatgagtatcttgagatcgcccaaacctcatagactgtgactacagtcgaactcatataggtgtgttccttctgagatgttctgcaagtcaatagctctgcttggaaaagccactcggatcacattaaggcatgagccatcctaccatgcaggaaagaaaagaagcagcacatcatgaaaatgagcccttttcaagggtctcttctctcagtcacacaatagtttgtttcgccatccaaattcacaggatctccgatcacaatggacaggtttccactattgtgcaaccttaggtgggtaccgagctcgaattcgccc

SEQ ID NO: 29026 - DNA, 691 bp, Oryza sativa
ctcggtacccgtatagatgataattctactttttctagagagttgttaacagtgaaatttggtaagcccctaagagagttatcacgtcgccaatagtcggattactgttatattcggttaaggaaattaatctgttaaagaaagcttatctaggagtcaccgagttcaagtaagatgcgacatgacagtttatctattaattaggcacaatttgttagtttcttttatctttagaaacgtgtgtttagtgtcctataaggactttatgctttccttttatcttttaggaaagtttctttcttgtcctacaaggactagtatgtccccatgggtataaatatgtacatccgggatcattgtaaactatctcttgatcaatactactctcggcgcatcgccaccctctattctgaggtttttacttatcaaccagtggaattaggcacctgacgcggggctgcatcggttcaaatcgatctccggcgaaggggtaagttctacgttccgccggcccaggcaattgtctcgtctatgtcggtgtcgttcaatgctgcatcagtgcattcaacctcttggatgctcctgtttggatgatatatttgtctgcctatttatcatatgtcttcgttaatctagtcttagtatctcaatttagctttattggttgtctctcgctttagggtttctgctg

SEQ ID NO: 29027 - DNA, 7969 bp, Oryza sativa
tcttttcattcattagatggatgttaagacagctttcttaaacggagagctggaggaggagatctatatggatcaaccagacgggtatgtattaaaaggtcagaagggaatggtatgtaaactgttgaaatccttgtatggcctcaagcaagcacctaagcaatggcatgagaagtttgacaccacgcttacatctacaggctttgttgtgaacgaagctgacaaatgtgtgtactatcgctgtggtggggagaaagagtgatcttgtgcttatatgtcgatgacatattgatctttgggaccagccttaatgtgattgaggaggtcaaggactatttgtacaagagttttgaaatgaaggatttgggagaggctaatgttattcttaacatcaaactacaaagaggagatgagggtgggattacacttgtgcaatctcactatgtggacaaggttttgagtcgctttggatatagtgactgtaagccagctcctactccttgtgatcctagcgtgctattaaggaaaaaccgaagaatagtaagggatcaactgagatactctcaaatcattggttcattgatgtacttggctagtgcaacgaggcctgacatctcatttgctgtaagcaagctgagccggtttgtctcaaatccgggagatgatcattggcaggctctggaaagagtaatgcgctatctaaagggcactatgagctatggaattcactataccgggtattcaaaagtactagaagggtatattgactcaaactggatatctgatgctgatgagataaaagtcacaagtggatatgtgttcacacttggaggtggtgttgtttcctggaagtcttgcaagcagaccatcttaacaaggtcaacaatggaagcagaacttacagcactagatactgcgacagttgaggccgagtggcttcgtgaactcctgatggatttgccggtggttgaaaaaccagtgcgcgccagctatcctaatgaactatgataatcaaacggtgattattaaagtaaacagttcaaaggacaacatgaagtcatctaggcatatcaagagaagactgaaatctgtcagaaagcaaaaaaacttcggagtgatagcattggactatgtccaaacggctagaaatctggcagatcagtttaccaaggggctaccacgtaatgtgatagacagtgcatcaagggaaatgggcttgatacccacctaaggttgcacaatagtggaaacctgtccattgtgatcggagatcctgtgaatttggatggcgaaacaaactattgtgtgactgagagaagagacccttgaaaagggctcattttcatgatgtgctgcttcttttctttcctgcatggtaggatggctcatgccttaatgtgatccgagtggcttttccaagcagagctattgacttgcagaacatctcagaaggaacacacctatatgagttcgactgtagtcacagtctatgaggtttgggcgatctcaagatactcatgaaaggcctggagtttgacttatatgctccaaacagaggggatgcgaacggcagcccagtaccagtcaaggttctgagtgaaacctgatcacacaaaactgacaattcaaggcacagtccattgttcagttgtggtctgatgtagctcatttcctaggtggaagttcaactcaacagtctccaccaaaaccctggtatatcaaacagccacaacattgagaacatttcttatgagccttgaaatttggtggggattgttagaataattgggctaggcccaacttatcctattaaatctcaaaggcccataataagtgttaaggataataatactatctcaggatttaagtgaggaatatctcaacctaaatagggagttattggaggctccctgttgactggttgaggtgggggtcggaatgctacacgcgcgcgcgtgcgcgccgggctgaggccgagggcgtgggcgtgggcgagggcgaggcgaggcgtggctggctggcggcggcgtgcgtgcgtcacgtcgctattcttttgcagccactaacccacgttcccacgactctcttcacaacagcgcgtccacgttcccacgactgcctctctctcctgatagataaggaggccgcgagtccgatctattctgatcgcttgcttctttcccggtgttagttcctcctcctccgcgcctgtactgttctcgcttcctcgcttctgatctcttgcacgcacgagagattggaagtagcagtgcctccgaaaccacaccttcgcctgagatctacaccgggtaagcgggtgatcaggtttttggggagtacctcccgcacgactgctcgccatgtctggagttgccgccaccgctgctggaggagatggcggaggtggtgcgccgccgggagctggagccggaggtggtgcgctaggagctggagccgatggcgcgaacaacaacatcaatggaggcaattctgcctcacagtctagcggaggtccattctcggggtatatccttctcctgttcctgtttccactgttagcgctttactgctatgtgcgctatgttcctgttcctgatattcatgatgcctctagcatgttattgcgttattgtaatgttcctgttcttgacattcatgatgcgtatagtatgctactggttatattaagatcaccatacactgcttatgtcatgattattgctttaaagttttggattaaaatatgccgattcatgaccatatttccaacaattacaaccaccttccagccagaattcatttagaacctcagaccaggctttattggctaagctatgactaacctggttctgagcgtgatggatcttcctgacagagatttccctgtccccgtcaatgagcctccttatctccctgactaggtgcgcagaggccgacaggtctttttctcttgattgcagcatctgtgtcagcgttaaccaatctgtttccacttcaaaagggagcatagtccagtgaagcgctaatgcaattccttccacgcaggcaaggatctctgcctcaagcgccccattacagcgctccataaatctgcaggcagaaaagaccatggccccattgtcatctctcaggatcataccgattccccccgctcttccactggatcaaaagagccatcgatatttagcttcatctcgatctcctttttggtttctcccagtgtggtgcaggggccttcggagcttggtgacaaaccgaattactctctccgtcccaaaatatatatagcaaactttgtagtggatgggacacatcctagtacaacgaatctgaacaggggtacgtaatctctatgtaatccatccttagcttgatcgtcaagttctccattaattaacatctaagatgtccactttaaatgtgaacacaaatacgatcaaattcccagatttaagtaattatatatatatatatatataattctcaccgatatcaaaatatgttttagataagagggagttcagtttttgttgtagcttgcttacttgcggtgtgtgtaaattgtaatcggtcagctcttggctctgcgtaattggttgttgagtatgcgtgacctctccatttgatggttttgggcagcgacgatgcttcttaatttacacggcaatatatgatcaatgattacttcgtaaaggcagaggtgttggcggagtaatctgtgtcaacagctctaaatataagatagaaaaatacaatttattgcccctttttatctagtcggtataaaaatgagtaaacctcgctgaaaactattaaaaaaatatctttcacctatttaatagcgatattgacccgtatagatgataattctactttttctagagagttgttaacagtgaaatttggtaagcccctaagagagttatcacgtcgccaatagtcggattactgttatattcggttaaggaaattaatctgttaaagaaagcttatctaggagtcaccgagttcaagtaagatgcgacatgacagtttatctattaattaggcacaatttgttagtttcttttatctttagaaacgtgtgtttagtgtcctataaggactttatgctttccttttatcttttaggaaagtttctttcttgtcctacaaggactagtatgtccccatgggtataaatatgtacatccgggatcattgtaaactatctcttgatcaatactactctcggcgcatcgccaccctctattctgagggtttttacttatcaaccagtggaattaggcacctgacgcggggctgcatcggttcaaatcgatctccggcgaaggggtaagttctacgttccgccggcccaggcaattgtctcgtctatgtcggtgtcgttcaatgctgcatcagtgcattcaacctcttggatgctcctgtttggatgatatatttgtctgcctatttatcatatgtcttcgttaatctagtcttagtatctcaatttagctttattggttgtctctcgctttagggtttctgctggtatcggctaaattgttttactatattagattacttaaggcatctaccaccctgaaaaatcagtcaacggcttgattgtctagatattatgtttcttttcatacttagtgctgcatcagttaagtttatctgctaagtcatgtttagaaccataatacctagcctgctttttttactgccaataagggtttcatcggggtttcagccgacgagttatctagatgttgcttcggcttacaaggattgcatacaagttggatttagccgatggcaacaaagatttcattgtttaatataatcttgtggattttatgaatcggacctccagccgatgcatgctttaaccttcggatcagtgcttattctatcatatcattattaggcgattggtttctattggattatattgttgttatattttaccatcattagctgattgtctttatatcattatatacattggatatatagccggttgtttaaaaccctattgctatcagctggtatcggcatcggttagaattatcccatcggcttgtcagccgatcggctcattgatctgctatttttgtatcttgttagttgtaggatcaaactgactggcacgcctacacctcaccaacctttggtcctgcactggagctaagtagatctcccaggccagtgtgtgtttttcgcatcagcaagagtaaggaacaaagtagaaacagtgcacccgcatagccaatggcagcttgggggagctatggctcatggataggaaagattgacctttgttgtcgaaagacgcaacaattttccttaattaaaacactaaagtataatattgaatttcgaaactctgttcttacagcctaccccttcggaaattctttggtacttgattaattgctttgacggggaaatggggaccccccattcccatttcattgacaccgccgcccgccggatctgcactccaaaacactactagaaaaacattttcatagtcggccaaaacatggcttgaacattttttgacatacggctagtcgtgactatcgacgatccttaaatcatagtatatgaccatcaatacctacatataatagaataaaatatggtattcaactgagtggtagggtttattactaatcatttccactagcgttggtatatatttggatgcatgcaacaaacaactaaagttgagagggaataaacaagaagaaagaggagaaccaaacacatatccaaactaaaggtagttttggacccaaaagcccaattaaacacctccaaatgggcccaaccaccatgcccatggactaagggcctcaaaattagtgtccatgagggaaaacagggtcaacggagccatctcgggttcggccgaacctatttgtaggccgttgattgccaccttccacgtggacgctcctaatttcatcccaacgacggttggatggtagtttggtcatttcccatagctgtaaccatcatttggagcctataaaaggaggagctcactctcattcatcacacacaactttgagctgaattataagatgctctattgtatcttttgtatattagaatataggtacagagtgagtggaagctctcgaggaatgcccggaagtttggtgctttcttggacttctacctcgacgagtgtagctttgtaggaggaattcaggaggagtaccggagctcggtacactctgctatgggttcggagaaactttacttagtataagtgagatatatttccatctttgcgtgttcattgtttagtattcgttctaagtgctctattactaggactctggataaagaaggaagttcatgtgtaagtattagagtagtaattaagaacttaggcgtggtgtctaggtcagaaattacctatatttgttgtgtatcccatggatttgttagaggtagtaatcctccacgttaggatatatcatagagctatagccgaaaccacactggcagaacagcaggggtcggcgcccgaaacaacagataggaaattacctttaacttagcttagataattaaaatacatagaaagtcatctttagcctaactagcctacctatagttgttgtccttggatagtcttagctttagatagattacacaggtgtattcgatatccttttggggtcacccgaaggtgaagtgctacaacagtatttcgtgcgcttgcagatttatttgtggttgcaagaattaccaaaagcgacgactaaaagcgacgactgtaatttaagacgtaaagtgatatgcctaagaaaatgtttttagtgtctaaaaagaaatcctgcagattccaaaatatccccctacggtatatccaaattcccctaatccccttgacactcataatccattcacaaacttatcacaatcctcaaaatccattcaataaattcatcacaaaaagagatcaaagagtaaaatcacaggctagcaagtggatccgtgcttccgaggccggtgggtggtggatcaatgctcctgaggttagctagcctgactcgaagccgttggcagatccgcatgcttggggggtggggtgggggtgggtgtggaaaggcagcagtatctgtgcggaagggaagggggtgccggatccgcccctcgcgccgttgtcggcggtagggtgcctctcacccgagcctgcctccaccagagcccgagcccgctgttgcctcattgggtgaggaggtacttgcagcaaatctgcacccgtcaaggtcccccttgccagatctgccgcctccaacgagctccccgccgcctaatccactgccatggagcatcctgctgttggagtctgccagtcaaactctgttttatctagttagaccagtcatttgtaggcggtcacatcaggcctgtataggtgatcggactagacactaacgtagaggttactttccaaatttggcttaagcttgatattatcttgtccaagtgtcaaatttgctcatccacacgaagatgtagggagtgggtagcgggaaatggaggatggcttaggatggtctattctcgttctgttcctcctcccctctgtccctttaaaaccttctcctctctccctctctgatagatctaggaggaagaggagtaaggtcggtggtgtggacgcctctagattcagcctacgcaaggtcggggacggctagatccatcaaccatgaaactagggattcgtcaaccatgaaaccggtggcaacataagtcccatgatttttctcacctttttcttatctctctccactctataccttctcctttcatagatccaagcagaagatagaggagatctgcacgacaacggtctcgagtaggcggtagcagtctagggcggaatcttgctaagtagtgtcaaagagacattgggtgcataactgggtcgcgattcggttggacttgg

SEQ ID NO: 29028 - DNA, 1097 bp, Oryza sativa
ccacctcccacctcccacgtcgtcggcgaaatcgggagcacctaggccgttcccgaccttcccgcccctataaaatccatccccgcgtcctcctcctcgcttttccttttgccgccggcctctcccgagctctccatcgcccccacgccgtgtaaccactcgccgccgccgctcccgctactccggccgccgctagccgctgctagggtcgccgccgcaccgcgccgtcgctgccgtcgggttcgcgaggccgaactccacctcgtccgccgctcctccgtcgagattcgtcgccggaacccgcatcccctcgcgctcaggtgagccctacccctaccgccgccttcggccatggatgccggccgccgtggttcatctccctccctctaatctctctctcttccttccttagggcatcccgaagctcgtccgcccgtcgccgccgtcttcccgtggctcgccgtcgccgttagccatcgtctcccttagcgccggccactcgcggtgaggcattcatctcctctattccccttcctctccctcctagtgccaagccgccgcttcaaatcgcgcgccgtcgctttcgaccgccaccgccgcctcccgtgccgccggtcgccgtcgccgtcgaccgcgtgccgccgccgctagccatggccggccggccggctttggagccaagccaagcccggcggccacttctgccgccaccgcccgatcggctcggggccgatctgggccgtcagtcccgtggaccggtggtggaccacccgcgtggtcccggtccatggtggaccggcccccttgagccgctgccgagtggggccgtgtgccggcgcccttcccctctcttccgagccactgaccagtgggacccgcctgtcggcgccgccccccctgatgacgtcagccctgggaattatggcgcaataaattatataagggctttctgttatagtaataaacacagtgaatcttctaaaattcatatgtaattcatccgagctccgtttaagcccattcaagtcgcagtaaatcaagaaaaatgtgtagaatccattaaaaatggttttgttctctgtttcagtagtcttata

SEQ ID NO: 29029 - DNA, 678 bp, Oryza sativa
ataagaggaattccaattgtaaataatattcccattcccaagttgcttcatcctctgtacgatgattccattgaactttaaacattcttattgccttagtacgagttgttctctgtgcttcttccaaaattctgatagggtattctggataggttaagtctttattcagttcgacagtacttagtgatatttctttctctgggatacataaacatttctttaattgtgaaacatggaatgtaggatgtacatcagatagataatctggtaaaaccaattagtgctcatccataaacttctccatcgagtccttgcaacatgtaagctcccttagacacaactctatagatttggaacagtccttcccaattcggcaaccacttcccgaatttgctatcccgagtcccaatcggcaaaatcaacttccatacaagttcaccttccgaaaaagccttgggcaccactctcttgttgtaatgccgagcaactcgttccttatccttggtaacctttgcaagggccctcaatctggactgaaccaactcttccctttcatctgccatgaggttataatactcatcggctgttaaatcattttgcaactacgttctccttgagccgattctaatctcccatggtaaaacagcctcatgtccataaacaagcaaataaggaggg

SEQ ID NO: 29030 - DNA, 4264 bp, Oryza sativa
cgtgacactttatattagttcccttttctttctaaaattttgaattaatgaacataaattgtatctatttgaacttagttaacactttcttagttaaatttttgaatgcaaaatttgtagttacaaatagtgactaacatggactatttttgcatcgtaatatgctataattttgacaatgtaatttccgaactaatttgtgcattaaaaccctcatccaggaatcagccgaggtacacaaactgataatttaatgtacagattcatcaaaataactaaaacgataaatacttacataagaggcacttagtcctcaccatgaagaaaactgcagcggaaaataaaatctagcgaagcttcagctccactcccacaggcagcacaactgggatctaagccaaaggtcttctccttctggatcctttttcttcaactgaggtttgatgattattgcaagaatgagcatatgacatactcaacaagccacacagtatatatgcaagtgcataagaataccaaaggatggcataatatatggttcatttgtgaaagcagcatttagcaaagagttgagaatttgtaaaacagtagagtaattaatcatcaatattaatcagcactgaacagcacacccatgctgcataggcccaaccaaacctgaacaaccaaccctggtcgtacagatcaaacctccaaaccaggaattatccattccaaaccaggagtcaaattaattatcacattattatcattaatgagtagtgtgagactaatcacgaaaaatattgttagacccgcccataaccgcgggcacggctattcgaatagttttactctgaccagagatgtaccactgtacccacaagacacgattccacacatgttgccatgccctgaagtaccaccacggcactgcaaagggggaaatcgtgacagtactctttgcacaacacaactcaccacagcgcaccattcctggatcataatcaccccataaaaaaccagaggcatggactccccagtgacccccacggacttctcgccgcttcacagtctggcacaccataatgaatcatgctatacaaaagataaagccgttgcccacgctagcttgtggttggtacgattaatgtctcacaatagtagctcgcgaaccggtccttaattgtcatgagcacgaccttcaaaaccatgttctcacaacccaccattaatcatattttaattatcaattaattatcataacacgattgaccatcgtgagctaccattaaatataaccataaataataatgtagtatatataattcatcccattaatgagctaatgtttctaagcatggctaagcaattatatatatatagcatttagctgaaccaaaccaatatataaggttctagctaatcgaattataacccataggaaaataaagtcatcttcgaccattaattaattgggaaaggctcaccacccgatgacattcaaaaataatgcataagttgaaataaaacaatagctttaaacgggttcaacatgctcaaagggttgtttgggaactgtgtgacttgcctttgaaacaagcgtcttcaattcgtctttaggaacttctccaacgaacgaacgatcctccgaaacaacggaaaacaaaacctagaacgcaaaacgagaaaaaaacactaataaaaaccaaataaacagtacaattaaagttcataaataggtagagcttgaatttagatgaattatgagacttgaacgacctcattccgagttcgtatgaattaaatatgaattttacaaaatttaatttcaattaaacctattaaagaaaagactattccaaattgattaaacaatttacaaatgacttatagctgtgacaaaagattaaaacatcctccggaaatagattaggtcatatttggtagatgacatatattaaaaaggaataatatgccattgaaaagaaagaacagatttatatcgattttggacggctgagattaatctcgaccgagtcgaccaagatcggatggcttggattgacacacggcagcggcacaacagcggttgcggtggcacacatacagcagcagcacgacggcgacgtacaacgtctaaacagcgacgcggcggcaacaaggcagctagcgcagcggcgacgctagggcagcagctagcgacacagcaacggctgcgctagggttagagcaacagcggcggtgacacgaccaagggattgaaacctaacccgaggggacacggatagaagtctcaccgaaccaaagcgaccggagagggggggtcgacgatgacgatccggcgacacacacggaaacgatgacgacgctagggccaaacaacagattggattagattagattaaatccctagggataaactacaccggtaaacgacatgggagagaggagagctcaccggagaagacgacgacgacgaccaagacgacgacggcaaggggtgacggctagcggcagtggcgactagggcagcggcggctagggtgttggaggaggcggctaaacaggaggaggaggaggctaggggtggctgcaacacaaaaaaaaaggaaacaggaggggagaggacggcttatataggggaagattgaataggattaggtgggccaagggaggcccggcagagggggagagggagggactcggaggggagagggcagaggaggagcatggctgggagaggggggaggcgcacggctgggaggaggccgagagggggaggggaaaaagatacgggaggaggggttgcctagaaaggaaaggtgcgggaaacagatgtggtgccgttttgggaaaggaagaggaaacggaaccagaaagagaataggactcggctcgtcatacaaaacgaaatcgtggcggcaaagaggtcggcggatacaatgaaccgcagacagggagagtgaactgggaatgattcacaaccaaaggaggaaaaagaaagaattattaattacttttccaattaaattaatcactgaatgatctttcatttattaaaaatgcttccaatgctcaaataattctgggaaaaatctagaaaatacttggacattaaaaatatttaatacaattttatctatatcaacttaatgttcaaaattttcatagattttattcacacacttgctttaatcattaaataatttctaaaaattcctttttcacaacgatttataatttagcgatttttatggtgtgacaatctcacatagagagttaggagttccaatggacaaagatgaagtagaagacgagagcattccagactgggctcaatatggtggatttgatgaaaatacaaaaggaaggtggacagggctgttgaagataacgttggtgcgaatgatcttggtcagaagttgcgtgacgtaaaggaggacggcaaaagtgaaaaggaggtgcagaaacttgagcgcatatcagtggaccacaaaatgtcgttgtacccaggatgcgatccggggcacaaaaagttgggtaccacgctaggcacaaaattagagcgtatgttaacggaccacaaaacgtcactgtaccacgctggaattctcgcaatggaataccaaaattggtgtgagtgacaaggcatttggcgagttattgaaactcataaagaacattcttcctgaaagaaacgaattgcacgaaacaacgtacgaagctaagaaggtagtctgccctctatgactagaagtatagaagaaacatgcatgttcgaacgattgtattctctatcgcggtgaggagtacgagaacctagaagaatgcccgttttgtaaagcactatgatacaagattagacaagatgatccaggtgatgtcgacggacagccttcgaagaagagagttgctgctaaggtgatgtgctatttccctataataccacggctcaagcgttggttcaggaacaaagcgcatgctagaatgatgcgctggcacgcagaagaatgtcgacaagacgggatgctgagacaccccaccgatgagtcacattggcgaaacatcgatggaacatttcaagacttcggagtggatgcacgaaacattaggttcggtttaagtatgtatggcatgaatctatttggagatgagcagcagccgtaacacttggcctgtgaccatgtgtatctccaacttcccccctatgaatgaagccgaagtacatcagggtgtcgatattattgaaggcccaaagcaacctggtaacgacattgatgag

SEQ ID NO: 29031 - DNA, 1707 bp, Oryza sativa
ctatgatacaagattagacaagatgatccaggtgatgtcgacggacagccttcgaagaagagagttgctgctaaagtgatgtgctatttccctataataccacggctcaagcgttggttcaggaacaaagcgcatgctagaatgatgcgctggcacgcagaagaatgtcgacaagacgggatgctgagacaccccaccgatgagtcacattggcgaaacatcgatggaacatttcaagacttcggagtggatgcacgaaacattaggttcggtttaagtatgtatggcatgaatctatttggagatgagcagcagccgtaacacttggcctgtgaccatgtgtatctccaacttcccccctatgaatgaagccgaagtacatcagggtgtcgatattattgaaggcccaaagcaacctggtaacgacattgatgagtactaaagaccattggttgaagttctgaaactgcgtgaaagaaataaggtgtcctcgtgcgggatgagttcaaacagaagcaatttaacctacgagcgttgctgttcgttaccattaacaacctatctggacagtcaaacaagggatataaggcttgcaccctgttgacggaaaacacagtggcctaggggatctgcctaactttagtgcaggtctaagacttgtatcgagtgtgctaagggcgtgtcagcttgtttcatcctgcaaccagcaaggaaaaaagaaacaaggtgagttagcggatagccgatcggccgataggctgatgacgtatcgttgatggtctcagccgatatggttagaccaaattggctatagactgagtagatcaaagaatataaaaccctacatatcgtctgcttagtttgataaaatagatttcagacgatatcatgagaatagccgatggaacaatttttagagaaagataggtaaataaagataatatactagctaatactctagtgcaaacttatataaacaaatcaatctatagcaatctatatttagactaattgggcactttctatgagctctcacgttaatcagaaatatctaactgttgattaggtagatagttttatcgtggccatcgatctaggctggataaaattattacggcttggagttgattgttaccgccgagataataacagataattaactaccataattagcgtgatgtgcggcatatatgcagcatagcacggcatattctgccgctagcaggcacgttgagcgttccatccccagcagcaatcaacgtgtactgcatcaaaatcacagtgcctttcatggatcgatgaaagcatgcatagattggcagggctattgctcacgtatgatattcctcatcactcgcatcccatacagcttgaagccatcctgatgcatgcagcgcacatgaaatttgtacaaaacaaatatgcacgcttttttccatctcatccttttttttatttcttttaattcttatgccatttcatccatgctcgagctcttaattaattatttgtagtgatgcaaaacaatgaaaatctaacaaatctgcagctttgtgtgcatgctattgattcactaaattgtactccctccgtcccaaaataaatgtagttttgcactagtcacattcaacgtttgaccgttcgtcttatttgaaatttttttatgattagtatttttattgctattagatgataaaacatgaatag

SEQ ID NO: 29032 - DNA, 945 bp, Oryza sativa
gacatattgtatggaggctgccttaagaaattaaacaaagaagttaccacgttagcttctatactaacaggtggagattaaaaattttttatggcatttctctttgggcaataggtttcataagcattgactgcggcctggaggcagacagcagctacctgggcgacctgaccggcctcacttacgtcccagacggcccgtacatcgacggcggcgagaatcagaaggtgaccaccgtataccgcaatcgctggtggggccctgacacacgtactctccacacggtcaggagcttcccatctgccaagggtcagcgcaactgctactcgctgcccacccatatcgggtcgaagtacttggtcaggctggatttcttgtatggcaactacgacggcatggacaacccatcgctaaaattcaaccttacccttggtgtgaaacactgggacaccgtgagtatagacaccaccgacggaaatgatggttataatgttcacgaagcggtgttcgtggcatgggcgagctaggcgccggtttgcctcatcaacatcggccagggcacgccgttcgtgtccacggtggagttgaggcctctcggtatcttgccctacccggctgtcatgggcaatgtgtcactctccctctatgttcggagcaacgtgggatctagccctgacgatgacaatttagtaaggtatatatgttcttaatttccttggatcttgtacattttgcagctcagttagtcagttgtacgttaaccaatatatcacttgaagctattttctgattttattaatttagctaaacaacgcactacaaactgggcattactcgcggttccacattaccagctatgtttgggagacgaccagcagcgatactgatttttacaaaagaaaataaaatgattttaattcatacagacaaaaaaggatcctaaat

SEQ ID NO: 29033 - DNA, 686 bp, Oryza sativa
gggcgaattcgagctcggtacccctcatcgagcccgtgggacgatgattcagatcgcatcttaacagcaacctcggtattgtcttctaaacagccgtaatagacatttccaaagcctgcatgcccaattaaacatttgaagctatcagtgaacttcgctagttcctcatatgtgaatcgacgattctcaggtttttgtagatggtcccaatgatttgtccaatgtcctggaggacttatctgttctggtaccgtgggagaatcatctgtagaaactggtggagaaagaacatgtttagcagtattaaatgcagatattaaacaatgtgtttttcaaatgcccaaagggaaattttttaaattttttaaggggttttaaaaattttttacacacaatggggctttcttttggctctccagatcaaatatgctacaacaagcatggcgactacaagcactggagccgctacataaacagctaaggtagctgctctgtttcttgaggacgaagttattggttttttgcacatatctccgtagactcgtagctggaattacataaaacaataagtccatggttttaaattggtatgctcgccaaataaaaatctacaccaaaattaaagcacatcaatggggggaattaaaagtgatattagcagagtaattcccattaggaaggggcaa

SEQ ID NO: 29034 - DNA, 1792 bp, Oryza sativa
ttgaagtactaaacaatttcacctaaaaaagtcgtcaagaacaaagttgtatataactcatcgagatatataacttttattttggtcatttcttcatctgacaaagtgatagtaacattattcataaaatttacacatctcttatatagttttataaaataaaataaagatatgtaatttttggaaaatattactatcactttgttggatgaagaaatgaccaaaacaaaagttatagatcatgatgagttatacaactttgctgttgatgaccttttcagctgaagttatttactacttcaaaatattatttaaaattttaaattcaatttttttttttttttttttttttaaaaaaaaattttttggaaaaccaaaaaaacaaagttacaagaaaaaatggccaaaataatagcagaaagaacacaatgacatgatagagcatgattttggaaacatttagaaaaaatgatcatccaatttggagttcatgagtgagataaactggtttcaattttttaaattttatatgcaggctcttaagtggcccgtatggaaaaatttattttttcatacgggcgtgttaagtagccgtatgcgaaaatgccgctcgatttttttcagacgcggcaagttatgttccgtttgtaaaaattatagggtcttgtatagaaaaatcgtctgtgtagtagtggctgtagtcgtgttagaagcagcggttcgagcggacagccagacacaggtcaccttgatttttctgttctgttgtccctttcactgcaaaactcttactatctaattttacaaggcatgatcttaaaaaaaaatggtctacacatatacacataataaatgagtaaatttcataaaactatagatatttcttttgaaaaaaagataaaatatagatttaaggtggtgttgtatcacgaaactacatacatacatagttttcattgagttcattgtgaaaagtcgctgtatatatggtaaaactatagatcgatcgttaatttaagacaaacctgaagtggagctgttcggtgggacttgttgcagcatcctggctgtgctgttaaggtgatgacttcaaatgtaaatgttaaggttatcaactataaaattataaaattatatatcttacttactgtataattttgatatagagtttgcgtcgatttcaattcatatgaaaattttaaagcatttatcaattagatctgataacttctatcacacatatatatgatcacataaactatgtcaaataaaaaattgttcagcaaccacgttgtagatcttgtcaagaaatataactttggcagaaagtttatctttgatcatcgacttcatataaaaatattattaatttctttatcattttcacttcgatacgcagttaatggtgggctgtcacgcccagaaattcccgaatagaattccaagcagaatgtgcattaaaacccccgtccagtaccggccggggtacacaaacgacaatgttgacatacagatccacgtcttacaaacaatataaaagtcttacataaatgcagcggacaaacgatagataacaggagctaagccttgacttgaactgcagcgggaacaccactccacaggcatcctcgacggcacggacgaagcctactcctcggagaacccgccatcggacacatactcatacgctggggttgggggaaaaataaagcaagactgagtactatccactgtactcagcaagtcataccggaatggggggtatgatgcagggattcaacaagggatagct

SEQ ID NO: 29035 - DNA, 669 bp, Oryza sativa
  unsure (1)..(669): unsure at all n locations
aacactgaactcttgtctcttgtgctttagagaagtggcaaagtccgaccaagaaggtggcaatttggcaataatgccacccgccacaaacttgtccggcaactaacagttgttgttctcaagttccttagctagcatctgaatctcatgagcttgttctactacagaacggtcatcgaccatcttgtagtcatagaactgctccatgacatacagctcactgccggcgttagaaactccgaacttggcctcaagtgcatcccacatgtccttcccagaaaggggccaattttggttttgggcccaaaaattttgggggttttttaaaacccccacgtccactatattgtcagcgagtacactgatcaatgctccacggaacagacaatccgatgcctcgaacttagcctcttcctcaggagaaagaggtggttcacttcatttgccacgtgaaacatagaagcactgcatcgctgtcaaccacatagtgcacgggctttncatctcttatagttagaaccatcaaaagcatgtggtttcagtgcagcagcaaagccaactaccgaaaatgacctatcaggtttttggattgttggaaatatggtcaagaatcggcatattttaatccaaaatgttaaagcaatatcatggcataagcagtgtaggttg

SEQ ID NO: 29036 - DNA, 596 bp, Oryza sativa
cgtagttcaacagtttgatcgcagaggtttgaagagctcgcggttggaaagatgtaagtaatattcaaatttgtgtattatttgtattgtgtttgtgaattcaataaatattcgaaaatttgtttatgtcggtttaaattttcagaatggatccgaactttccataccagtcgccgtcgttcaccttgggtgatttcgaccccaactacatgtcggggtttgacggtacctccggatcggctccaactccaccatctgtggaggaggtaccggttcatacggctgtcgttgaggaggtaccggttcaggcggagacagcttcggaaggattttccggaaccgcgagcggaagtgtttcgacacacaccggctcgaagagatcgagaacctctggtgtgtggcaaagcttcgacgagataaaggaaacctgccccgacggaagggaggtatcgaaagcccgttgtagaatatgtaggcaaattttatctgctcgttcttctggtggtacaggtcacctcaagcgccatgcggagtcgtgtgccaagaagcaaggaatacaacttcggcagcagcaacttatgggaaacccagacggt

SEQ ID NO: 29037 - DNA, 1389 bp, Oryza sativa
  unsure (1)..(1389): unsure at all n locations
agccagaaatgaccttggaattcccgtgctactgtcctgttttttcttttctggtcacgagttgatacagacatgggattagctccttgggtgacctaccatctatcatcggtccttcacaagctacctatccgtttcatcacaaggtaggatggaaccttaccatggtttgtcatatgcgtccaatcgaaccagagctaccttagttgcaatgatccgtcgaaacaatccaaatcagttatacctatgcccgctaaatttttttggcagcataccctttaccagttcactaagcaatgtccgtcgtgtgtctgttccgaacctgtctagaggaaacctcgatgaaatttgtccatattgttttcagtccacttctttaggtgggatactgtgaggtgggtatgtcggcagggctgaaagggtggacttaatcaacactaactgacttgttttgttaagcaaccttcctttccacgttggtagtctagctgcaaaccagtctataagcggttggacatccaacttacgaattttcctgatgtgtagaggaagtcggaggtaggagcttggaaaagtttttttgttgggctgggaacggggagagaatatcctgcagattggggtcgttgcacctgattgcatatactttgctcttttccagattcgtggtcatcgttgtagcacgtccgaaattttgtagaatggcatgtaccgcttggagttcctatttgtccggtcttgtgaacaccaccccatcatctgcgcataaggctatgttgaaccatgtgttcttccgtgcaagggctgtagaatacatgtttgttgggcggcggattaaagcttttgcagcgggtctatcgcaaggatgagtaacatgggagagagagggtcgcgttgacgtaaaccccggtcatgttgaaagccggtccctgccctgccatttaggatcaccttggatgacgtgcttgctataatggaggtgacccaatttatccacctggccaaaaaaaaaaaaaaccccccccccaaaaaaaagggaaatttccctttncctcaaagcggtcgagaagatatggccagttgacagaatcaaaagattttgctttatcaagcttgaggaggatcgctagaattttggatgaatgaagttcttttaccatgttattgacaacaggaaagttgtcctttatgtttctcctcttaatgaaggcactctgatttttggataccaattgttgtagtttcggtgtcaatcaatttgctaggagtttagagaacattttgccgaaagcatgaatgaagcttattggcctgaaatcccccactctgcaagcattatgctttttttggcaatagggcaatatagggggtaccgagctcgaattcgcc

SEQ ID NO: 29038 - DNA, 1571 bp, Oryza sativa
ctctccttgtgaaggtgcacctgctgaatgagctgccgcaggagaatgaattctctaacttgagtagtcgagttcatccttctcatctgccttagccagaaatgaccttggaattcccgtgctactgtcctgttttttcttttctggtcacgagttgatacagacatgggattagctccttgggtgacctaccatctatcatcggtccttcacaagctacctatccgtttcatcacaaggtaggatggaaccttaccatggtttgtcatatgcgtccaatcgaaccagagctaccttagttgcaatgatcccgttccgggaaaaaaaaaacccaaaaaaattttttccgcccccaaaaaaaaaaatcagttatacctatgcccgctaaatttttttggcagcataccctttaccagttcactaagcaatgtccgtcgtgtgtctgttccgaacctgtctagaggaaacctcgatgaaatttgtccatattgttttcagtccacttctttaggtgggatactgtgaggtgggtatgtcggcagggctgaaagggtggacttaatcaacactaactgacttgttttgttaagcaaccttcctttccacgttggtagtctagctgcaaaccagtctataagcggttggacatccaacttacgaattttcctgatgtgtagaggaagtcggaggtaggagcttggaaaagtttttttgttgggctgggaacggggagagaatatcctgcagattggggtcgttgcacctgattgcatatactttgctcttttccagattcgtggtcatcgttgtagcacgtccgaaattttgtagaatggcatgtaccgcttggagttcctatttgtccggtcttgtgaacaccaccccatcatctgcgcataaggctatgttgaaccatgttgttcttccgtgcaagggctgtagaatacatgtttgttgggcggcggattaaagcttttgcagcgggtctatcgcaaggatgagtaacatgggagagagagggtcgcgttgacgtaaaccccggtcatgttgaaagccggtccctgccctgccatttaggatcaccttggatgacgtgcttgctataatggaggtgacccaatttatccacctggccaaaaccaagatctctcaagcggtcgagaagatatggccagttgacagaatcaaaagattttgctttatcaagcttgaggaggatcgctagaattttggatgaatgaagttcttttaccatgttattgacaacaggaaagttgtcctttatgtttctcctcttaatgaaggcactctgatttttggataccaattgttgtagtttcggtgtcaatcaatttgctaggagtttagagaacattttgccgaaagcaatgaatgaagcttattggcctgaaatcccccactctgcaagcattatgctttttttggcaatagggcaatataggcccaagtcatgagccagagatggtgaaaggaggtgtaatatgcttggttgatcacctgtaccaaatcttgtatgatctctcagcatttttcaataaaaaagctcctgt

SEQ ID NO: 29039 - DNA, 6229 bp, Oryza sativa
atgctagttgatgcgatcatggctattaaatatgagtatggaataaagaagaactggatgggtgatccttgttttccacatgaatatgtttgggatggtgtgaaatgcagcgatgcaggtgataaaatcatgaggataatatctctgtgagtatatttgaaaggtatgcatgtactagcattattaattgtatacatcaggctaaattttgttggattacttgaaattattatgcagtgatctttccaacagcgaattgcatgggtcgatatccaattctttcacattgtttactgccctcaagtacttgtaagtatatctgagatcccctctgccttcagttgttctgcatttaaaactcccaattgacatgactatgcatcatcttccattaaaaatgaaaaacaccgactaaatattatctagaggggtgaaaatggtacggaaactttccggattctggacctattttaaaaaacggaatctgtcggtcggagtttttttggaatttttcggaaacggaaacgaattcgaaaatattttctcggaaacggaatcggaaatgataaggccagtttccgtcggaactcggaataagtcggaaactttccagaaattttctaactaaaataccctggattcatttttaagcactgaatagtgaataccatggtgtttggctgttattctttaaaatatatttgttatgcaaatctgaagttatataagaatattttttttctgcattgggattaatcaacatcattactctcttaaacatagataatttattccatagattgtgttttgtgatgtactgttgagacttaaaaattggacttatatgattgtgttttatgatgaatcgttgaccgttgagacttgagaattggatttattggtttgaggggttttgtattctcataatttttcgttaccgtattcgcgttggttcgtttttgctccgttttcggtttcgataatattcgattccgttttcatatccggagtttccggttccgattccgattgcgaaaaaaaatgaaaacgaaaacgataatgatggttttcgtccgtttcagtattgttttcacccctaatcaagagtgatgcagctttactttcataaagtggtaaaaatgaactaaaggtatgataactaggggtgagtgcgagtggatattggctgctcttgggctacaagctaccccctgtagtgaaggaatactattcttgagactccagagagggtaccacttagtatctattatttttcattcagaatcactaaatcaattgaaatatataattgagactttaaaccagggacatgaagatcccagttatcatagtacccacctgtaagactgttatcatggttctgaacctataaaagaaatcatatcatatgaaaaacaacctcattaacagtttggccaagtgttactatacgtgtccgaattcgtattaggtttgtgtcacatctcgtactaggtttgtttttttatgggacagagctggtaattctctatgtaccacagtatccaaagctgaacataaaaactcttggtaattttaaagatatctgagtacctgacggtatttaaagtggtttgatacttatacttggaactttacagtgttgttataaaagtctgcagtttgttaacaagccatagacatattgcttaatgccaaaattatatatctctttgtacagaaacttatcatgcaaccaacttaatgggacaattccatactccctcctcaaaaataatggatcaattgatttcaggtttggatatttttattaacgttggtttctttcagtaatctttaggcaaattagcactgaacaacgattcttttgaacccttcaggactgatagttttatgtaatttcagttatgagactgatggaaatatgtgcaaaacacctgttactccatccctgtcaagaaatagagccgttaccttggctgtttccgtagtggccccagtgctggtactggccatacttgttctcacatatttgatatggagagccaaaagaaagctcaatagtacgtatgctctgttataatagtctgtactgaaaataattgactcttatggtttaataactcaatgtaatattgctaatactttttttttttgcactagcttcttcaactgatcttgccatggtaccagaactcaggggtgctcctggacatatcacaaatcattgggaccatttacaagaacctgaaaatcgccgattcacgtatcaggagctagagaagtttactgataacttcaaacatttaattgggcatggaggcttcgggcatgtgtactacggttgtttagaagacagtactgaggttgctatcaagatgcggtctgaattgtcttcgcatgggcttgatcaatttttagctgaggtgacaaattcagttaccactaagttcaccacagacaaagtcaatattgtcactgtcatataacttaatcacagccacagtgagatttcatacacattagtccctcgtgttctttggtgcaagttcccaactttagtccctcgttttccacactcaagtttcccaaactgctaaacgatgtatttttggcataaaacattatagaaaagttgccttaaaatatattaattaatctattttttaaattttttagataatacctaattaatcacacgctaaacctctgctccgttttgtgtgttgtggggaggggttcccaagccccacaatcgaacacagcctaacagacttaaccttcctcttgcttatagtacaggttcagagcttgaccaaggtgcatcacagaaatcttgtttgtttggttgggtactgctgggagaaggaacatttagcacttgtctacgagtatatgtctagaggcaatctttgtgattatctaagaggtttgtccattgcaaacttcaaagtattgaatgttgcgaaatcatagggaggatagttggacacaagtgagcacctacacatagcgtaaactaacttaatgttctacatgctccctatagatgtacgaagcaatttgcagcacaataactactataagtacttaatacacggaatgaccacagttacaagtgagaacttaattatcactttatttagtaatgtgcctatatgtgtttcttaaaaaataaagataccgatttttgtttagtggcggcatattggcaatctctacataagggaactccatggccttcgttaattaaactcactatagatacgacaacaaatttagttgtcatctttaaggaagtatcttgatcttgtatttccaatcatttgtagaagttttgtcgtcattgttttttttagaactgtcatatttgttcattgtttcattctcaacataattgattcacacatcatgtaaatattttaaacataattgcatatggaataattgttttcaattagttggacatgaaaatccatcttgactgatttttaagacatgaatgcatatgtgatgtacaagcttttttataggtgtaatctacatctgtgctttgctagtccctatgatacaaagtgatatctagtatgattcttagagatcaccgcattaactactttttgttgttaaagggacaatactattttgattatttatgttattgctccccctgccgatgtgtgcacacacacaagagacgagtgttttacaactcccttaattgctatttgaagttgctcgtagaattcctttctaactgtttgtctgtgaatatattaaaagggaaaattggtatgggagaaaatttgaattggaagacacgcgtaagagttgcacttgaagctgcacaaggtattctataatagcaaggcaaaaaaaacaaagcaaaagtgttatggctcatcttttcttctaactatagtttccttatttgtaggcctggattatctccataagggttgcaacttgccaataattcatggggatatgaagacgaacaacattctgttgggtcaaaattttaaagcaaaaatagcagattttggaactcatattgggagccagagttgctgctggatctatgggttatattgactctgagtatgaatctcttctacacactataatcacttatgcaatctctacatatattaacacgggtcaattttaggtactacaccactggtaggctcaccgagagcagcgacgtttacagcttcggcattgttttactagagataacaactggcgagcctcctataatacctgaaaaaggtcacattgttcaacgtgtgaagaaaaagattgtcagtggtaacattagctcagttgcagacgcacatcttggaggtgcctacaatgttagctccatgtggaaagttgttaacatcgccatgatgtgcacaacagatatagctactcaaaggccaaagatggctgacgtggttgttcagctgaaggaaagcctagacttggtggaagttcaaggggacagaggagacaaggaaaacctagcaagtgataccatgtcttcgatgtcgacatttggtccatcggcaagatgattaaataatacatacctagccttggctttcactacattgatggatccctgtgacaagtctataacgatatatacaatgtgcatgcacagcctgtttgttttgttaatgtcaataattgagacagccagtataaaacatagatgtcatggaaggatcatgataggtgtgtatatggcccataatgtatagtttgcatctatctatgtgtgtcaactattactcacattagctccaatattcttctgatactacaactccaattaatccttagcaaagattgtttgcacatttccttattgcttcttatgtcctatttcacataatctatcattagtacttgtatgctccagcactagtacagatctagacatttgtgatgagcgttcgtgctgagctaaggtgactcgtttgtgctgcatattcatatattttagtgattctatacaatattatccttaatcacttggcgctatcattatgtttatcaatatgggctattttttggcactacatcaccgataggcttactgacagcagtgacgttgacagcttcggtgttgttttactagaggtaactatcggtgaacttcccataatacctggaaatggccacatcattcagcacatgatgcagattgtcactggtaacatcacctcagttgccgatgaacgtctaggaggttcctatattttcaactccatgtggaaggttctagatgccatgatgatgtgcataacagatattgcttctcaaaggctaatgatgtccgccgtggtcttgcaattgaaggaaaaccatgaattggaggaagctcatggggatgggttacttggaaaatgtagtaagagataacacatcttcgatgtccatgtttagtccattggtaagatgaaaaaaaccattgatagctcgctttggaacatactgatggctctcttcttcaagtctaaaataaaacaactgatttctctctagacgatttcttctgtgttaagacacaatgatttatatacagtttgtcttcataaacaatgccggtaggatccttaataggtgtgggtattgcaaagcaatagtttgcttcagtgtaacagtaagctgtttgtgagctttctaactatagggtatcattgctcaaataatatgtaacaaagatatcgaaaatgtttacatgtttcgttatcatatccttttctgtgttgatttttacatactcattatgtattttttaaataatagtactgattatggtaattaatgctgattacgggggtggggattgcgcagcgcgagttgagcagctggcgcttgcgcgcccactaggaagccccaggtgaagagtgatcgctgccgcggcttttggcactaggctttggctgatgcaggccatggacaccatagtcaagcacaaacttttgtccacatgtccgaccgaagcttagatggaaaagcatttcagggagatgcaggggaagcattgcttggactgcatcaacaacggcaagctcctgctgatgttggacgagcccaccggagtcttgcttcttctggcctacgcctcatcgccgtctcacggcagtccaagattctgctcccaccgctgcgactgccgaccaaatatgtgggagcgtttggggtgccacgaaaaaaaatatgtggagta

SEQ ID NO: 29040 - DNA, 4858 bp, Oryza sativa
caaaatcaacttccatacaagttcaccttccgaaaatgccttgggcaccactctcttgttgtaatgccgagcaactcgttccttatccttggtaacctttgcaagggccctcaatctggactgaaccaactcttccctttcatctgccatgaggttataatactcatcggctgttaaatcattttgcaactacgttctccttgagccgattctaatctcccatggtaaaacagcctcatgtccataaacaagcttataaggagggacttggatcgatccatgacaagccatccgataagaccacaatgcttcggccaaacgagtatgccactgccgaggataatcagaaatctttcttttaattaatttgatcaagctcttgttagatgcctcggcctgcccattagcttgtgcataatatggtgaagaattcaacaatttgatacccatgctataggcaaactaaacaaattcatcggacacaaaaattgaaccttgatcagttgtaatggtttgaggaataccaaatcgatagattatatgttcttgaacaaattgtatagcatccccagaatcaaccttcttcgaaggaatcgcttctacccacttgctaaaataatcagtcgccaccaatataaacttatgccctttactcaatggtggattaatcatgccgattatatcaattccccaacctctaaatggccatggcttaatgatgggattcatagccgacgccgatgccctctggatcgccccaaatttcttacaatcttgacatcccttgtaatttttgaaacaatccttcagcatcgtcggccaaaaatactctgcacgtcaaagcaaccacttcatcttatgagccgattgatgagtaccacaaattccttcatgaacttctccgatggcaaccttagcctgatcagcactcacacacttaagtaacaccccatcaatcgtccgataatagagctcatcatccaataaagtatacttcaacgctttatatcttaatctccgagaagccgactgagatggattctgtaaatattgatgcacatcatatctccaatcatcggctgttattgcagcaacttcaaccttaacatctttgatcatcggcttataccctgatgccccttgggccaaatcattagcttcaatattctgctctcgagatacatgcctcaaggtaaccagccaaaattccatcattagttcttggcacttctcattataaaccattaatgtatcatttttgcactcatattctcctgccaattgactgattactagcaaagaatcccccataatttcgatagcatcggcttcaacttccttgagtaactgcaaccctttaagaactgcctcatattcagcttgattattggtcgcataaggtttaatagtgtaagcaaactcaaaacatgccccacgaggggaaattataactaagccgataccacaaccatgagtatatactgatccatcaaagaaaaaagtccatggcacgatctcaattgagccgattaaatcatcacgatgatcaacaatgaaatcggctatagcttgccctttgatcgccttcggtgactcataccgaagatcgaactcagttaaggaaaatatccactttccaacccttcctttcaaaattggagccgataacatgtatttaacaacatcggctttgcatatgacagtgcattcgttggacaatagataatgccttaaccttgtacatgaaaaatataagcacaagcacaacttctccacaggggaatatctagtctctgcatccaagagccgacgactcaagtagaatacaactctatctttcccttcgagctcctgaatcatgaccgagccgattgacttctcaccggccgacagatataacctaaaaggtatccccttctgtgggggaatcaaaactagaggagagctaagatattccttaatactgtccaacgctttctgttgctctgccccccaagtaaactgttgatcggctttcaacctcaataatggtgtaaaaggctctaacattccagacaaattaaaaataaaccttctcacaaaatttatcttgccgatcatctcctgcaactctgtcttgttctttggagactgaatcttcttgattgcattaacactcctttgagttatctcaattcccctctcatgaacaagaaatcccaaaaactggccagccgatacgccgaaagcacactttgttgggttcattttcaagccatatttcctggttctctcaaaaaccttcctcagatcagctatatggtcctctatctttttagacttaacaaccacatcatcaatgtagaccccaaccaaccagcagatcagatcatgatatatataattcatggctctttgatatgtagccccagcatttttcaaaccaaaagacattacaacccagtcaaataagccaattgtaccaggacacataaaagctatcttatgaatatcttcttcggccataaagatctgattgtaccctgcattaccatccataaaactcaaaatcttgtgtcctgaggcagcatcaaccagttgatcggctactggctttggatattcatcctttggggtagctttgttcaaatctctgaaatcaatgcataccctcaccttgctgtttttcttgataacaggaactatactagaaacccactcggtatatcggcaaggacgaataaaaccagcatcatataaacgtttaatctcagctttgacaggttcgagcatatcggctttgcatcttctcggaggttgttggtgtggcctgacccctggtttgataggtagccgatgttcaacaatcgatcggctgagtccgggcatctcataatactcccaagcgaagcaatctctgaattcctttaatagctctatcaacttggttctgaattccgaagataaattcttactaataaatgtcggccttggtcgatcaactggacctatatcaatctcttccaaatcatcggccgacatgaaaccctgtccttgtttgtcatcgagattttctactgtgtccttggtgtagacatttgaaccctccacgacgccctcaaaataataggttgggttctccatctacaattggttgtatatcaaaatcggacacttttagaaaatctccatcccaaacttttccagataaacaatcaagaccatccatctcccaaagagctaaatctgcactggcaacattgactgacctgtcggctggcacaatttcaatcttgtcgccttgccactgaatcaagcattgatgcatggttgaaggaatacaacaattggcatgaatccaatccattccaagcaacaagctgtaggaacccttcccatcgatgacaaagaacgttgtaggtatagttttactgccgacggttagttccacattcaaaactcctttggtttctgatggattgccaccaaaatccttgagcaccatgtttgtcttgatgagatcttcagtgtttctgcccaacttcctgaatgtagcataaggcatagaattcactgcagccccaccatcgaccatcatcttggacatcggcttcccattgacctagccatttatatacaatggtttaagatgccgattctctgttccttccggcttttcgaagactgcttgctctggtgacaaaatcaatttagccggttcttcttcaacttcgtcaacatgggcttgcttgaccccaaattcagtaggcaacgtgaaaaccatgttaaccgatgtagttacaaaacttttccctttagccaatctctttgcttcatcggctacaggagcttgattcttaacgcgccactcctgcttcggctttgttttttcagtcgatgattgatttcttgctcaacctcctaaaatcattctctgttcctcaacctctgaacacttctcttttgattctttgtaaagataccagaaggacaccattgattctgcatgtcttcattgtcctcttggttataatcttggttcaccgggcccaacctttgatgaacaggaactcttgtttgctttagccgattgcttctattacacgatcggcttgaactttctacaacattaccgcacccaggacagtcctcgatagatggcagcctcttgcccaattcttcagccgatgggattgtatgaccagcaggaagttgaatctgtttctctcggagtaacaaatcaaaaatcttatcagccttggtaatatcaaagtcatacctctccacttttccagaattctttacccattggcatggtataacctttttgcttctcacccattctatctcagagtcatcatcatcatcatcatccgatccatatatgtaaggacagacatgattaacctttttaaagttcttcctgacttctgcaaacctctgttcatgcaaggttaccttctgtccaagatgtgacaggctatcaaagtcttgagacgagaatttctccttgatcggagcaatcataccctgaaaagccaaatcggctaactgggcatcaattaaactcaagctgtagcacttgctcctcatctctctaaatctctgaatatactcatgcacaggctcatcatatctctgcttgatcgctgttaaatcggacaatttcaactcatgaatctcactgtagaaatagctatgaaaatgcttctccaaatcggcccaactgttgattgatccacatggcaaagaagaaagccaagtgaaagccgatccagacaatgacaaccggaacaacctaaccctcaaagatccatgataaaaatcggctaacgcgttcataagttgacatactatcctggcctgagaatattgaaaa

SEQ ID NO: 29041 - DNA, 1045 bp, Oryza sativa
ctgggtactgatggtgcagctgcagacggaagtggtacagacattcatgaagaaggagatgaagaagagcatgacatgtttgtcccatctccattgggcggtgaaatggttgatgtggaccctgatatgctgcaagatatgttacgtgacgttgatgacccagctatgaacgagagagattccatgaagttcagcaggttggttagtgactcggagactcctcctatacgtaggatgcaagccaaaacacaccaaattatcagcaacattagacctaatgaagttgaaggctagtaatggatgatcaaacaagagttttacagaacttttgggaatactgaaggacatgcttctcagaagaacacattgcccgagacgacatatgaagcaaaacagtttctgtgtcccctagggttagaggtccggagaattcacgcatgtccaaacgattgcatattgtaccacaagcaatacgcggacttagatgcttgtcgtgtctgcaaggattctcgatacaagcgaaagaagagcgcgggcgagggaaagaagtcaaagtggggtggtccagcgaaggttgtgtggtatctaccaatcattgatcgtttcaagagaatatttgccaaccccaatgaagcaaagttagtacgttggcatgccacagagagaaggaatgacggtttgctaagagaccctgcggattcgattcaatggaggaatatcgatcgaaagcacaaagactttgctgccgaccccagaaacatgatgatatgtttgtgtacggatggcatgaatcctttcggagacatgagcagttctcacagcacttggccagttctcattgcgaactttaacctccagccatggttgtgcttcaaaagaaaatatattatgttgtgcttgttaatccaaggtccgagacaacccggcaatgacatcaatttgttcttggagcctgttatcgatgaccttgagattctgtggaaagtgggtgtggaaacttgggatgcatatggtcaggagaacttcacactacgagttctattgt

SEQ ID NO: 29042 - DNA, 640 bp, Oryza sativa
cttcctaggtgtatataggaagtcaaaagatacacatgaagcacgtaatgatctcaagcatatggaacaacgcggtggccatcatccggaacaaaagaagaaaggaagccattacttgagtaaggaagagaacgaaagtatgtttgaatgcctagagagcgtcaaggtaccgtctagatactcctcgactacaatgagaataataagtatgaaggagaagaagttcacaaaactgagcagctcacgcaaaaaattgctagtagcctagtatagccctgaccatgtacaaccttgctacgtagctttgtcagaagtgaaagtaaattttattgcccatccataaagaaggcccatcaacccgcggggggaggggggatggatctgctgccctcgaactccgcccaatgccgtcgtcaccctctcggggccaggggtggctgatccgccctcccgagggtggcgccgtcggatccgctgtcgccacccaatgtcgtggtcacctcttatgtggccaagggtggcagatccgcccctcccgaggatggcacggccagatccgtcggcctcgagctcatcactccggccagatcccatagcctaggacaccgccgttgtcgcccgataccatcaccgccgctcc

SEQ ID NO: 29043 - DNA, 2656 bp, Oryza sativa
ctgttctcgcttcctcgcttctgatctcttgcgagcacgagagattggaaggagcagtgcctccgaaaccacaccttcacctgagatctgcaccgggtaggcggatgatcaggttttttgggagtgcctcccgcacgactgctcgccatgtctggagttgccgccgccgctgctggaggaaatggcggaggtggtgcgccgccgccaggagctggagccggtggcgcgaacaacaacatcaacggaggcaattctgcctcataatccagcggagggccattctcggggtatatcattctcctgttcctgttcccactgttagcgctttactgctatgtgcgctatgttcctgttcctgatattcatgatgcctctagcatgttattgcgttgctgtaatgttcctgttcttcacattcatgatgcgcatagtatgctactggttatgttaagatcaacctacactgcttatgccatgattattgctttaacattttggattaaaatatgccgattcttgaccatatttccaacaatccaaaaacctgataggtcattttcggtagttggctttgctgctgcactgaaaccacatgcttttgatggttctaactataagagatggaaagcccgtgcactattgtggttgacagcgatgcagtgcttctatgtttcacgtggcaaatgaagtgaaccacctctttctcctgaggaagaggctaagttcgaggcatcggattgtctgttccgtggagcattgatcagtgtactcgctgacaatatagtggacgtgtacatgcacatgccttctgggaaggacatgtgggatgcacttgaggccaagttcggagtttctaacgccggcagtgagctgtatgtcatggagcagttctatgactacaagatggtcgatgaccgttctgtagtagaacaagctcatgagattcagatgctagctaaggaacttgagaacaacaactgttagttgccggacaagtttgtggcgggtggcattattgccaaattgccaccttcttggtcggactttgccacttctctaaagcacaagagacaagagttcagtgtttctgatctcattggctctttgggtgttgaggagaaggcgagggcaacggacatccgggaaaaaaaggttgagggaggttctagtgccaatatggtacagaaaaagaaccctcatgcatcctacaacaacaagaaagtcaagcctgatgtcaaacccaaggctgcaaccaactttaagaagaaaggcaagggaaaagcaaagggagactgctttgtgtgtggcaagtctgggcattgggccaaggactgtcctgagcgcaaagacaggaagtctgccaacatggtcattggcgagggcggaggaacatcggggtacggtaaaatattacctacagttctctctgtttttcactcacctgattggtgggtggacactggtgctaatattcatgtatgtgctgacatttctctgttttcttcttatcaggtcgggagaggttcctccatgttgatgggaaacgggtcgcttgcggctgttcatggtattggtacgggcgatcagaagtttacttcgggaaagaccgtgcagctgaagaacgtgcagcatgtcccttcaataaagaagaatcttgttagcggctctctactttgtagagaaggttttagacttgtgtttgagtccaataaatgtgtcgtatctaaatatgggacttttgttagaaaaggttatgacagcggaggcttgttccgcttttctttgaatgacatgtgtaataatcataatgttgtgaaccatattagcgagaatgatgagtctaatgtgtggcattcgcgactctgtcatgtgaatttcagttgtatgacgcgcttagctaacatgagtttaattccaaaattcactttgatcaaaggttccaagtgccatacttgtgttcaatcgaaacaacctcgcaagcctcacaaggcatctgaggcgaggaatttggcacctctagaacttgttcattccgatttgtgcgaaatgaacggcgtgttgactaaagggggaaagaaatatttcatgacactgatagatgattacactagattttgttatgtgtatatattgaaaagaaaggatgaagcattgcattactttaaaatctataaagctgaggtagaaaaccaacttgaaaggaaaatcaaacggttgaggtctgatagaggtgaggagtatttttctaatgagtttgcatccttttgcgaagagtttggaattatttatgagaggatgcctccctattcaccccaatcaaatggggtggccgaaagaaagaaccgtactctaactgagatggtgaatgccatgttagagactgcggggctttccaaggaatggtggggtgaggcagttttgactgcgtgtcatgtcctgaataaaatttcaatgaagcataaggaagtaacaccattcgaggaatgggaaaggaagaaattaaatctctcatacctacgaacatggggctgtttggccaaggtaaatgtacctatagccaaaaagcggaaacttggaccaaatactgttgattgtgtgttccttggttatgctattcacagtgtgggttatagattcttaatagtaaactctggag

SEQ ID NO: 29044 - DNA, 1073 bp, Oryza sativa
ttcgagctcggtaccccgattcggaggacaccgtcgacacgggcaccgtcaacacatcccgtgctagttttgaaagcacaggatatgttatcttgtggtcattccaccacccgaggacgttgaaatcttgtgcttcgtggtggatggcgtcgctgtccaaataaccggacaactcttcggccacaacatgcgaagaggcgtctccacttgtagccgacgaactgccaccaccttggattgaacttgaagacgatccaccccaaatcctaccccactgtatcttcttcttacctgtagtggggataggagggggtctctgctggcgaacttcctgaaactttacttcatatcttccaaaaacctcatataatttacgtctaacctcagtataaaaagaactataatctacggggacctatagtatcgacctccaggcataaaatagcagacaatccccttaatttacacctaggatctaaaacaaaagcaagagcatacaacataggtatatttttccaatatttcaaatatttttgtttcatgtgaaagacaggttcagttagaacgtcatcattttcgtattctttaaataaagtagcaatttcaagaaggttgtgcaaaattatattagcagttggataataaacttgtgacaaagttagagtacaatcataaaaagtttctagaaattggtaaaatttttggacaattgcccaaacatgctcgttcagtactgaagacccgtcactgtttcttgggccaccacgtgactgaacaaaatcagaaagtaaactactataaggtaaaacaacttttaacattaaatacgttgcattccaccgatgctctgcatcggtggcaaacttacgagctttcacaccggccgcattgcaaaacctcttccatgcagcaatccgcgggttagaagcagttaaccacgcgattgcttgacgaacagcatcgatgtggtcacctaccctcttcatgccagtcttaacaatcaaattaattatatgacatgcacaacgctgatggagtagaaaagattgagcatacacacaaaataaaggttg

SEQ ID NO: 29045 - DNA, 1719 bp, Oryza sativa
taaaacaacttttaacattaaatacgttgcattccaccgatgctctgcatcggtggcaaacttacgagctttcacaccggccgcattgcaaaacctcttccatgcagcaatccgcgggttagaagcagttaaccacgcgattgcttgacgaacagcatcgatgtggtcacctaccctcttcatgccagtcttaacaatcaaattaattatatgacatgcacaacgctgatggagtagaaaagattgagcatacacacaaaataaaggttgcaatatttcaatagccctagaattagcagatgcattatctagggtgacagcaaatattttatcagcaagattaaattcattaattacttccctaattctttcagctatgttttctcctgtatgtgagacatctattaacctaagccctaaaactctcttttgtaattgccaatcatcatcaacaaaatgaacaactacgctaagataatcctctctagctctactactccatatatctgaagtaacactaacagagaaagtacatgtactaaacagttccttaagtgcagttgcttccttgtgataaacattctctaaatctctagttgatgtttgcctactcacagctttaaacctagggttatgagattgctgaatgtaatgttcaaaagcaggggactccccaaagttcaggggtaaatcttgcctggcgattaaccggacaagagattcccgagcaaccatgggatcgtactcccaactgcgtaccgtaccgtctgggtttaccataagttgctgctgccggagttgtattccttgcttcttggcacacgactccgcatggcgcttgaggtgacctgtaccaccagaagaacgagcagataaaatttgcctacatattctacaacgggctttcgatacctcccttccgtcggggcaggtttcctttatctcgtcgaagctttgccacacaccagaggttctcgatctcttcgagccggtgtgtgtcgaaacacttccgctcgcggttccggaaaatccttccgaagctgtctccgcctgaaccggtacctcctcaacgacagccgtatgaaccggtacctcctccacagatggtggagttggagccgatccggaggtaccgtcaaaccccgacatgtagttggggtcgaaatcacccaaggtgaacgacggcgactggtatggaaagttcggatccattctgaaaatttaaaccgacataaacaaattttcgaatatttattgaattcacaaacacaatacaaataatacacaaatttgaatattacttacatctttccaaccgcgagctcttcaaacctctgcgatcaaactgttgaactacgaaactaattttgatttttgacaaaatttgagcaaattttgtcaaaataaaaaaaaatgcacacttgagaacaaagagagcacttaaaacacttgagagcacaagatgaggagtgtgggatgaggagaaatggctggggttcatgccctatttatagggcgaaatttgagattttttggaattttttcgaaatttttatgaattttttagcctcccaacggttattttcaaatttgaacggtcaaatagccgttagtgccacgtggcgccttcccattcgaccgccgcccgccctgtccgcgcctgacgggccgccggcgtgccgtgccgtgccgtgccgcgggccgtgccgtgccggcccg

SEQ ID NO: 29046 - DNA, 2325 bp, Oryza sativa
  unsure (1)..(2325): unsure at all n locations
cggccatttctgccgccaccgcccgatcggctcggggccgatctggaccgtcagtcccgtggaccggtggtggaccacccgcgtggtcccgccccatggtggaccggcccccttgagccgctgccgagtggggccgtgtgccggcgcccttcccctctcttccgagccactgaccagtgggacccgcctgtcggcgccgccccccctgatgacgtcagccctgggaattatggcgcaataaattatataagggctttctgttatagtaataaacacagtgaatcttctaaaattcatatgtaattcatccgagctccgtttaagcccattcaagtcgcagtaaatcaagaaaaatgtgtagaatccattaaaaatggttttgttctctgtttcagtagtcttatagcctgtttgcattgtttgccttgtatgtcgttagattccggctcttccgacgctccggtgtacttcgaaatagtcgctgaggttccttcagcagcagagcaaggcaagtcatacttgtcacttgatcatgttgatcctacattgcaaatgttctattgttttccttcaaatactgcatttgttttgcaataacactatgggatgtttacctattgttacagccatactattttggtaccttgctcctttgttagctcgggttataacatgaatagattttggactaggagttgcttagccatgcttagttcaactagcacacaatggggaaatctcatttaaaatatagactgtaggtttatatgataatgttggattagtaccaccgctttggtgttagttaattaaaatgaatcacatggtgggctgtgggtgcatagttctgctagtcgcacccatggcaagtaaggaccggttcgcgggaaaccctggaagaactcctcgtacttaccacaagccagcgtgggcaacggctgggcttgtagtgtagcttttctctagctgacgcatcctggcaagggtgggcgtgatggagcggggtgggccctgcgacggcctctgtcgcttccgaattcacttaggtatgagaggggcctgcccgtcgcccgctggggacgggggtgaaacctgaggtgtggtgtacttggctagagggggttatgcgaagggtcctgtcacagtctctttccgatatgtcgtggtggcatgtcggcgcacggaaacgtgtcgtgggctgtgtcttggggtacagttgtacacctctgatcagagtaaaactattcgaatagccatgcccgcggttatgggcggtcaaccagattcaccgtgattagactcatcttagtttagtctaatgaaattggatggtataggtggatggttgggcctgttgcaacgtggtatagcgttggacagtggatgattaatattgattaattattacaactgtttaaatctttcaacttctgtttataaatgctcgctttatgcaaatgaaccactctagctctcctttgataattccctgcatcatacccctattccggtatgacttgctgagtacagtgggtagtactcagtcttgctctattttttttcccaaccccagagttcgagtatgtgtcagatggaggtttctccgagaagtaggcttcgtccgtgccatcgagggtgcctgtggaggttttaagggggggctctcttttttttccccggggtctttccccccgggatgcctgtggagtgtgttcccgctgagttcaagtcaaggctaaactcccggtgnctttcgtttttccgctgcatttatgtaacacttttagtgtgtttgtaagacgtggatctgaatgnnaacatngnnnntccngccccccggccgntcctggacgggggttttaatgcacattctgcttggaattctattcgggaatttctgggcgtgacagcctaccattaactgcgtatcgaagtgaaaatgataaagaaattaataatatttttatatgaagtcgatgatcaaagataaactttctgccaaagttatatttcttgacaagatctacaacgtggttgctgaacaattttttatttgacatagtttatgtgtgatagaagttatcagatctaattgataaatgctttaaaattttcatatgaattgaaatcgacgcaaactctatatcaaaattatacagtaagtaagatatataattttataattttatagttgataaccttaacatttacatttgaagtcatcaccttaacagcacagccaggatgctgcaacaagtcccaccgaacagctccacttcaggtttgtcttanattaacgatcgatctatagttttaccatatata

SEQ ID NO: 29047 - DNA, 3968 bp, Oryza sativa
  unsure (1)..(3968): unsure at all n locations
cgagtttcagttgtgaaacattaaccgtgccaatcacaagccagcatgggcaacgactttaccttttatatagcatgatttattgcggggcaccagactgagaagtggcggagataagcccacgggggtcgctggggagtccatgccttgtctataaggaggtgattatgatccaggtacggtgcactgctttgagttgtgttgtgcgaagggtactgtcacgatttccccctttgtagtgccgtggtggtacttcaaggcatggtaacatgtgtggaatcatgtcttgtgggtatagtggtacacttctagccagagtaaaactattcgaatagccgtgcctgcggttatgagcgggtataacaatgtctttcgtgttagtctcacacttttcaccataataaatgatgcgataactggtaataatttgatttgctcctggtttggaatggtacattcctggttcggagatagatctgtacagccgggtatggttgttcaggatggttgggcctgtgcagcatgggtgtgttgttcagtgttgattaatattgatgattaattactctgctgttttacaattctcatatgtttgctaaatgctgcattcgcaaatgagccctatattacgccattctttggtatccttgtgcacttgcatatttgctgtgtggcttgctgactatgtcatatgctcaccttgcaataatcaatcaaacctcattgaagaaaagttgcgaaggagaagacgtttggcttataccccagttgagctgcccgtgggagtggagccggagcttcgctagaccgtaattccgctgctgttttctcctttcttttgtaagtatgtaatgttgtatttttgatgaatctgtatattaaattgtcagtttgtgtacctcggttgatcctaaacgagttttttaacacacaaattagtcggttgattcctaaacgaggattttaatacacaaattagttcggaaattactagtgaatttctgtgcgtgaccgtgcatcgccacccttttactttcgttttgtttcgacaagttcttgctttcgggttgagctgcatcggttttgatcttcaacaagaggtaaaacttgttatgggcgcttgcggtctcgggattagtgcttccatctttatgatactctaatcttgtttatgtaatttggcgagtattatatgtcttacataatctctggcgatatcgctatctaatctacaatcggcttacattatcggtagagggcagctgattaggttagatatcgatgttgacttagattatataaggtatccacaactctatgaaacttccaatggcttggntgtcttgatattgcccttctttccatacttatagctgcatcagttgagtttgatcttataagtcgtgattagaatttcaatctctagcctgcttcttggttaccgattagggtagtatcggggtttcagccgatctttcctgatttaactatatttactctatatgcttcgttgatatgttaaatctgccctttatgttaagatctcgttgcatttgagtatattaggcctttgtttgatatattctacttggtttaatatcttaatatagagtggtatcggagtattagccgatacatgctagatctatctgatcggctatgctatgaacatatatagtcccattattaatatatatttcgatctaagtgatttatactgtctcggcatggcgatcgatctatcccaatcacttgatttaagtatatatcgatataaggagtatatattgttaatatctacagtcgttcgagtagatttagttccttcttatttattcatgactgccgatcgatacatatatgacatcggctcaaagataaaagatatgtcatcagcgctcagccgatcggctatcgtttataggtttaaccgcggtttctttgtctttgtttcttgttgattgcaggatcaaatgaactggcacactagcatacccgaaggcgagttttggacctgcactggagttaaacagatctcctaggcctcgtgttttacgtcaacacgcttttggcacacccagtgggaccgatcagaagtcaaaatcacaacagcagtttttcccatggccgagaaaccgccagcatcgccatcctcggctggtgaacttggttctgttaaagctaaggtccacaagctgggtctatctgaggttgatgaagccaacattgtgctcgtcactatggacaaattgacacctgaacagcaaaaggatcttgaggtaatgatgcagcaagcacggaatcagttcttgagctcattcacgaagactcgcaagggaacacttgttcagaagtacaaagtaaaagtaattgccgatgttcctgggacaggttcttctaaggttggagaagtgaaacaagctccagatgacgcggctcaaccgagtattaaaggtgctgcagatgactttcaaggagatcaaggtgatggctctcaagaaattcaaggtgatggtgttcagggagttcaaggtggaggtcttaatcatgacggcaatgcagcacaattacagtttaacaacttccaggatcaggttgactatgccgtgcactatgctttgatcaatcaatctagaatattagtcaacactttgtcaaacatggtgaagacaatggttgatggttcaatggctgaatatcaggctacaggacaagtttatctactaggaggggtattcccgaattatcggccattagtcactgataatcagccagttgttcaatcaattcctcttaatgcaccatcggctcagccggcggcaccagtatcggctcctgcacctgctgcaccatcatcagcgccaggtcaattagtgaatccttgattgttggtgagagagcaatcacagcatagtggacagaatgtgaatcggctaaagcaagatcaggttgcagctatgttcttacctcctcaacctaccgttgatccaacccagcagaagtcgattcagcaaataccaccaaggcagcaagttctgcagtcgattcaacaaacgccacgaatccaacaggttgtgtagccaattcagtagacgccacgtaggcagcaggttttgcaaccgattcagcaaacgctgttaaggcagtaggttgttcagccgattctgtagcaaggtttgatgaatgcatcgactgggtttgtaacacctgacaatcagccaaggcagcatgctgctaatcaagttgtgccagagcacttggttcatcatgtacagccagatcaaacgatgatacctcaagttgatcccgagcatttggtgcgcaatattcagccgaagtttcaaaattaccaggggggcaatttgaattatcagtatcagcctccttcaccgcaaatttaatatcagcagggaggatcggctcaaccccagtttgctcctcaatacaatcaattcgaactcattccacaacaacctcaaggagtacctcagcaacgaccatgggccgatatgattgcggatgtgatgaaggagcagtttgggcttaagccgaaagacgctggaaacttatatcggcaaccttcccctaaatggtttgagaaagtccctctacctaaccggttcaaggttccagacttttcaaaattctcagggcaggatagtatgtcaacttatgaacacgttagccgatttttatcatggatgctttgagggttaggttgttccggttgtcattgtctggatcggctttcacttggctttcttctttgccatgtggatcaatcaacagttgggccgatttggagaagcattttcatagctatttctacagtgagattcatgagttgaaattgtccgatttaacagcgatcaagcagagatatgatgagcctgtgcatgagtatattcagagatttagagagatgaggagcaagtgctacagcttgagtttaattgatgcccagttag

SEQ ID NO: 29048 - DNA, 721 bp, Oryza sativa
ggcacacccagtgggacccgacaagaagtcaaaatcacaacagcagtttttcccatggccgagaaaccgccagcatcgccatcctcggctggtgaacttggttctgttaaagctaaggtccacaagctgggtctatctgaggttgataaagccaacattgtggctcgtcactatggacaaattacacctgaacagcaaaaggatcttgaggtaatgatgcagaaacaacggaatcagttcttgagctcattcacgaagactcgcaagggaacacttgttcagaagtacaaagtaaaagtaattgccgatgttcctgggacaggttcttctaaggggggttttttttgggggccaaaaaaaaaagaaaaaaaatgttttggaaaaaaccaagctccagatgacgcggctcaaccgagtattaaaggtgctgcagatgactttcaaggagatcaaggtgatggctctcaagaaattcaaggtgatggtgttcagggagttcaaggtggaggtcttaatcatgacggcaatgcagcacaattacagtttaacaacttccaggatcaggttgactatgccgtgcactatgctttgatcaatcaatctagaatattagtcaacactttgtcaaacatggtgaagacaatggttgatggttcaatggctgaatatcaggctacaggacaagtttatctactaggaggggtaccgagctcgaattcgc

SEQ ID NO: 29049 - DNA, 817 bp, Oryza sativa
ggggtggccgaaagaaagaaccgtactttaactgagatggtgaatgccatgttagagactgcggggctttccaaggaatggtggggtgaggcagttttgactgcgtgtcatggcctgaataaaatttcaatgaagcataaggaagtaacaccattcgaggaatgggaaaggaagaaattaaatctctcatacctacgaacatggggctgtttggccaaggtaaatgtacctatagccaaaaagcggaaacttggaccaaatactgttgattgtgtgttccttggttatgctattcacagtgtgggttatagattcttaatagtaaactctggagtacccgacatgcatgttggtacaattcttgagtccagagatgctacattctttgataatgaattttccatgaaacatacacctagcactttgcaccgatagaacacaatgatcaaacgcctgagaaaaatcctgaggaggacaacattgtagacactcacaagagtaagagacaaagggttgcaaaatcctttggagatgactacattgtataccttgtggatgacaccccaagaaccatagaagagacatattcatctcctgacgctgactactggaaggaaatagtacgcagtgaaatggattcgattatgtctaatggtacttgggaagtcgttgagcgtccatatgggtgcaagcccgtaggatgcaaataggttttcaagaaaaagcttaggcctgatggtacaattgaaaagtacaaggcaaggcttgtggccaagggttatacccaaaaggaaggcgaggacttttttgacacata

SEQ ID NO: 29050 - DNA, 504 bp, Oryza sativa
catctacaggctttgttgtgaacgaagctgacaaatgtgtgtactatcgctgtggtggggagaaggagtgatcttgtgcttatatgtcgatgacatattgatctttgggaccagccttaatgtgattgaggaggtcaaggactatctgtacaagagttttgaaatgaaggatttgggagaggctaatgttattcttaacatcaaactacaaagaggagatgagggtgggattacacttgtgcaatctcactatgtggacaaggttttgagtcgctttggatatagtgactgtaagccagctcctactccttgtgatcctagcgtgctattaaggaaaaaccgaagaatagtaagggatcaactgagatactctcaaatcattggttcattgatgtacttggctagtgcaacgaggcctgacatctcatttgctgtaagcaagctgagccggtttgtctcaaatccgggagatgatcattggcaggctctggaaagagtaatgcg

SEQ ID NO: 29051 - DNA, 1000 bp, Oryza sativa
gtgggtattgtcttggtttgcttcaaaatgaagacgagatttggctattttgattcttccgttcgatcacttgtgtgtaacgtcatttttcttttctgtgtgtattaggtttcctaagcatcgactgtggcctggatcaagattccagaacagacagcctggttggcggaatcacctacgtctccgacggtgcgtacgtcgacgccggcgaaaatagaagggtgaccaccgtgtacaaggacgactggaagggccctcgctaccagacactctacacgctcaggagcttcccaacatccgttaccggtgaacggagctgctactcgctacccaccaaaaaaggggacaagtacaatgttcggctggagtttctgtatggcaactacgatggcctggacagcgcatccctgacgttcaacctgacccttggggtgaaccactgggacaccgtgatcttggacaccaccatccactacggttataaagcatacgccgcggtgttcgtcgcatgggctatgtcggcgccggtgtgcctggtgaataccggcggtggtacaccattcgtgtccacggtggagctgaggccgtttgaaagcttggcctacccgaccgacaatcagtcactctccctctatgaacggaagagcatgagatcaggtgctgacgtcgatataataaggttggagcactactactgtatttcctaatttccggccgtcgtagtaattaaggagcagctcatttaatttgcaccttaatataatgtacaaatggattggagaagaacctgtatattctctgattttactaactcctaattttctatatcaacctgtccttttgttccttgtggtgaaaaatatttacattaaggataaagtttgatcagactttaatttttataccctaactattaattttacagtaattaatggaagtgctcttggattcgtacgtacactattttttggaaagcatagaacccttcttatataagggg

SEQ ID NO: 29052 - DNA, 2262 bp, Oryza sativa
tggtgaataccggcggtggtacaccattcgtgtcaacggtgaagctaagcccgtttaaagcttggcctacccgaccgacaatcagtcactctccctctatgaacggaagagcatgagatcaggtgctgacgtcgatataataaggttggagcactactactgtatttcctaatttccggccgtcgtagtaattaaggagcagctcatttaatttgcaccttaatataatgtacaaatggattggagaagaacctgtatattctctgattttactaactcctaattttctatatcaacctgtccttttgttccttgtggtgaaaaatatttacattaaggataaagtttgatcagactttaatttttataccctaactattaattttacagtaattaatggaagtgctcttggattcgtacgtacactattttttggaaagcatagaacccttcttatataagtattatttttcaacataactcatttcctttttgatggttgatggtcaaagttttatattgtcacaaacatcaaattttaggactagtcaaatatttacgaccagaggaagtaagtattcatcgtcaatttgtttttcaattgcatgtttcctttcatattcaggatttcataaatacaggtttcctgatgatcagtacgatcgttattggtatgcgtgggaattaactggaaatgacccttattcaaacatttctacccaatcagccatcgaactgaataccacatttatggtgcccttgcgtgttctccaaacagcttttgtgccggttggtaactccaatgaactagttttacgttcaaagagaagagacagacttcccggtgatcacttggtgatcctgcacttcgccgacttccaggataacaagactagggagttcaccgtttcaattgacagcggcatgcaaagtggaccgatcagtccaccatacctgaaaggttggtctatcatcaattggtccagtgattctgaagatctgtccatcaaacttgttgccactgccacatcttctcttcccccgatcctcaatgcttatgaggtctacagtcgcatcatccatgaatatccaatgacgttctcccaagactgtaagctctatctgtctctaacaatgtacactaattaaatatatcagttgggtttcttccatgtatttctttccatatgctagttgatgcgatcatggccattaaacatgagtacggaataaggaagaattggatgggtgatccttgttatccatctaattctgtttgggatggtgtggaatgtactaatcctggtgatgataaaaccatgaggataatatctctgtgagtattattcggaatatttgcacgtgctatcgtacttgctttattgtatatagttggtacctttcatttatgttgtattgcttgaaattattatgcagtgatctctccaacagcgagttgcaagggcagatatcctataatttcacattgtttagtgccctcaagtatttgtaagtatacataaaattttcactgcctttcattagccacatctgaaattcctgactgacattaatggggatagttttatgctatttaaaatcaccggaaaacaccaactaaatgatgagcagttgcattctggtgcaattaaaattatataaacccatcctaactactccctccgtcccattttaagtgcagccatggtttccgtgtctaacttccatcgtccgttttatttgaaaaaattaaaagaacataagtcatgagtaaagtactattcatgttttatcatctcataacaacaaaaatactaaataaaaaattttaaataagacgaacgatcaaagtttagcgtagaaactgatagttgcacttaaaatgggacggagggagtaggagtaagaactagtggaggtttattgcatcgcatgtactatccatgtggtgccacatcttcgagagaatgagactagcagtaatcggtttcatatgtagttgagggatgaaaacggaccaaggctacagttgcatgaccaaaagtaggcttttctcttgtagttttaaatttgaaagacacatatggaggaatctttctttattacatatggggcaatctgaatctgaaagtagagcaagaataatatatattatatggtctataatatatcagaattccttcaacacatgtgcttagctttcaaaattcgtagatatcacaattgaaggcatacatcaacactgtatccgtccaactgtag

SEQ ID NO: 29053 - DNA, 1686 bp, Oryza sativa
tgtgactattgtttcgccaagcgaggtgaggcgcagtgggtatgaaggttcagatttagaaataagtatcgagatggtttatttttaaatttaaaattttaatgttcaaaaaataacaaaaattcccaatgaaaagcgtgtgactatacttccattgtctgttgcataataaccttttacctacctaagagggtggcactggagagcacaatcatgtatagttctcttaacaatcatgtatatgtactttcaaagtgcaagtcacaaaggcaatatgatacatccaccgctctagtgtatttataatctttgtccttcaacatacaccagaaatttatggcacctcacaaaagggaaaatataccttctgctgcagcctacttatcgacacatctccttttacaattgaattgaagtaaaatgaagcactgaagtttaaaagaattctccttttacacatctcatttttgccataaaggaatttttttatgtgagattgccacttggatgatggaatatacctgtttacttttaaaaaaaaattcaagcgaattatttcatgtccgattggcactgccggcccttcatataaaactttttagtggataaatttgtttgcagattgttaccaagtcaggatgtctattgtttaatgccagattgtatcccactttatacagaaacttgtcatgcaaccaactaaccgggacaattccagactaccttcgcaaaagcaatggatcaattgttttcaggtgtgcctactttcattattattgatttcccttttagcattttccagattgtggggttgttcttcctgtaatctttgggcaccctaaaagaaaatagggaagggaagtgatactatgcttctcaaataaaaacctgcacggaaattaaagcacatcaatggtggatattaaaagtggattaacagagtaatccccccattagcaagggggcagttttgtacttagaaaaaactgagcccctatccatatcgatcgagcgatcgactcgcggcggcagtcaatttccgacaattccacctctccgctgccacccatgcatcatgctccctgcaggctgccaagcggctccgcgttcggggtggcagcaaacctctggtgagtagggatgccagccgccgtcatcggcgccgtgcgccgggacggtcgctctgctcggctgttgggaatagtcccatattacttatttagggaaaggccagtcaaggcggtcaggagttcgattgtccttgagggttgatatttgcttgcagagatgcagttgattaatgtttagaaggaagaatcgttcgaaaaatgcttagaatgaagatagcctcttatggttgtgatcttgtgggatgttctgctcaatgtggtcgtccaagtgctggtttagttgggggcaaagctggatccgaacgtgaagctcctccatagccaactgggagcgtgaggggtagcaggcgcagagacgtggaaggggccgggtagaggaagaggtgccgtcggggcaggtttcctttatctcgtcgaactttgccacacaccagaggttctcgatctcttcgagccgtgtgtgtcgaaacacttccgctcgcggttccggaaaatccttccgaagctgtctccgcctgaaccggtacctcctcaacgacagccgtatgaaccggta

SEQ ID NO: 29054 - DNA, 4639 bp, Oryza sativa
caccccccccccccctccttcctctcctctaagtggtttcttttttttggtaccgcattactttccatttagtaaatttatgcacataaagtttatacacctcaagtttacacatataaagtttagagacccaaagtttataaatcataagtttatatatccgattctaatttgaatttgaattcaaatattttttatataaagtatttctatacatctaaagtttatacacctaaagtttatagacccaaagtttataagtcaaaagtttatatacccgattcaaatttgaatttgaattatatctgattcaaatttgaatttgaattcaaatattagtttatagacccaaagtttataagtcaaaattttacatacccgtttcaattttaaatttgaattcaaattttttatatatagtatttctatccataattttttctaacttttttttatttttttaaattttatggtgtgttgtagtaggaagagaagaagggagaggaagggggagaagaagagtgtatagggggggagggacgggtgttcgctagaagtagggggaagtgatcacccgcccactagcagtaccttgatgctcgttgccttggtaggtgatcgctaggagtagggggaagcgatcacccgcctactagcagtaccctgatgttcgttgccttggtggatgaactgccgcccgcgctgtgaatccatcgctcgatcgataggatcaacaagaatacgggctcagatttttctaaggacaaaattgcccctttctaatgggaattactctgctaatatcacttttaattcccaccattgatgtgctttaattttggtgtagatttttatttggcgagcataccaatttaaaaccatggacttattgttttatgtaatttcagctacgagtctgacggagatatgtgcaaaaaaccaataacttcgtcctcaagaaacagagcagctaccttagctgtttatgtagcggctccagtgcttgtagtcgccatgcttgttgtagcatatttgatctggagagccaaaagaaagccccattgtgtgtaatactataatctgcattgaaaaacacattgtttaatatctgcatttaatactgctaaacatgttctttctccaccagtttctacagatgattctcccacggtaccagaacagataagtcctccaggacattggacaaatcattgggaccatctacaaaaacctgagaatcgtcgattcacatatgaggaactagcgaagttcactgatagcttcaaatgtttaattgggcatggaggctttggaaatgtctattacggctgtttagaagacaataccgaggttgctgttaagatgcgatctgaatcatcgtcccacgggctcgatgagttcttagctgaggtgccaaatatagttactattatgtttaaccatagataaaatcaatctgttttcagtaaaaaagattcaatacttagaatgccatatatgtgcatgtaaacttagtcgcatccactgtgaggtttcatacgcatcaagatatttgaccatttgttttgtcccattacataggttcagagcttgaccaaggtgaatcacaggaatcttgtttctttgattggttactgctgggagaaggatcatttagcacttgtctacgagtacatgtctagtggcaatcttagtgattatctgagaggtttgtccattgcaatctttaagtattgaatatttgggaaatctgagggaggatactgggcatatacattacgtagaccaactagtcattccttccttacaacttaaatactctgcatgaccgaaccagctcacagcgaagccaattaactcatgttgcataacagtttgcagaactatgacaagtagtactgcttacctggagagtgcatagttagacattttgagaaaaaaaaaagactggagagagcatagttagtctctacctaaggggcttcatggccatcgcttaaactcactaaagatatcataatatatttagagcaatttttggatactaaaatgtgccccaccagtctattggttttttgaatagtagatgtgagtagtttgtattaaagccaaactattagcaaggcctatattaatatggtaactctatatgtaccaatcaaatttggctctaaattggttctaaccaaagatgatccatgcaactctaccctacaaaaaatttagtagtgcccaaacttgccttggttctaatagtgccagttatttagtacgacagaaaacaaaaaactacccttaattctgctgccctcaagtatagaatatgttaatcttgcattaccaattttttttcataattgctcatcatctcattatctagacatctgattaatacaacacaataataaattgtgtggatgtttaaaattgtatacaaaataaatgtttttgcattattgaaggtctatctcgactgattgtgcagacatagtaatatcaagagatggttgtatctatctaataaattattacattgattctatcctttttttaaaggaataatactgttttgacttgtcaattaacaccgctcccccccctctccccctccccccctcaccttctaattgcgtataagtaatgtatgaaggtaaaactagcatgggtggaaccatgaattgggcaacacgcgtaagagttatgcttgaagctgcacaaggtatgctacagtaagaagacaatggcaaatacgcaaagaaagaatctatgctatgccactgaatttatcctactttaacaatttgtcatcaattttgtctccctctataatataaatggcactgactttacagtaagctattgtggtggatacttttctgaaatgcctagaatgcccttcgagttatccaagagttgacaattgtttaacccactagaagttttgaaaaaatatgaaagtttttgtgtacttagccttcttacgaaatatagaatgtgtgtatattttaaatttttctttcatgttttttaaataataattttatatagtgtttgaaagaggaatcatatacacaaaagatagccacatcacaataaaaaaggtacaacatgtgaatgatgatatacataaaggaatattaacacgagagtattttgttgccatataaaacataaattatattttttaaaagttaatacgtgcaaaatgaaaaatcttgaaatatacacactgttatattatgcaaggaggctacataaaaattttcaaatttattcaaaacttctagtaggtgtaacctcttgtatgtcttgaagagcattttaggtattttctaaaagtatccacccctaatggtatattgtagaaaaaattgacaaagtcagtggcgtattataagaaagacaaaatcgatgacaaatcatcgaactaaactgatctcagtgatataaatggatttctatgttttatcgctcatctcttgatctaactgtagttttcttgtatgtagggctagaatatctacataagggttgtaacctgccaataattcatggggatgtaaagacaaataacattctcttgggtggaaatttaaaagcaaaaatagcagattttgggctttcaaaaacctaccatagtgactcccagactcacatatcagccattgcagcgggatctatgggctacattgaccctgagtatgagcttctttctacacaattaatgctaattttgtgctgtgtattcatatattttaatgattctattcaattttatccttaatcacttggtgcaatcattgtgtttaacataatgtgggccatttttaggtactacatcaccggtagactcactgagagcagtgacgtttacagctttggtgttgttttactagaggtaactagtggtgaacctaccataatacctggaaatggtcacattgttgaacgtgtgaagcagaagatggtcactggtaacatcagctcagttgccgatgcacgtcttggaggttcttataacgtcaactccatgtggaaggttctagatgctgccatgatgtgcacagcagatattgctgctcaaaggccaatgatgtccgccgtggtcatgcaattgaaggaaagcctggaattggaggaagctcatggggacatgggcgacatggaaaatatagcaagagataacaagttttcgatgtccatgttgggtccatcggcaagatgaagaattaaccattgcataactagctttggaacatacagttggttctctgcttcaagtctaaaataaaagaacttgtttgcatagatgatttgttatatatgtgttaagacacaatgatttatacagtttgtattcgtaacagagctgacagtaagcaattcgtgagagtaggtcagtcaaatgctgagaaggtggttgtttacaaccaaatattatgtaatagaatcctctgctattttataagctgtttgttttcaatgtgcaacagtaagctattcgtgtgagtaggtcagccaaatgctgagaagtaggtggttgtttacaaccaaagattatgtactagaatcctctgccattttataatttaaccgaaatgttaacacagcctcttgcataattcagcacaactgcaaa

SEQ ID NO: 29055 - DNA, 3456 bp, Oryza sativa
  unsure (1)..(3456): unsure at all n locations
taatagaatcctctgctattttataagctgtttgttttcaatgtgcaacagtaagctattcgtgtgagtaggtcagccaaatgctgagaagctaggtggttgtttacaaccaaagattatgtactagaatcctctgccattttataatttaaccgaaatgtttccacagcctcttggataattcagcacaactgcaaagggcagcacctcatgacagagctgaggagcatgtgaggactcgaccatcaagcaagaacgaatgatctcattattcccgtttgttttttttttgttggggggggcgggggggggggggggggncntnnatnnnnnnnttnntnctgntnnnncnntgcnntnttgaancctncnnntttttnngacatgttttgttgattttggttaggcgtagttgcttaacacattgcaaagtcaaggtaagaaaaactttacttacgtggatttcttcccaattctaatcatgtgagataggatatctcatacggagtacagccacccctacaaaattgatttttctggatgagaccctttttaggttgtacacggaccataactgcttccgcctacaaaaatccctcccacggggtcagttcaaagcgttgcatgcaaaataacatttgcatgcggcctcttaagagatccacctgtaaaaatggactaaccttttcaggcgagcctcctaagtggccacatgcgaaaatcagatttttacagacgcctccttaagaggtccacttggaaaaatcactgcaaactaaatataaaaaccaaatccactccactccacctttcctctcttatcctctcctcctcctcccccccctcccccctctctgtctccctctccctcttgagcacgtggctggagcagcaagcgggtcggcgtttggtcgcgggtaggagcgactagcgttggacaggagtggtagtgagctcggcgacatggaatccagcgtggaggacggtgtgagaggcggtggtggcacactcgtattgggtatcggtgccctcggctacggaatctgatgcggaggacagcggactcaggcggccgtagcaatgccctcggctagggattcggcgtggatgacgacgggagcagcggaagcaccctcgaattgcatggtggtgccctcggttgcgggatgcagagctcggccgcgggatttgatacagaggacggcgggagcggcggtgatggtatcgggcgacaacggcggtgtcctaggctatgggatctggccggagtgatgagctcgaggccgacggatctggccgtgccatcctcggcaggggcggatctgccacccttggccacataagaggtgaccacgacattgggtggcgacagcggatccgacggcgccaccctcgggagggcggatcagccacccctggccccgagagggtgacgacggcattgggcggagttcgagggcagcagatccatcccccctccccccgcgggttgatgggccttctttatggatgggcaataaaatttactttcacttctgacaaagctacgtagcaaggttgtacatggtcagggctatactaggctactagcaattttttgcgtgagctgctcagttttgtgaacttcttctccttcatacttattattctcattgtagtcgaggagtatctagacggtaccttgacgctctctaggcattcaaacatactttcgttctcttccttactcaagtaatggcttcctttcttcttttgttccggatgatggccaccgcgttgttccatatgcttgagatcattacgtgcttcatgtgtatcttttgacttcctatatacacctaggaagcccagcaagttgacgcaaaggttcttagtgaggtgcatcacgtcaattgcgtggcggacatccaagacttcccaatagggtaactctcaaaaaaaatagacttcttcttccagatcgccgcgtgcgcatcttagctctctataggttggttgctagctccctttccaaatactactttcagatctttcaccatagcaaacatgacttttccattgcaatgtttaggcttagtacggtggcttgccttctgttcgaagtactttcctttcttccgtacaggtggcttgcaaaaaggaatcgacgatggcccatgtacactaccttcctacaatgttttagatacgtactttcagtttcatccatgtagtgggtgtgttaacaacagaattttgtatcagatccggaaaagaaggaacaagatcgaagcggatttgatgaatgatcaagttgtatttgaagtcggaccgcgcatcggctgggcattgtatcggctggagacagaatagaagtttggcttagccaatatggcaagtggccgatacgatatgacttgggctcgtttcgggtctagattggaataaccgtcattgtcaattagagatagagctcgattaaggcaattgtatatattaattaggatatttaagtcgattgttagagatttggcaacagaccgccatgtggtcttgtttgtatcttatctttaggaaagtttgagtcgcgttcataatggactatgtttgtactcggggtacaaatatgaaccccagagcattgtaataagggaaataatccaatacaacttcggcgcatcgtcatccgtttttgttcttcttttcgtcgagttctctcgacaagaggtaactcgtctcaatggcttgtgctatcggggctactatgtcgttttggatgttatagttcttttatcataaccatctgttgtcatatgtcttagttaatttagtcttagtatctcaatttagctctatcggctggtactcgttttggtattggctaaatcgttttactagattagattaactaaggcatctactatcttgaaaagtaattaattcgttgattgtttagactttaggtttctttacctactttgagatgcctcatccctagtcttgtctagaaccctaaaaactaatctgaaattaattataattagatatagaatcagagtttcagctgatctttttttaatatacatgctactttacttgttttatgtatatttatcacttatatagatagatcaacatatataaatacatcaagtctagatcagtaatcagctaggtcatcaaacctggtaattgatctcaatttgatatactagtcaccaacccgtgcgttgcacgggctattgtcatgatattgtgtaattttaaaatatagccagttagatttaaaactttgtccatattacttataatttacttattatttatttcaaatttcgaaatattatgtgtttgatatgggtacaacttcaagtttattaattccgactttctatttaaaatgtcatgctttattatttgggtacaatggagaaaaagtgaaagtcaacgatatttcctattgtatatttatttaat

SEQ ID NO: 29056 - DNA, 532 bp, Oryza sativa
cacgtcgccggcgaaatcgggagcacctaggccgttcccgaccttcccgcccctataaaatccatccccgcgtcctcctcctcgcttttccttttgccgccggcctctcccgagctctccatcgcccccacgccgtgtaaccactcgccgccgccgctcccgctactccggccgccgctagccgctgctagggtcgccgccgcaccgcgccgtcgctgccgtcgggttcgcgaggccgaactccacctcgtccgccgctcctccgtcgagattcgtcgccggaacccgcatcccctcgcgctcaggtgagccctacccctaccgccgccttcggccatggatgccggccgccgtggttcatctccctccctctaatctctctctcttccttccttagggcatcccgaagctcgtccgcccgtcgccgccgtcttcccgtggctcgccgtcgccgttagccatcgtctcccttagcgccggccactcgcggtgaggcattcatctcctctattccccttcctctccctcctag

SEQ ID NO: 29057 - DNA, 1921 bp, Oryza sativa
gtacagatctatctccgaaccaggaatgtaccattccaaaccaggagcaaatcaaattattaccagttatcgcatcatttattatggtgaaaagtgtgagactaatcacgaaagacattgttatacccgctcataaccgcaggcacggctattcgaatagttttactctggctagaagtgtaccactatacccacaagacatgattccacacatgttaccatgccttgaagtaccaccacggcactacaaagggggaaatcgtgacagtacccttcgcacaacacaactcaaagcagtgcaccgtacctggatcataatcacctccttatagacaaggcatggactccccagcgacccccgtgggcttatctccgccacttctcagtctggtgccccgcaataaatcatgctatataaaaggtaaagtcgttgcccatgctggcttgtggttggcacggttaatgtttcacaactgaaactcgtgaaccgtctttaattgtcatgagcacgaccatcaaaaccatgtgctcacaatccaccattatcaagttttagttggcacattaattaattaaccaatcacgattagccatcatgagctacaattaaatatccatcattaagtgatagtgaaacattagttatcccaatcatgtgctaatgtttctaagcatggctaagcaattatatttaatatctagctgaaccaatatataagtccaactagtcaaattgtcacccatggtatcaaagaattaagtaagcaatgcaaagtggtcataacaaaggaataggttcacaccacccggtgacattccaaaaataaatgcatggttgaaataaatagagaatttaaatataggatcaacatgctcaaaggaattgtgtttgggatccgtgtgacttgccttgcaatattcggtcttcaattaatcttcttggatacttccaacgcactcacgaaccttcaaaacgacggaaacgacaagctaacctgcagaacgaggaaaacactaagaaactccaaataaacagtacatataaagtaaacaaacatgtagatcatgattttagatgaattagagtcaaactagtcccggttcggatgacttatctctatcgggtgtattctaaaagcccgtcacggatgactaatctctaatgggtaggactctatagcccgtcacggatgagttatctctttcgggcattagctaaatgtccgtcaaggatgagtttagaacaaaaaaaataaaatttggctttttggctagcctcaggcctttgctagccatgcccgctgcaaaaatgacagaagcatatatatacatagtcccattcccagcaaccccattcccagcatcaattcacaaattccatcacagccatttcatatagacccattcccagcatcacatcagccaattcacattcatattccatcatagcacagccaattcacaaaatcaaacacatatacattcacatccacaacccattcacatatatatcattcacatccatttttctctccaaaccgccgacatgcatcaaaacctgcaaaaataagttataaattggaacaattttatatgtaactagaaatgcaagtatacagagacgagctacctaggactttactctaaagaatataattgtattacaaagaatatttacaaaaatcaaatgtttgtcacatatgcattgcgaatgttctgccattgcgagacgagctacctaggacttcactctaaacatccctttcaatgacaagatatcatctagtatgaattgtgctagctcctctctaatgatttcgaagttgatttccggaatccttcaaataaatttctgcacgttcggcgccaacatcgtccacctctgttatggtgtagacttccttaggaattttattctggg

SEQ ID NO: 29058 - DNA, 2425 bp, Oryza sativa
attcacatatatatcattcacatccatttttttttttttaccgccgacatgcatcaaaacctgcaaaaataagttataaattggaacaattttatatgtaactagaaatgcagtatacagagacgagctacctaggactttactctaaagaatataattgtattacaaagaatatttacaaaaatcaaatgtttgtcacatatgcattgcgaatgttctgccattgcgagacgagctacctaggacttcactctaaacatccctttcaatgacaagatatcatctagtatgaattgtgctagctcctctctaatgatttcgaagttgatttccggaatccttcaaataaatttctgcacgttcggcgccaacatcgtccacctctgttatggtgtagacttccttaggaattttattctgggtcctaggattccggctcgatgtagtcccagtagtggtcgtcgacatcggttcgccttgctgcgacatgtcctatgtcactgttgtacggggagaaagtactttttaaacacaaaattgcatctacacacattctcttatggtttgatatacctctatctcctacctacgttcgcctcgtcgacgaaaccatagcatccatactcaatagggccggagcagccgggaactcgacctcgacatcagtataccactcgaacttgctatcaatgtcacttggtgctggccttggagttatattgatctcaatgctgtgcttgggccattgaataaagttcccacgtgcagccccaagggtcagaatctcgtcattaggtgggtgtaggatagtgtagccaacccaatcgggcttcactaagtccacctgaactttggcattgccggcttgcagctgcgccccatgcactcgggtctctgggtaggcttgaatgcttgaccctctgcggcaggaattgcaaatcctggtgtcaccctaacgactagggtacacgatgtgggttcctgcgattgattcattagtgtccttagtatatgttgcaatgtattgtggtgctaatataatatatacgttattaagttgtttctaccattatgtggtccaccgcggcggggccttcaggctgttctgccggagcctcagttgatgcgcagctgctacgcctctgcgtggggctcacttgtactacgggaccgggagtggcatcggtcgacctatccctgatgcgtgcctccatccgagccttcatacctaacagctcggcagtgacctcttctctaagctcttctttaagctcctatcgaagttgggccttaatgcgtgcagctttctgcgccttggaaagcttgtgcttcttgtactgccacgcatattggggaaacccaaacttccatggaacattggagccaatgccccttgttcgtccacggtgttcttcgtttcccaatgctttcgtgaggatgtcatcctcgcgtttttgtgagcaaacctcttgggaggcctgtctctcagcattcagttcgacctagagtacagttaggatgcgttagacgaacaacaagatacaacataatgaaacttattctatgtgttcaacatacgattttctggtacaccgcttgatcttcgggatttgggaacgaaagagttccgtcactattcttcttcacccttgcccttgcccagttccttgcccgctagaccgggatatcagcaagcactggttgggtgttagattccgctgtagcttcatcctccttgtcccattctgcctgtttccccgcgtagcctccggtgccaagccggtgcaggtgaaggttccttgcctgcagatcacggtaggtctggcttttttcctgagactctttcgttgatttggcggcatggaactcatcccacacgggtttggtgatgaatgggtatttcacaaatggttctggctgggcagggttgaggacgtactccgtgactagcgttgtcttgaaatttttccaacaattccccatcttgcggatagcctgccgcttcagtcctaccttggcctctgtagggtatcggaagctttccttgaacttcctccatgcctcttctttttcttcttgagggaccagatcgatgtggtccttcagaatagtgaagttccgcctccctaggactccgcatatcgtagggaactttttgacagctttcgtcggagccgtcggatatccaacatcgtccatctctgttatggtgtagacttccttaggaatcttattctgggtcctaggattccggctcgatgtagtcccagtagtggccgtcgacatcggttcgccttgctgtgacatgtcctatgtcactgttgtacggggagaaagtactttttaaacacaaaattgcatctacacacattctcttatggttgatatacctctatctcctacctacgttcggctcatcgacgaa

SEQ ID NO: 29059 - DNA, 1770 bp, Oryza sativa
  unsure (1)..(1770): unsure at all n locations
ctccggccctaaggaatatggttgctacacacagacaaccaaaaccctaacaacgtgcatcttcttgtttgcagggtcttttatgtagaaaatctgttcgacctgcttcgctagtacgaatggttcgtctgcgtatccaaccttggccaggtccactaatgtgaagccttccttgtcgaccttgacacctctgcggatattcacccaactgcaacaaaacaaagggactttgaagttcagatagttcagctcccatatctgctctatgcggccatagtatgtgcttgatccagcctgatcctgatatgcatctatacggagtccactgttttgcactgtgcttttctcatcttgtgtgacggtgtaaaatgtgtatccattgatattgtacccttgccatgtgttaacatcccaagatggaccccttgccaacctttgtaatatctcacttgggccatcggtcgaccgtgctacatgatccttcaaccattcgttgaagcgaaaaccatgttctctgttgatccaaatatctgatcgaccaatattgtcctgtcagaccttcgctaaatgctcctcaaagtatggggttacttcagccatatgttgcagcactgcgaaatgagcctgcgcataggaagcttgatcgggaacaattctttttctgccagttgtgccaacacttgccaaccttccttcgtggcgagacgtaggactcccgatagnataagtctcagccatgtaatcgatacaaaactcaatggcttcctcggtcatgtaaccttcaatgatgcttccccctggttttgctctgttccgaacgtaggacttcagaattcccatgtacctctcgaatggccacatttctctcataaaagctggcccacatattttttttgcttcactaggtgaatagtgagatgaaccatggtatcgaagaaagctagtggaaaatacatctccaactgacacagggtactgacaatatcggcctgcaacccatctaggtcttctggatctataatcttctgaccgattgcattgaagaaggcacaaacccgttggatcatgtgacggacttgtggtggtagaatgcctcttatagcaattggcaagatctgtgtgattagcacgtggcaatcgtgagacttcattccaaccagcttaagatcctccaatttaacgtacttacttattttcgcgcaatagcccgaaggaactttaatatccgccagacatgatagcattgcgatcttctcatccttcgacaatgtgtggcaagctggtgggaggtacactcttcccgtctacacatctgtaacaggctgaagttcactgcgaatgttcatctcctgtagatcgagacgcgcattcaacccgtcctttgtcttggcaggcatattcaacaatagccccagcaagctatcgcacacatttttctctacgtgcatcagatcaatgcaatgacggacctcaagatcttcccaataaggtagccgccaaaatatggattttttcttccacatcctcttcttgtcctccttactatgttttcttttcttatcaaactcattagtaatgtccttcaccatgttgtgtacctgatctccggacaaatccacaggggcagacccaagttctttcttaccattgaaaattttcttctttcttctaaaggcgtgccgtagggggagccatctcctatgacccatgtaaaccatctttcttgatttctttaaccacctactgcatgtatgttccatacagtcagag

SEQ ID NO: 29060 - DNA, 641 bp, Oryza sativa
  unsure (1)..(641): unsure at all n locations
tttaatatccgccagacatgatagcattccgatcttctcatccttagacaatgtgtggctagctggtgggaggtacactctcccggtctacacatttgtaacagggctgaagttcactgcgaatgttcatctcctgtagatcgagacgcgcattcaacccgtcctttgtcttgccaggcatattcaccaatagccccagcaagctatcgcacacattcttctctacgtgcatcagatcaatgcaatgacggacctcaagatcttcccaataaggtagctccccccccccggggnaaacaaaaaaaaatttaaaatgggggggaaattttttttttcttccacatcctcttcttgtcctccttactatgttttcttttcttatcaaactcattagtaatgtccttcaccatgttgtgtacctgatctccggacaaatccacaggggcagacccaagttctttcttaccattgaaaattttcttctttcttctaaaggcgtgccgtagggggagccatctcctatgacccatgtaaaccatctttcttgatttctttagccacctactgcatgtatgttccatacagtcagagcatgccttctttccgttcacgatttgtccaaaaagattacccagcgcggg

SEQ ID NO: 29061 - DNA, 525 bp, Oryza sativa
tgctttcggcgtatcggctggccagtttttgggatttcttgttcatgagaggggaattgagataactcaaaggagtgttaatgcaatcaagaagattcagtctccaaagaacaagacagagttgcaggagatgatcggcaagataaattttgtgagaaggtttatttttaatttgtctggaatgttagagccttttacaccattattgaggttgaaagccgatcaacagtttacttggggggcagagcaacagaaagcgttggacagtattaaggaatatcttagctctcctctagttttgattcctccacagaaggggataccttttaggttatatctgtcggccggtgagaagtcaatcggctcggtcatgattcaggagctcgaagggaaagatagagttgtattctacttgagtcgtcggctcttggatgcagagactagatattcccctgtggagaagttgtgcttgtgcttatatttttcatgtacaaggttaaggcattatctattgtccaacgaatg

SEQ ID NO: 29062 - DNA, 673 bp, Oryza sativa
tctgaccagctcaccagttccaaacaagaatgataaaaaagaactctagcagggtagccgggaaataacaattcaaatcttaaaaccctcctctcaccttttcattttcatcttcaagtactgttactgctatatgaatccgccctgtctttatattcttcagagcaatccatatgtcgtgcctttgtccacctctcaatttgttgatgcttatggaacagtcactacatgagaagtgagtcaatgtttagccttattgggactacatggaggtttgcaacctttgtatgaactataaaatataattcagaacactactaagtactaattggaccgttaaaagcaggttccatggacggtattaaagagaccaacccgagtgtgtcgtcaaagatgggatccttatctcgaacttgaagagagagaagattgagagctgcccatgaggttactggtattttgaactcctccatccattttggattgagtgttttcttgtggatctttgtctggaaacgatagggtccaagatggcctttcacgtatggatcagctaatcctgcacatagatccatcaaagcagcattgttgtgagaatcaactaaatatgaacaaggaccagtacagtaattcaacagagaatctcatgtggaattttcctagtcaaatatac

SEQ ID NO: 29063 - DNA, 2165 bp, Oryza sativa
ccttgagcacaatctacaaattctttttagagcaacgataagatatacttgaatactcaacaggtgttcatcccaaaaggaaaattcatggcaaactaggtcagtagttcaatgttcaaaaagagtacatattcagaaaaatatttgtaaggtgacaaacaatgagcaaatggttactgaaagcttacttttaacatcctgccgtataagcgacatcagtgctttatgaacagcatcacgctccacattttcctctaaaatacatgcagaactcagaagaatgcaaatgtgtaccatttgatccaaattaaaaatagcaaaatgattgtaccacttgcaaggagttgtccaaggatatcggcaatttttgagacaaattctgcatctttggcaagaagtggaaaaccacgaatagcttgtattctagtctgcaagaacatttaaggaggagttaatcatgcagaattaatggaacctgagacacataatgcatccatattgatctaaagaaaactgaagacgtaatgatgatattctaacaaatgtagtttatttctgaagaagagctcttgcttgcctttacacatgagaaacaaccattaagtgacaaaagactcttaagtatcaagtaaccagggacaagcatgagaaaaaaccattaacggacaaaggactgcattactcagttcatttgttcagcataaatacattaagtcatatatgaatatcagaaagcaaatgggcatcaaaattggtaggaacagtctaattttctatatgagaaccgaaaacaaaatgcaccagatacatatttcctagttaccacatatcaaatagtttctttcaaaaataaaggtacagtttcagttagatagaatactccaagaaaaaaatattataatatttttccacaatgtgcatttcgattgtagggtctatttggcttgtagccactttcaacccaactacctttattggtagggtagcaattgttacaggttaccaagatttggtatttccagaagttcacagtctcaaaatctctactaagatatggtacggcttcaaaccaaacataatcccaacactgccaaaatttggttcgtgcaacaaaccaaacaagcccttagtagcaacaacgcatggataagataataagagctagagaagaaataattgaaggctgggaagagtgaccttgtctcttctttctctgagtttgttcatgaaatgatgatgttcaacatgaagaaataaatgatagatgaaatcccagtcaacgcatattgtttgcacatattagggaaaaaagcttcgttggcaaacaaaagaaaatgatgcgcctaagcaaggggcagaaaatgtggcacgattttgccaaaaactcagtggaccaagcaagttacctaaacaggaaagacctgaattccagaccttaaacatataaaagctctagcaattcaggaattttgttttaaacgaatggttaaattagcaaataatgcaagtgactcgttctgtaattctgtaaagctaaactaggtcgtacacgagcagcattatctggattctcgaaaagggagagtgcataccgcgagttcctccatgtcgacgaggtcgaacatggcctccatggcgcgcggggcgagtgccgggaagctccggaagaagcgggggatgagctgcgccgcgagctgcttcggcttcacgctcttgccctttacgggccgtatgatcgcctcgtagtcccccgcgtgctgcgatgcgaaagcccgcccccgaagcaaaccgaaaccccgtcaaacccttagccgcggcggccggggcccgtagcgccaattgaacaagccgccgaggggggaaccgaagcgccccttggaccttgtctttgccgaagaaaagcccctccccaagttgttaaacccgctcgacttcccggggttgggcttcgaagccgcccatgccgccggggaaccggtttggaaaatttgggggggttagggtttgggaagggaagggaaggaaagcggccggtaaaagatggctggctcacctacgcaacgcaacacgagaaaccagtgaactcaagaggcaggtgggtcccggtgctcagtgtgttattatcattcgggaagcctcacgtaccttctggcgtgtggattact

SEQ ID NO: 29064 - DNA, 983 bp, Oryza sativa
atgcaccaattttttttttgtcaagactaacacatgtcggatgaattttatgtctataattttacaggatgacaaatggcattccttgaagggtttgaatctagtattttcctatatcgtcatagcggtgtgctttttcgtcatgaaagctctcccaagtaagcacgctgcacattaatacataatcatgcctgaccatttaatctaatgcattcatgtaaataaatttctgcatattacagaagttaagtaaaacaaggatttgatctaaccgagatagaaaaataagcatatatactaatctacagaaaattaatcacattttgtggaagatattggctgatttttatctatgtaaatagagtaacatccttaaataacttatgactcctttgtttatctacttggtgacacagcgctaaaaaaggaagatgactaaatgtgttgttttgaaccgaatcaagagaccgatgagacgatgcatgcatgtgagttgaagactgtagctagatcggtgagctcctgatcaagctgttcatcatcatgacgggttcagctaattaatcagcaacaacagcagtgaatatatggtaggttcatctgaagcgacgggaacaagattactgatagatgttttgattgctttggtgttttcaggtgattagtgtagatttgggaaatgatcttgaggtattcgtaggatggtgtttttagtgtaaaccatttattgggtcaatgcgttatcttctttattaacgaaaggaggcagagcttctgcctttattttaacaaacaagatcacagtagccttggttcttttgcctatcctagtgtggtcgagcgacagtctgacttgaggaaaacaactttttcttcagcacttattttagtttcattttatccgtgctatgcactttttttttcttagagaagggtatcctctacatacaaccggatatatatagtatttttaaattagaaac

SEQ ID NO: 29065 - DNA, 761 bp, Oryza sativa
tcatctccacaaggtcaaaaagggtttggggaaactagctggtgcgatgttcaagagcccaaagaaagagagtgatgatgaagcctcgcaatgtgtgacgcctcacccaaatataaaaccacttggagaaaaaagggtgtcagtaagatacgtcgtcgatgaagatccttctgaaaacttgccagatgaccagcattccagtcctgagagaggcgagtcggaaagtccgaccaagaggcatttgaggaagaaggctgtgcacatggtgaaacatgcggggaacaaaacagctcataatctgaagaacatgttcagcaggaaaggcagtgacaagagcaaagaaggccaagatgaccagaaagacgatcctgatactatagtagtagaaccttcaaaagttaagaaagacaatcctgatgcaagtgaggtagacatagacccttcacaagttgagaacgacatccccgattcaacggcaattgaccctttgaaggttgattctaatgtggccaacaacattgtggttgatgcactagagtatgcatctgaatctgatgcgaaggacaaaccacagtgaaatgtgttctgctatttttggcggtcctcgtgctgttgggactgttcatgtaggcaggatactaggtagcaaaatagtctgatagcctcctgacagcaagcgaaggttgacagtatagtccgtttggttggttgagtcctccatcttacctgacgaccgatgtttttcttgtattatagatgct

SEQ ID NO: 29066 - DNA, 2098 bp, Oryza sativa
actaataaacccacctacttttctttggagatcatattaacccaaacaatgggatagctcaagaagagcaatttatcaaatttggagattcaattaataaatattggagtttaagggcctagcatgaacagggcaagttcgtgatccggctaataaactgaaaggatttcaaaaggtaaatttgatagtgaagtaacgccttcatacgtccaccaaatgcacgcagattatagtatctgcttcttagttcttaagaacaaaatttggaacaaactggcagaacttttgtaggtactagctaaatgttcgtgctttgctacgctaaaagaaaatatatcataatatttccaaaataaataaaagcatatctttcatgaagtatattgccaccttttttatagagaatactcacttccgtttaattttatatgtagctaaccatttagatttagatgttatgtgatcttaagaagttcaaggggtaatatgtaaaactacaatggaaataggtggggtggcagatacaccgccaccaccattggagtccttttaaatgagtatagatatcagcgattttctatcaagttgctcttccgaaagtgatgcagctataatctaaaaacaaaactggtggttactggtggcttactagaaatggaaacaaacagttttatgagttcacgatgaacattcacaagaaattacttgcaagcatgtgtcacatggttctaacaatcctaacaattgaagaggaaatttcaacatttcatagagtttgtcccttcatcttcttgctatttattctcttctttataattagacttgactggtttcctggatgatggccttgcattagaaccaaagctacctcaaaatcaaacagctatcttttctcgtttggaccacttgcagaactttccagattgttttttttgttgggtgatgggttcatgacatcttcacttctaaacccaagctctgacatatcttgctttgccatcaggtttctggaacaaagatatttttcccaaagatataatacacaagaatagcatgtcttgaatttataatggaaacagcagcattaaacctacaactgaaaaacaaactcttcaatgtttcgacttgtgagcctgaataggtaggttggaatatcgaagttcttaagcactcttaacacagcaagaatttcaggtattaatagaactgtttgatttctcttaaagttggctactacaagcatcaaaatatcccccacaagaccttttgcctcgaaataaagagaaaccttcaagacatggaaaacagattgagctaaccattgtatggtaagagtaagtcatggatctgaaattaatatgtcaaagtatcacctctccatcctacattccaggtacttcttcgagaacttcagacatttttcggtttacaatccagttgatttaacgcacgcaacataatctgtcttctcctgttagaacgagcagttgtcacatgacaagttatgacaccaaaaaaatcggggcaaaaaaggtgtgcaaacttaccaagtcacactcgtgcaagtgatccagtgggaacactcccttttcgggaggcacaggcctcacgccccgatttccaccaaacgcaccgcctgcgagagcccacaaagttattccgaacttcacattagcatcacttaacttgggagattaagcaggaaacagtcagtacacgaatggattaatggaacccataagttcttcacggttgtgacatacatccagagcaaatcaatgtagaaaaaaaatattaatagaggacaaattcaggatcagcacacctgcactcatttccaatggtgatactttctcagtgctcaaaccgccccaccagaacttcccagatgagtagcaaccaaggggggaaatgcggattcagttgaaaccctaaacttttgtggggaacaagcaaactgttacttgtattaaggttaaggctctgaaattaagagaagagcttcttccagatctagaagagaagctagggttaacgcaaagcaaattccagacaagaagtacttttcccggttggagagagagagagagatgaatca

SEQ ID NO: 29067 - DNA, 2221 bp, Oryza sativa
cgttggaactggtcatcttgtaaaaaagtcctcgattaacttgataattactcttacgtccctcaccctatgttcctgtgttttgtactctttcgtaacagccctcaatgtcttggtatatactatgtgaaggagacaaaattctagatataggaccgcgctctgaaaaaagggaaataagtgtgttttctgcaaaagagaacatccctatcctatcctctccattcccctgaaaccctacacatcactgttctcccgccctttctcttcctttcccctgcccttgcaccgccgccgccttgccttacctccccggcttctcctcgccgacgacggctttcccctcacgctctcccgtaccctcctcctctcttggcgctccctccatcaccccccttccagtagagcaaggggatttagggactggatggcgcaacgttggatttgggtgcggtgatggagtttcgccggcgacggccttcccctcgcgctcttacatgtcctgcccatctcttgccgcaccctcaagcactatccgcccgttttcatcgccacccgttgcagcagttaccctgttttgtgttgggctccacggagctgtgacgacggtagcttcggccaggaagcgacccatggaccaatggtgggagcatttggcaaggacacactcactcaagaaccagacattggcctgcgatgggaaacaagctcgaggatgccaggttcggtcgccattgaggtggttcccctttttatatgcttttcttcagtttttactcgctttgcctaccgtgagatagtcttgatctggttttttcctctatgtcagatggctacagacttgatccttccactctcacagccgtcaacaacatcggggcgattcgttttgctgcctggtgggctattgtatactgctgtctgcttgctgctgaatgaagcagctagcaaatattgttccaaactaaaagttgtagtggtttggtgtgatgaggaagccagaaaattaatggttaggattcagtggcctttcattttatctttatataggaattcattcccctaaatcttgcctttatatattgattttaattatgcagattttctgtacaattggcactggacattctttctgtatccaattggcactggacattctttctgtatccagattcattgaagcatgtaatatttcatctttgtaccatgcttctatttaagaggtgtgcagactctctctgtttcgttagaatatgccaaccatcatgtttattttgcaattacctacggcactagatgaagcacttatatgtaaatattactgcagagtgtttatcattttgcttaggttgcttcttaaaatctagcgcaggtgattggaagaaggtttagctgatcttggatatgttaggattattagaagctaaatgtttccttgattttacttaaagtagctgtttgccgcttgattttagcgattaaagtttctggtctgaaagaagttagggtgtgtttggttggtgggatatacccggataggacatggccaccgctttttggagggtgtttgggagtgggatagggcggcccagaggagaatatttcctccagatgctggatagagggatccggttgatttggccggatgcaaccgcccgaggctcgggcgagccgggcaagcgagttgcgtaactcgcgtcacccctcaccaccacgacgcgagcgaggcgacgagcgcggtggtcgccgagaggggcgacgagcttcgccgcccggcgtgggcgacgagagggggcgatgagctcggcggccggcgagagaggcgacgagcgcggcggccgccgagagaggcgacgagctcggcggccggtgcgggcaacgagcgcggtggccggcgagagaggcgacgagcttggcggctggcgcgggcgacgagtgtggcgggcggcgagagaggtgacgagctcggcagctggcgcgggtgacgagagaggaaggcggcggcgggaggaggcgagcctcggtggtgggaggaggcggccggcggcgggaggaagccggcgggaggaggctgctagcggcgtcggcgagcccagatctggcactgcttttttttcttttttcttttttctttttcttttttctatgtgtatttataatggaatgtgtatttataatggagtgtgtatttataatggaatgtgtattatgtattaatttg

SEQ ID NO: 29068 - DNA, 3803 bp, Oryza sativa
agtaattaattctagtatcactaattatgctcatattccttccatctttttgaggaaaaaaaactgaagcaactaattaatattatgtttttttcttaagaaaccgtactaccgtgtctgtttcatattataagttaatttgactttagtttttaatcaaatttctttaagtttgatcaagtttatataaagaaatataatacaataatttgaacttaaaacaaacgtattatgaaaatatattacattttggttttagtgaaactatttagtgttaaagaaaccatccatatcttgctaatgcgacttattccagatgactcatctctaacaattcaaaaggtagtattacgtttaagatatgactaccagggatgactcgtcaccgatataaggtcatctttgacagattgtaattctaacacatcacggataacctataacggatcacaaccatgtcccgtcatggataatatgtcatccgtcatccgtgacggatgtaatgagatgacccgtcaaagatgagagcactcatccatgacgggtcttaattactacccttcacacagataatgttatccgtgaagggtgatagttacgaaccgtcatggataacgaaaaattcaatcttttgaaattttcaaataatctcacattgagacatatcctatatgaaagttgtagatctcaatgagatatgtaacttcaaaactgacaatatttgaacttgagatagtttacatgtccgaatattttataagtggtgagatctattttgaaaaatgtgattttaatttttcaaatgatctcggatggagacatggcctatgtaaaagtcaaagtgtttgatgagatctacaactttctaattgacaatattttcatgtaagattgttttcatccccgaattttgttataggtgatgtgctctatttccaaaatattttttgaatttgtcaaatgacctttggaccatggatggagacataccctaaactaaagttgtagagctcgatgagatctgcaattttgtagttgaaagcattctcatttgaaatcatctagagtttcatatttgaacatgaatagttaaaacaataacatgtgatcacctatatggtctataggtgaagctgttagaatggtttgtatgtgttgagagatcttagtttcaaaatcacatatggcatgcatgcacatatcacttgaagaatcataaacttctatctagtgacgtatgtgtgaccatggtttgaatatgctagtaatatttagaatttagaatatttttagggcttcttgatgcacttaaaataaaaaaaaatggatgactctcatcccattgaaaattaaaaaatgtgaatatcctaatatttagaatatttttagggttttttatgcatttaaaattaaaaaaaaaagtatattctcatccatgaaggttcataactaaaaatagtgagattagagacttcattttgccgctttgtcttccatatccgcgcatacctttgaaagtcaatagcatcatatttttttcattaaaaaaaagcattttagaaagctttccttgttttgtaaaaactcacagcgtatacatgtcttatcgtgtttaattacacctatggtacaactttgcaagtcggtgtgatatagtgcgagaacttaagaattgaatgtctaagtgtaacaacttaacaagtgggtgcgctctagtacaagaacttaacaatttaacaatttagtattttggtatatcaacttgactaagtatatgctaggtaagttatttttatgatgccaatatgccattacatagaaatcctacggatattaccttataatattaaatttaatcttgaagaattatactgcacataaaatttacatccaattacctttaagaattttttgttttctttatcttttcaaatatcaaccgaaatataataatttctacatccattttaattgactttcaattattagttattatgataaaaatataattactgcttatacaaatccacattagtatattgtcaaaaggttgaatctatataaaaagggctccaaataattaagttgtcgcataaatcataccaaccttgcaagttattgttattgtatttatacgatcacttataaagtttttatactaaattgcacttacctgccaagttattgtattagaacgcacatttctcaagttcttgcaccaaattgtacccacatactaagttgatacaccttgggtgcaatttactctaaaacgctggacacatcacgttaagaagcggtgaacaggtctttttttattattattctagtgaagaggtgtcttttgaatgtaagtggacatgaatttggtatttactacttcctccatctcattttaagtacacttatgggtttctagtccaaagtttgaccgtccgtcttatttaaaaaaaataaaaataagtcacaaacatatatacccctaaatatcacaaatatatataaacattaacccctcctctcccctcccaatctctccctgcacctcctctctcttcgcatctcccttccctagcggcgctgcctctcccctccccgctccccggtgccagattgaggcggcaatggcggattgagcagcggaggtggtggattgaggcagcgtcgccggatcgagcagcggacgcgacagattgaacggtggtggtagcggatcgaggtggcggcggcatcaggatcggggccatcttcttctccccgacctagctcctcgccatcttcgccattggcatcagaggtagttggccgcaaggtcccggggctacgacacgggacaacgcctctcccccaacgcagtttctcgccagttcctcgccaaaacctgacgaaactatttgatgctctgcaaggggtcgtggtactatgtgagggagcggtcccggccgagctggcgcaaatatacccctagggaggagtaaaaccacgctccagcgtggagcgttggccatggccgtattcgcacttcgtgggcacacctccagtaactagctgtccatgactccatctccatgttcagctggcacgtggcagtggcaaggaaaaagtacaatctgactcccttaaatatacgtcgaatctaatttgtatccctaatccacgaaaccagatatgacgactcctccaactattaaaaccgtctaaaacgactccctcagctattttaagagtggttttcgctgacgtggcatccacgtggcagtccactcatcagacaaattaaaaataaacatggggcccacatgtaagtcacaagagaaaaaaataaaaattgtgggccggcgatcagcagcatgatgagggagaggggcgggtggcggagtccagagcatcggcggcagtggtgaagaggcagttgtcccccctgggggcggcggaaacggattccccgggcaacggcagtgccgacggagggcaccgggcggtggaggagagccgatggggtccggtggcgtggtgggcggcagcggcccaccagatcggcatagggccctcctgcggcggcggccaagaagaggctggccggtggtggaaagacggtcggcggggaggtcgtcgaggtgagctcacggaggatgaccggcgcacaggcaaaggacgggccctggtcggcgacatcgtcccctccggtctccggcgagagggcgagaggccatcctcctggagacgacggggacgaaaaagcccagcgccgacgcgagcagacggcgcactgcgttgccgaggggacggcgcgtggtggggca

SEQ ID NO: 29069 - DNA, 1212 bp, Oryza sativa
  unsure (1)..(1212): unsure at all n locations
tataagttaatgaatctagacatattgtgcctagattcattaacatatatatgaatgtgggcaatgctagaaggtcttataacctgaaacggaggtagtacttgttagtgaatgtcatcttatcttatgctttttttttcactacatttgcatgatctgcagagagggggatcgagcagcaagttcctcaactatttcgttaagcaaattgttccagtttttgacaaggtaatcttctttatcttgtacattggtccctgtgctttgttggaaaaaacagtaaatgcttctttttaattatattatgcatggcagctctacaacccttgttttgttgtcatacataatgtaacattttgcagtttgcacaccattttttttttgaaacatttggttacattccttacttgtgataaagaaacagctcttgcaatcatgcacatttctgcattctgcactaacattgcatggtaaaaaaaagtctgtcgtatttttttgtgaactatggatattctaatngnatngccatcattttggcaatcagactccccaccatgccttgaacttgtttatcttcaaaacaaagtgaattcgcatcttagagcatgaaggttttctagagcatgaaggttttctagagcattaaggttttcccctcttttttacctgttttagattcctgaagagaagaaactggatttgctcaaaacagttgctgcaagctcaccatatgctacagcacaagatgcacggcagctgcttccccctgttgttcaattgctcaaggtctgtgcaattcctgtctgataggtgtccaatccccctttgttaatgttttattttgtcccctagaagacattgttagatggtttcccctccaccgcggtgttacacaataaatgtcgtgtcttaccattgcatttacgttttcttttacagaaatatatgcctgggaagaaggtggaagatatcaaccataattatgttgagtgcctgatgtacatttttcaccatttagcccataaggtttgatgacagaatgtttatcatctattatgaaccatgtcttttcttcatggatggccttgtgctgaccaaatgaaatacagacaccaaacaccacaaacagcctatgtggttacaagattgttactggacaaccatcggatagacttggagaggatttctcagaacattacaaagactttacgg

SEQ ID NO: 29070 - DNA, 624 bp, Oryza sativa
taaaagcaggttccatggacggtattaaagagacaacccagagtgtgtcgtcaaagatgggatccttatctcgaacttgaagagacagaagattgagagctgcccatgaggttactggtattttgaactcctccatccattttggattgagtgttttcttgtggatctttgtctggaaacgatagggtccaagatggcctttcacgtatggatcagctaatcctgcacatagatccatcaaagcagcattgttgtgagaatcaactaaatatgaacaaggaccagtacagtaattcaacagagaatctcttgtggaattttcctagtcaaatatactatatatggacgggcttggtagttgagaacataccatttggatcagagggtttcatatcagcaccttccaagatctctaccttggcatgtgcaataggtggcttctcatcaacactaaaccagctatctgacatatttggataatgaatttgttagtatcatacaatcatcattgaataaaagcaatttgtgattcaatatactatcagtgctgtgaacggtattcaagtttgcttgtgactatgggtccatgttccacatgccatgtttttttctgactgctaaatt

SEQ ID NO: 29071 - DNA, 982 bp, Oryza sativa
aagatccttcaaattgataagagtacgcacttttgcttgagtaacagcctacggagttccaattccaagttatgtcatcagagttttgagaaaattggaaatcttgaagcaaccctcccaaccgcacaaggtcatggatctcctcgatcatcgtaaattgtctgaaggaaactagccagttgcttgaagacatttccggttgaacacttctttgctttcgttttgccaattgaaaacaaaggggggcaacatctttaggacaacttccatgcagccaatgatcttgccagaaactagtttttgctccatcgccaattacaatcgtagttgctgcttgaaacaaccgtttgtcaatatcatcgcatggtagattcatgccggcctagggtttatcaacccctttccatttgagccacagctagcggagacgaagagctctagagaatctttccaaatcagggaggcccaaccctcccaaggattttggtctgcacactgtctgccagtttaccagacaacttccaggattcaaatgatcagggtcctcttccttccaaagaaacaatctctgaaatcgatcaatcctcttaaacacccgtttcggtacttggagggccgaaagatggtggattggcattgaactaagaactatttttaccagagtctctcgccctgaagatgagaaaaaacgtcctttccaagttgggaggcgcgcctaattttttcaattaggggaagaaaatcgattttcctcaattttcggaagtggagaggtaaaccaagataacgacaagggaaggccataactatacccgggaatatctggagcaatggagttaaatcaacttcgtcacaccttatgagataaatttctatcttgccaatatttggatggaggactgacacttgtgcaaagaggattaaaatcttggagagagtgctaagctctggcccatctggctttgttaacacgggaacatta

SEQ ID NO: 29072 - DNA, 1394 bp, Oryza sativa
acagagcagcgattagcgcgtgattaattaagtatttgctatttttttcaaaaatggattaatatgatttttttaagcaactttcgtatagaatttttttgtaaaatacgcaccgtttagtagtttgaaaagcgtgcgcgtggaaaatgagtgagggaagttgggaacctttggtatagaacgcagcctagggatgatataggaatggtgtcaatagttgtaattatcattgtgaacaacagaacaactgcattttctactgcaggtaggcaaacatttctttgggttgccagatagggaaaaacctacacagtaatggcattgtccacttagctgcaatttgggatcatttacccatattttaattctgtctaaaatttatactctgtttctttttgtttctttttaccagtatgttttctctgttttgaattaaaatttcagaatctttgaaatgtaggtactgtggagtttgacaaataaaaacacattaaacaagattgttatttttcttgtttttggacacggtgcaccatttcaaacttactgattaaatccatcttctcataacacttatttgggcgagcattaaattgcaggacagttcagatagcagtagcagtgaagatgatgctacagacaaatcagttataggatttgccagtgcaatggtctggttgatagggatggccgtaatcactgctatagttgctagttatgttgttactacaatagaggtatatttgggaagatgatgaacatttataaacatggtagtcattttcttttcatcacccaaatttcaattggattgactactgtaccaatctctattaacaggaagcatcagaatcaatgggtatccctgtcaggttcattagtattatcctactacctattgttggaaatgcagcagagcatgcaggcgctatcatatttgccttcaagaacaaaatcgtaaggacgtatccaatgtttctactagtcaagtttgtacatattatgtgagttcagattacccaagttaactggtagatgttatgtaggatatcagtctgggaattactcttggatcagcaactcaaatatcgatgcttgtggtgcgtaattaatagtagtgttcttcgactttgaaggactttctggtatgattatctttagatttttcatgagtgtatttattctacatgattaggtaccagtcattctaattgtgtcctgggtgaatgccatccctatggatcttgacttcaaccttcttgagactggatcattggcaatggcagtaatcaccaccgcatttacacttcaggtaataaaaataattgctaacagatgcaccaattttttttttgtcaagactaacacatgtcggatgaattttatgtctataa

SEQ ID NO: 29073 - DNA, 982 bp, Oryza sativa
acagtcttacagtctttaattacttgattgtttcctctaatatggaatttattttattatagctggtgggattatgaatgcaacatgtgggaatgtacctgaattaatcattgcactgttcgctctgcataagaataagatggaaattctcaagtggtcactgttaggttccatcttatcaaatttgttacttgttcttggttcatcactcctctttggagggatcgttaatatcggcaaggagcgtccactagataaggtaagtgtaaaagtgcacatacaggcagtaactataacatatgtaaccgtgttaactttttgtgatcgatctattttaacagagacaagcagatgtaagcataggccttctgttgttgggtgttctttgtcatattgctaccctagtgtctaaatacacaagtagcaccggagatagcataaactcaagctcagttatgcaattatcaagatcatgcgctatagtaatgctaattgcttactttggaagcctcatgttccagttgaaaactcatcgtcaaatatttgagcttgaagaggtacaaaacttacttcactaagtcaagatgctgagtcgatttcacttacttcactaagggctcctttggatgcagggggatgaaacccccgggaaaaagtcccgtacagggattttcccctgcaccaaccaatccccttccaccaccaggggaatcactcctgttagggaaattttccctgctaccatttgagagtagggagagggggttgatgggggaagggggatttagagaggcaaactgctaaacagtgtttgaacaacaaaacatgtctatatgaaatattatagaaatttcaggaaaaatagaaagtatatagaaaatccatataaataggaaacaacctacaaaaattccagaaaaaatataaaaacataaaaaaatcaacaagtattagaaattcagaaaaatacaaagaaatatag

SEQ ID NO: 29074 - DNA, 1801 bp, Oryza sativa
ctatgttcctccttccgtgttggatcagcactattgttagctgacttatccttgtctcagaatcttgtaacatcatattctacaagattgtttccaagttctttgtttggcaattagattgatactatgactttaaaaacaattacaacaactgatcatcgtttggatatgatgttcttttggcagaaatctgatcagcagaaatcaacaatgacaatgagggcctacaacaacatactagcaatggcgcaggtgatttctttattactttagtggaactgtgtgatatgtgaattgcaaaatgctatcgcatgtgagaataatgtggtgacacatatgagggtatttttgaaatcacaagaagcttccaaatgctctctgcttgggcttctcatggtggaccagttacaattttaaatgtataacaaaagaactattgaaaatactagcaaatagcagtgggagtttttttttcgttacagatctgcttttgagcatagtaccgaaatctgaccactgttagtcaagaccaaaaaaaaaactgtgaccagggcccggtctggtttggattaatagaaacaatgatagtgagaaaaactgggatgtttaaactttctggtacattttaattccgcttggagtcgaatcccttttacctgaggttatattgcatgtgtaggatgtgctgataagcaactgtgttgagattggcatgtgatttatttaaggaagttttcaatatgagcctttattttaatacaggcttggggtttaattcaaaattaatactctgaactgtctggctcactgtcaaaccatgtttgaatcagcgaaccgaggactgatttgagtgaatagttcacatgctggtttgagttttgcactatgcttttgaggcctgtgaaggaactgcaggactatcttaagtaaaagttaagtggccttttataattgcatgtacacaaccgaattcaactttggctaccaatctctacgaattaccttagatatatgaaaatgacgagtaggttgtgtcaaaaaattccattgtagttgtattaatttgtacaatggaaaagttgcatgtgttaatgtctaaaacacatcttattctactgctggaggaagcataagtacacggcaatgtatgaaatatactgcttgtgtatactaataatactaacctacctaaatgtttatgctttctaactaaacgtgatgaatgttcatttcagccgttgcgtgcgaaatcccctttatttattggtgacaagaaaatcactctctcatggatggagcagccaaagaaaccagcacctacaacaacagggttagatttctattacctaatattccatttccccctcagactttgcatttcattatagttaagtctgctttgtggatcttttagagggaagaggtcccagcctgctacaaatgggaacacccctgcgagcaagaaggggcggggagagggagcagcccggaatcaacttgtgaacagagcttttgaagggttatcccgtggtggtagagggagtggaagaggccggggcaggggaggccggggaagaggatggggctaccgctgagaatagttggaaatccctgcaatctgatgggagaatagatcagctttctgctttgatttgaggtacttctcaggagataagcttttctgtatgcagcaaaatgggattggtgatagcccgtgaaggcatgctcaattgctgaatgcatacagaaagctcatatgatggatgcttgagtatatcgatgattttttagaccctagtcg

SEQ ID NO: 29075 - DNA, 646 bp, Oryza sativa
atgcatgaatgcgccatttacacccctcatgcttgcagtgggcaatgaatcttgttggatctgtttgcaaattacagagttcaaatcctgtaacaaccgcaaagtgcctaatagcttttctgaatgttatcatgtcaggaaaaacagcttcctccttaatcactggcatctcagggttatgaagaacattaaactctgctaggtcatcatcagtgacctcaaccttaccatgaggttgagtagtcctagaaggtccaccaggttcagcattttcagcacatggttcagcattttcagcactaggttgaccagaggtttcagcatgatctgtaggtggaatggtgtgaataggttgaatataaattccctcatcatcaacacccacatactcctcctccatgtcaaacacattaggcaatgtttcatccgcttcttgagttgcaggttcacctgaaactgccactttagatgcagatgctccctgccctgtctgagtaagtggaagaacacacaatggcattgatgttggctctatgttattagcactagcatcgcagagtacactctcaacaactaagaccattaattcagcatgcatttctgacttgtacatttcaaacatgtcaaccagttgagattcatggac

SEQ ID NO: 29076 - DNA, 638 bp, Oryza sativa
attctaagatttaacaatagatgtgacccagatactagcgtcatggcatcactcattttttacatgtcaattaccccttacctcaggatcatactcagacaagatggattccttcaccctagtgctagattttttttgtccacttaagcacgtggtagtcatggtactactgcaactgccccaatgtatgataactaatgatttggtggaactaatttaaaaaataaccattgtctaagctgtggttcttaaaggaatgcacacaaataaaaatagttcaaagaaatcataaggaaaatgcaacctacctctccgtaaagtctttgtaatgttctgagaaatcctctccaagtctatccgatggttgtccagtaacaatcttgtaaccacataggctgtttgtggtgtttggtgtctgtatttcatttggtcagcacaaggccatccatgaagaaaagacatggttcataatagatgataaacattctgtcatcaaaccttatgggctaaatggtgaaaaatgtacatcaggcactcaacataattatggttgatatcttccaccttcttcccaggcatatatttctgtaaaagaaaacgtaaatgcaatggtaagacacgacatttattgtgtaaca

SEQ ID NO: 29077 - DNA, 1273 bp, Oryza sativa
tcttcaggtaatatgacagtagtccaggtttttagatgattcgcagcaaggagtgaaaataaattgatcagcactgcaacattgatctttttatgggttgtcgctttagctaccactctgcttatttgcaagctcgtgatattcatactttgaagtcctttcatatgatgctaatttcatattcattgggagcataacatggaataaattaatggtcaaagtatgttattgaacaccatgtaaaaaatatatcccttaaaaaatacatgccttcagtaataataggttcctttatatctctttcagtgcacccaattcttgagcttgagatgtgcaactaaacattttcagagtacagataagatagatatcaagtttgcattggctaactctttcatgaattatgtgtttgtggaaatggcaggtatggtttacaaccatacactgagagcacaaaacgataaatattatgtttgcaactttgcatgactagctggttcttgggttgggtatttttaaaatggactgtgttgtctatcacaaactctttgttttacctattaaccatacagatcatacatcttattaagttctattgcaagctgcctagctgtatgagaaaggaatatatggtcgttgcatgctagaaggatattcttttcttcatatatgaagtaagtgatatgggcctaacagtgacaattagagatgagatttctatcattcaagcaacatgctttggggttgttctccatttaagaaaattgaggttgtctataacttgggcagtgtaaatattgaagcatcaatgacagatatgcgcaatggaacaccaccatcagttttcttccgttgctttgtataccctataccatttctgaagatcactataataccaaaccaactgctaacattttctttatgaaacaggcaaccatgcggtcggtggaaaacaattagaggtacagtgtggagtggtttgcaatccagttagcaagcttatgcgcactcaagatgaaggaaggggatgatgcaatttggagcacctctttctgaccagatggactcaattttcacgggctcagaaactaatgaaaaattagttcatatgtatgttgtgcaggcaatagctgtctcttgaaaggttctcacagccttacagatcagtagatcacaatgggcaaggtcaagattggaaggaagtgagaacataacatgcatctgatgaaggaattgacagcaggatagactgagaataagccggtccttttct

SEQ ID NO: 29078 - DNA, 1786 bp, Oryza sativa
ttcttcaaattgcagtgaaaattcatgcattattcattcaggggtaaattaccattgattcagagatggcgatcgttgccatttgttcattttagtctatgaatcattgtgttcattttaaactacaagaaccgcatgtggagggagtgaaggggcttgtgcttcagaataattttgatgtgtttcgtgttgaattgaatcttatttaaccctagcagtggcggatcgagcttggacttttgggggctacgaacaaacaaaacaagagaagagtttcatccagatgtagaagagaaggtagggttaatgcaagcaaatttgagacaaagtaggtgtgtgtgagagagatgaatcacagaatcagaaagaggatgtggatgctcaccaggatgcagcaggaccacggcgcccctcccctacccggctgtgctctgcttgccgctgacattcccaccagcttcggcttcttttttggccttggctccagctgcggccactctcacgtcgtcctcctgtggatggactccaacctcgccccgtagatcgttgcgagatgtttccttaacaatagattatatgtgctttctgccttatggagcagaaattataagccagcagacagcaagcaaatataccatgtcaagtaaataaatggatcagttaattgatatcattgacacattcaagaggaccaacttacagggttgtgcatctcttcacttaaaccaaaattttccagaatagaagcaaccaatgtggagaaatagtgtacagcataggagccaacccctacctgaacatcggaatactaatgatatgttatgtaaccagaactaattgcaatttcctgaagagtgtgccaacacaatttataccagaaagctgtgggcatatggaacttaccacagatccataaattgtgaggtaaaataaacttttccttcccattggtaacaatttcatcccctataacgaataataggtcacaccaacaatcaatttgatagaacacatttttccataagcaaaaaaaaaatcctagttaaaattgagtcactgaacgttccttatcaaaagaaaatggtattacttcttggtcttcccacacagtttagagttgcctcatggtgtattttacaacaaactaacaaaattacaacaaaaactatcttcgctaattagagcaagagatttctatgtttagactggaaaattctataaataaactcagagtgaggtgtttaataacaaaatacagtaagttaacttaacaatttcatatacttaataataagcttgatggaagttcccaataacaaaatgcagtcagttaacttaacaatgttgtctgctgataagtaatcaattagaccatcatgttatgtagaagactgtcaaaaaaacacagaaaaaaataataataggacattggaaccataaaagtttgaagatacaaacttacaaggggattatgaaacaacacaaatatgcgaaccatacgaaaatccaagtgttgcgctaaaaggaatatgtaaataaaaggactatacacgaaaagaagttcataccaagcacagagattaatcgaaacaaagtgggtacggtctagctattaagagatgttattcaggtaaaaatcatccatctgtatacttcgtaaaacgggaatacttatccttcaaccaaataggccgaaaccaccaaatacaaaacaaattttgagacattaccgaaatgcattggttttgaagtgaaaggaaagggcatgttactgcagatttattca

SEQ ID NO: 29079 - DNA, 2241 bp, Oryza sativa
cccatgatacacaagcgttacaaataaataatgatttacacagtacagcaagcagtgcaatggtttctacaaatataaccggattttaatttcataggcaaatgaaagacaagcataaattctacaatgtcagataattcaaattgtattgtcatgctccactaagtaatgattttaatggaagaatgttgaaaaaaaagtaataagatttctgccagaaaacataagtttcagttcagtacaaaccacccataccaagagaatagcaccagttttgaatgatccaagtgatagcatctcaattccctgtaagataaagagaatcagtaggtttatctccaagaagtttgggaggaaaacagaacatatttgtgaagctcttgaaccatagtcatttcaataatgcacattaaccttatatctcaagataagacaagagcatactgaatgcagaaagcaatccccaaaacattgtttgctagccaatgcttcttcgcagaataccatatgcaaaagaaaaatcctgggatcgatgtaacaacttgagacttggtaaactccactaagagcgctgaaataagaaattaatgaacttaaaaaggccaccaagatagcttgtaacatgattcataattgcagcaacaatctgacatatgatacacaattgcaccgatgattgagcattttaaaaaaaaagaagtttgggtcctacagacatacagtggaaaaaatgcagcacgctgaatgatgacattatcattccattcttttggaagaaatcatttcatggaaggcagcaatgttgcactgcatcagaaaaaagaagcacataaacaatcttaattgcccaaatacaatattacgtagttacatgaatggaaaagctactgtatcatccaacctgcaagcttttgtgtacatcattgatttattttcctaatgatctgcaacagcaacagtgaaaaaaatgattatagagatttggtgggggcaattagatgagatgaaggaaggggatattagatataaggatgtaccgtgaataatggcactactggaactcgccttcgatttagcacaacactaatgaggtaaattagaacatggacaaccagacaactaccctacccctgcatcagaaatatgaagctgcacagatgagcttttatctcagctgtcataagcagtgaagaaaatcaagcaaaacttgtaattgtaccaacgagtgagatggacagatggttgcacctcattaaaaataaaaaggcccaaacctcctgtcccacctgatgctggcctcctcctttgttccccatcacatcgctccagccgctgctgccatctctcccgcgcaacatggtcagaaatccggccaccctcactgcatgcaaaattgaagctcatcagaaatgactctgtgcaacaaagaacaaccaagcaactcctctgagcacggtcttgccacctcttaattatcagtgcatagtgatgtaaacacattcatgaaacaaaaaaaattatccacagccagagaaacaagcaacctttgatcgtgcgaacacgataaaggatcagtcattttgtgcagctccattatcctcatatactgtgaataatagaatccatacaaactgggatcgtgctgcatcagtaaagaatcggggatgagaggagatttcttcctgtaactcaccgagatggccactgggaagagccttggggatggggcttggacgccgccagccacctgcctcatgaccgctacgagcagttgtagcagctagtacacgaactgccaccatggttgcgcggccattgctgtcatcgattgaaccggcaattttttctctgttgtgaaagggatgaacaccgcggcaaagacaaggggaaggaggatctgagacccttagcctccctgttgtggccgattcgtccccttgtcatcgttgacaatggtggcaagctgctcaaggagagctcgattctgtgtccgctagatcaaccacaagcaaaagtcagtattgcttgagatcacaacacacaatcatcacagctgcacaccttggcccttggggcgaggcggcccatgagagtggcggtggcattgccggcattgttctcctcaatgaaactgattgtggagttcattatgagcagtgtgatgatgcccacgaagtcctgccagcccggcagcttccctgaaaacaccaaacaaatcaaccctcgtcaattcaatcaaac

SEQ ID NO: 29080 - DNA, 584 bp, Oryza sativa
gcatgcctggaggtcgactctagaggatccccccgtgaagcctttgtaatgatctgagaaatcctctccaagtctatccgatgggtgtccagtaacaatcttgtaaccacataggctgtgtgaggtgtttagtgtctgcatttcattaggtcagcacatggccattcatgaacaaaagacatgggggataatagaggctagagcttctgacatcaaaccttatgggctaaatggagaaaaatgttaattaaccctatcacaggcggatcgagcttggacttttgggggctacgaacaaacaaaacaagagaagagtttcatccagatgtagaagagaaggtagggttaatgcaagcaaattcggtggagaggaaacctgtgtgagagagatgaatcacagaatcagaaagaggatgtggatgctaaccaggatgcagtaggaccacgggggccccttccttacccggttgtgctttggttgccgttgacatttcccaccaactttgggtttttttttggccttggctccagctgcggacactctcacgtcgtcctcctgtggatggactccaacctcgccccgt

SEQ ID NO: 29081 - DNA, 7699 bp, Oryza sativa
ccatttggtctggacacaatctggcccggttaatatgcttgggccgaggttacactggtacacaattttcccttgtatttttcacaaggaataagtccactttgactcccttgcaaaaccggatatctcgaccccctgaactattgaaaccggtgcaatttgactcccttggtagctttggagggcggtggcgctgacgtagtgatgttgacctagtatgtggagttgacgtggcgcttaggtggcatttgaattaaaaacgtatatgtgggacccgtttgtcattcacacacataaaaaattgtgggacacactgacatgtgggccccacatgtcatcctcctcctctctttcttcttcctcccctcttcctcccttctctctttttttctctttctcttctctccccttcggtcggccgcggggagcacaggatggagcggcgacgggcagggtctagagcgcggcggcggcgggagctgaaactaggcctgataggcatttctaaacttaagaaaatatacgacttatacggcaggtgggggctagagcggcggcggcggcagaagctgaaactaggcctaatggtaccgatcctgagacactatgtcatgtccgttatactcatgtccatttctaacgttaagaaaatatacgacttatatttttcctaaaaaaacactcgtgaaagacaccgcgaagattatattcatattgatatggcaagaatacaaattacattgtagcactatataacctgctaggctataattagaaaagaaaaggccacgtcatacatctacaatacaaacaccatgtctcatatgcactcaactccatccacgtctttggattggagggggagatgtctaagagataatagtggatctgctctaccttgctatccctgctgcaagaggacaatccctttgaagaaaaagtttgataggaagtagaccttcaagtgacgcctctaggaccgacgacaaatgataatgagtaacaattggacggtgttttttttttaccaattcggcatagaaatcataggcacactaactgcccaagcaaccaataatcataggtactcgtatagtcatgtgaaaaaacaaaagagacaaagctattgtcctactgtatttaatttattggaaaaagaaagactatgtattacttctatatagacatgttgacaattcattaagattaatatattctaactttctacaaattcattaagagcaaaagacaacttaatttgatattttcacagcattaatttccattggtttcgaaattagtttcacttccttaatctgattctattattgtcttggcaaatatttggagactcctctgacctgtttcacctcttattgcctcctcatggatcttatgtttgaaagaatttactctctctcttatctttgttgctacctcattgtctcccatgacaatcttgacactctttgccaactctgtccccactattactccttcgtcattgcgatacactctagtgccaaccatccattccttctccacaagatatgcaattgtgggctggtctgaccaattcggcacagcaaccatgggcacaccaagttccaaggcttctaaagtcgagttccacccgcattgtgtgacaaagcatcccacggagggatgggacaacacatctagttggtcacaccattcgatcaccatcccattgtgatggtcatcaatgttatccaccaaatagctcaaatcttcttcacgcccatccttacgcaccacccacaaaaatggccactcacactcctgcatgccgtgtaatatctcgtctacctgtcgcttgctatatgtgagtatgctcccaaatgatatgtaaacaacagacctctctgaatgtgtatcaagccactccatgtagttcttcttatcccgctggaacatgtggattctttctttggctgacccagccactaagtggccaatggtaaacacctcttggaagtacggctgcacggctgtgagcgtggcaacctccaaaacattcaatgtgttcacaagaacctttggcttctctctatccatgaactcaaacaactcttgaaagccttcaacaacaaaactggacagcttgtcgtttgtcacatcaacaaggaaggatggtaagctacggatgcaaagaggttgcattccaggtaagaccacttcatacgatgggtcagaggcatgtgatgcaaagagctctctgtagccgtggtagtagtgatagtaagctgcaagcacggtggccggctggttccagaacacgactagcgggatgccattctttcgtgcgacatcgagcaccggaggcatcgccatggtgcacacgatgcatgtgacgggccgaccacgagcggcgagctgagagacaattgctgagaggctttcaaagcttgtgcagcggctacgtgccctctcgtcgccagaaagtatgctcagtttggatatgtcgtcaaagccgtcagagaaaggaacataggagataataccgtcggtggtctcctcgtcaggggaggcgatcagcgacgagaacatgcggcggtgagcagaagcgtggatggagagagtgcacatgactgaggaggcgtcaatgctagcgagacggtgggcaaggttttgtgcagggttgatgtggctttggatgccgtaggctacaataaggaagtgcgttggtgctgacggttgagggccatcgcaggtgtgttggttggctgcgttggccatggagggaggatttggaggctagctgttcaatttgtacgtgtttcagagatgattgttgcaaagattgtgggtgatcgggattgtctaatgtccataagttctgtatatatacacactccatagactagttgccaatggttttaggaagcacgcgcatatggttttagttgccaatggttaattaatttcaggaagcacgcgcatatgttttttttaagtatctaggtagataattatcaagtatctttcaatatcacctgttgttgtcattagtccacttgaaatttaattttgtcagttgtctgattagatttgcaaagtagattttctgagcttattgcagagagcaataatggaatgcatgtgatgttagcactgacgtatatgtactcacgttctatcacccaaaaaaaaactccatccgttctaaaatataactgtttttttacttttactaaaaatatctataaaagaaatatgtttaaataaaaagagttacatattatgattttttgtttaaggataaatctagtaacatgaattttatataattggtttttttattcttttgctattaataatagttaaagttaaagttgtttaacttgtcactatttatattttgagacgaagccattgtgataggtttcttgtttcgtgctgtctttgttgtcacattaatggggctagctgggatacatgagtaaaagacaagctaatcaagaaaagagaagagtaaaaaggaccagctacctagcgttttgtgcagtactatatggatcttcttgcagttgcaaaatctgaacgactgctcaaatcacaaatgcagcataaaatattcagaacaagtgtcaatccaatcaggcccgtttaattggtgaaataaaaaattttggacgtcacatcgaacgtttaaccggatgtcggaaagggttttcggacacgaatgaaaaaactaatttcataactcgtctggaaaccgcgagacggattttttgagtctacttaatctgtcattagcacatatggattaatgtagcatttatggcgaatcatggactaattaggctcaaaagattcgtctcgcgatttacatgcaaactgtgcaattagtttttctttttatctatatttaatgcttcatacatgtgtcaaagattcaatgtgatgtttttgggaaagtttttgggaactaaacagcccctcatttccaaaatcttttttatccggcattaatttggaaccgcgtgcatctaaagcaccctttactaaaatcaatgtagttgtatgcaaacctaaagcaatagcatgatgaaccaagaaatctccgggtcctattattaagaaaagcgaattactattctcgttaacagcattcaaccatccgggtaaccatagggttcgacccgcattgaaagcgggaccgctcgttgaagataagagcagtataggggtgtctagatccaggggcgtaaagttttggtgtgtcacattaagtattatatagggtgtcgcatggggtattcgggtactaataaaaaactaattacagaatccgttagtaaaccacgagacgagtttattaagactaattaatccgtcattagcaaatctttactgtagcaccacattgtcaaatcatggagcaattagtcttaaaagattcgtctcgcaaattagtcgcaatatgtgcaattagttatttttttagcctatatttagtactttatgtaggtgttcaaacgttcgatgtgacagggtaaaaaattttgaggtgggatctaaacaggacctatcttttcttcttgagttacgctccggtgctctctacttgaagtattctactacaagtagaattaatctcgaccgttaattttataagatagattagtaatctcctaatatagtttagggataattttggtatgggatgttttcttcgcttcttcgcatcaggtccgacgcattgtatctcgccccgacgcatgcaccgcatctccccgatgcaggttttcgcttcctcccggcaggcagcggcacggcaaaaatcactggcggcgcggccggcggcgctgccagcggctcggcgcggcgaaatcctcaatttgcagacgtgtttgatttggtaattgaggaatatagtcttaggaaagcatactagtgggctgcctgatttctctgttaagacagatgcttatgtttctaatctgatttcactgtacagcctgcgattgatctcaacaagaacgatcttttggatgaatgctacaaaaggatgctggaagaccatctgaacgatattttgagagacgatatagctttagtttgtcaccttagtgacggaaaggtgagatagtgtaatgtcaggaacaagtttgattgtcaggaacaaccttagctagttagctttattctctatctttggatcagacagttgtagtatcgagatgtcgactagagagaggtgaataggcgatttaaaattaaatgatacctaatcaaaactaacctaagttgctaggctcggtgagggacaagtctaactaagccactcacaaaccggcaccgggcctcctccacaatcttctcggagaggtcaccgggcaacacctccacaagccgtctaggaggtggcaacctccaagagtaacaagcgatgacccggctcgaagatgatcaagtgcacactaactctacaatggaagaaaatgcacttgactcttggctagaacaacctccaaccactaccatggatgaacactaagctcaaatgtgtgtgagagaagtgcaaagggtgttatgcaattgaattgggtgccaagagagcccccttgctgctgaaggggagtatttatactcccaccaaccaaaactagccgttgggggcgaaatcccccaactcagtgctctgccggtctgaccggaggtatgtggccggtcagaccgtgctactctgcaaccgttgtagccctgtcagagggccccattggcttggccggtcagaccgacgttgagtggccggtcagaccggcctcagctcggtctgaccgaatacggctccgtcggctctgtaacggccaccccaagcaacaccattctggcctccaggaggccggtctgaccgcataagtgtcgccggtcagaccagcctaacacaccggtcaaaccgccactgtctgtccggtcagaccgccactgtctggccggtcagaccggccagggccgccagtcagaccgccactatgtggccggtctgaccgcccctaatcaggctgatcacagtaaatacatatgtgtgtgtgatgaaaatgtgagcacaagtctaaatgcataatgacctaatgtggcaattaaaatcatctctttgctaggtcattacccctcttaatagtacggcaaagctaaaaaataaactagcaaatttgatcgcccttcacctcgatcaatttaaaaattaaagcactagttttaccgtcttctttcacttcactttgcgccgtcaattttaatccttcgataatcatccatgcgcacatatgacgtggtactaacacaaaatatatagctcaaagacaacggttagttcataattagcgcttgtcattaattaccaaaattaacaccgggggcctagatgcttcaacagtaatactatgcaaagtgagactggttaagtcgcagacagctgcttaatcacggtgcgattagggctaatcttttgcatctttttggtgatccatagtttcgtggttttgcgatttaatagcgtctaccagatatttcccgtttgatcgtcttgatggcttgcgggtgtgtgcaatgatcaaatatttgctgtcaaaatatcacgtgactgaaaatgcagccaactctgattgctaaacagtacatcatctctgattagcaacaaagtgtgcagtttgtgacatcagtgtccatgaaagcttccaggctttcccctggttattgccaaaaatatagtcttatttctccttctctctagaataattttggtaagtttacagcgtttggcaggaggaacgcacaaagactgcatgagtgtgcacaaaatctgtccatattttctctaaatttgtactttgtgttaggtagtacatttgtgggcattcgaaatgcccaaacgagattaatataaggtgcggtatttcttgtagcaggaaacacacaccaagccaaaccaaagagcaagccaacatgcttgtgctgtattcagaggtgcagtatttgtgcagtgaacaaaagtcatctcacattgctgtcccttgataatccatggatgccatcagtatttcacatctgaacattcgcgcgtgctcctccacgggcatcatctccgcgccacgctgccggtgcagcggctcgccggtgctgcacatcctggcgagctggtccaccgccgtggagacgaggtcgaccaccaactgcttgtcctgctcctgcacgggcgccatgatggcgcccatatatgccaccgagtcgtccgcggctatctgctgtggcacgacgggtggcgggatgaggtcgccgcagcctatggccggcgcctgctcggcgagggagatgggacagcgatggtgacagggatggagggaaacgggcgactgaggaggtggacgggagtcaatggcgtcaattaggataatgataaattacgataatactcctacatgaattattatctctggataagtataccccaccacgtttctactaccactataccactaagttaggtggtagtagaactagatctcaaccctacgattaaatacgatcaacggcgcggattactttctactgcaaatagaaagcattggagtggggctctttcttctttcgtttctattcatgtacagtttagaaatgattttttaaatttgaaattttatttattgaaatttaaaaaataatttttggt

SEQ ID NO: 29082 - DNA, 3322 bp, Oryza sativa
ccctacgattaaatacgatcaacggcgcggattactttctactgcaaatagaaagcattggagtggggctctttcttctttcgtttctattcatgtacagtttagaaatgattttttaaatttgaaattttatttattgaaatttaaaaaataatttttggtttcaaagttttacaaatctacacccctaaacctttctatgacgttacaacgcaccaatgaatatgtgcccgtcataaaaaaaaacctgtttggaagagagagcgttaggggtgtaaatttataaaactttgagaaaaatattttgtaaatattttaataaataaaattaaaacttgaaaaaaaatcctgaaaaaaccggggaactgtctactggagtacagcccatcaaagagacgaggcccatagcccatcggccaccacaatccttctcgattcttctgctctccaccgagaggagcaaggcgaactgcaggcggagaggctgggccacacgataccctcctctcccttcccttcccttgccgcttccaactccaagtctcgctgtgatcaggagctagggtttgtgcgatcttcgggaggaggggaagatgatcgaggtggtgctgaacgaccggctggggaagaaggtgcgggtgaagtgcaacgaggacgacaccatcggcgacctcaagaagctggtggcggcgcagaccgggacgaggcccgagaagatccgcatccagaagtggtacaacatctacaaggaccacatcaccctcaaggactacgagatccacgacgggatgggcctcgagctctactacaactagacgccgcgcctctggtaatttctgtttgcagttcttgttaggcctttcttttttgatgctaggctcttgttgatcaaatcgtgctgtggattgagaaacgcttcgttcgtacttggaattgaggactaggtacgcttaatttttgtctaggaatcatgaattggcgggctttatttgggtatcaagtcgtgtactaatactctgatagcaacttctgttccgctatttagttcagtctgtgcttgcatatgctgtagctctggccgattgattaggatgcttctttctggtattgtagtcattcgtgtcctcatcatttgcagaatagagggatatgatgaactctcgcatgctgactgattactggcgaggcaattaggaggattaaatgcgcgctcttgtaattctacattctttggttccaatataagctatgggtcaatcaactagacattgatgagtggatatttgctggtactgttagttacaaaatgggtttagattattttatgatgtttcatgtttgtaatgacctctggcaaattgtgttgtattcactggtgtccccaatttcccctcttgttatcttttgtcaactattggtcaggttttagctttgtggctttagaaatttgtgaggatatgctcaacaccgtgtgatgcctcccccctcccagcctctatttagagatttcctaatccagtaatttagtgcattatccaatgcataccatttgtttcttgtttgaatgcattagaatatcgagattggcaggttaattagggtgtaatttgagaatctgttgggacctgagttagtatagggtattagggttgtcttggtttgttggctagttatgattaatatgaatggacatgtaagtatgtaaccatgtgccataaatataatatccaggaaaggaaaatcctggcagccggtacattcggtactagaaaaaaaaattctgatttgcaagttctgctgttcagttattgtacttacattagccttttaatgttgcataagtaacataggtgcaggctgaaaactatagaagcaaagcatcctcctttttttattctgttatatccttataatttcaaacagtgtcatctgtctttggtgttgtctgttgtggccagtcactcatacatcattattttatcacatattcagttgttcatgcattgtgagttgtctagttattgatatcggaaattgtagctaaatgcagcgtggataaagtagtttgattagtggtgttattcttgtgttgatgatctcattatccttcatattcctgtgatgatggttaaacctatagtttccattcctttggcatgtaatgggttagcatcgatatgccaaagtaacttgttaaactttgagcatggacacgaaaaaaacctggcatataggtgtttaagatattgctttgtccttttctgtagcagcatgctaagtattgactggatatagctgaatggttatatggataaaacagttagcatttgatcacatatatagtgatcacacctgaggcctgacaaatctggttttccactggctgcatcatagcatgtgttagttactggagaaagatctgaaaaaacgaatcatacttgttgctgattttgttcaacgaaagggttctctgtggactgtggagcagaacaatttatacaaacgggctagttggtgaatgcttgaattcgagtatgccacattgaacaataagctggagatgtactcctacctgatattgatatgtacaagtgtatggactgttttgttttgttcccctagctagaattattcacttttaggcttctattgttgtaggaaaggctaaatcaactttggtatgcagtaggataccagggaaatcataaaccatttcacttgttagcatgtgttttttgctgagacatgtgattatatgctgttgtattttgtttttttatctcaactaatatttgttcaactgcaatgcaggctggtatgaatttagtcatggatggcgaacagattatgcccatttgagcggccagcgtccatagctcatatataaaactctagtgagctgtgtagttcgttgtgccaatgactgttgtcaactttgaatatgtcgttgtagtatgatcaacctgcagatgtgttgtatttgtgttgctgctactcataacataaataacatgttatgaaactttgatcaagtctcagtatcctgctcgtcctagtctgctttctccatctgacatgcattgcattgcaacttggattctgataaactgtctgctactcttgaaagctgcacccacagaacagcagcagtaggggttgagccgtggaggaaacccagattgtagtccgattccagttcaatttgcagcccaagcttcgtcaagttttgatcgattttgctggctccagtgatcgcagagatagattttcggcggtgcaggcagaaaacggcaaatcgctctaccgtttccactcgcgggag

SEQ ID NO: 29083 - DNA, 4717 bp, Oryza sativa
  unsure (1)..(4717): unsure at all n locations
gtgcgcgccacccgcggcgtcgctgccggcgcttggtattcgaggtcaaggtccttcacctcggcagcaccggccacacccgcgttggatgggccaccgacagaattaggatcctctgccttcacacgtgaaggcaccagcctgcagtcaagtaatatcccccgtccaaggcaatccaacagctcacgtgcacacccacttaatttagccaacaaaacatgcacatcagaacccatggaagcccagcaactgacagcacatgcacttgcaaagtctggtgccggccgcggtggtacgcgccgccgtccgccgccgccgctgcggtagacggtagtgcaacgattcaacatgcttgttgtctgggatttagaacattattacaattacaaaacagagcaatgcatgtattccatttgaccatgcagcaaccaaagcatgcattccatcaggcttgataagaagaaaagggtgaggagagaaaaaaaggtacacctacatcacatgggaaaaaaccaaggtatttcttaatgaagatttcattctagtgctatattttagttccaattttcactgcttctaatgtgatctggagtaaattttattttgagttatgttctctttccagcaacaagaggctagaaatgatggtctggatgcacaagctacaaaagataatatttctggaaacaacaatagagactttgaacaacatggggtcataaataccttcacccaattgttcatggtaatcttgatcataatctaaaagtataaattaaatgactgtaatgttactaagttttttttttctattcttcacttttacagggcccaagtaccagtgacctgtgtactgaagacttattatagctagggggatctattccagggcattggttttgttcttgtcagtccgatcctatgcactaatcacagtatatttcgattttttttttggcgtgcagtatatttcgatttatgatgtagcttgaaactccatcatactttgcagcgattgatgttaactgaaactcatgaattgcctaatggaaagcatgctttggttgctgcatggtcaaatggaatacatgcattgttctgctttgtaattgtaataatgttccaaatcccatacaacaagcatgttgaatcgttgcactaccgcggtggcggcggcggtgtgtaccgccgcggccggcgatgacaccgcttcatcagactttgcaagtgcatgtgctgccagttgctgggcttccatgggctctgatgggcatgtttcgttggctaaattgagtggatgtgcatgtgagccgttggattggtcttggaccggtggatanttacttgactgcacgctggtgccttcacggtgtgaaggcagaggatcctaatccccaccaacagaattatgctgacatccacgcacccgtcggctactatgtgtttggattcggatatcgcgacatggatggtaccaaggtgcacaaggcatggaggtccaattatgctgaccaaggctatggcgagggcgatgtcctcgggttctacattcatcttcctgatggagagctgtatgagcccaagcagcctttcctggttcactacaaggggcttcctttccgcgctgaagctcccaaggcggctgagcagaagacgccggatccagttcctggtgagtaccattgtgttacttcatgtgtttgagtagactagtggtagattgccagccaggaaaataacacatgctatttttcacaaaaacaacttggtatgaactagcaatttcacaaataagattctgtatgtaattgcaaggatgcatgtttcatgatgttatattcaatacttggtgtaatgtagaatttgtaccaattacagaattaccagtagtagatctgcataaataaagtgatttaggattcaggacaacagaatcgggtgttctttacatgtagggaccccttacatgtatgattatataggaaatattagaacttccaatagctgtaatgtaacagtggtgcacttgtcctaacaaaatttagaagtacgtttaattaagtttcatcagtcttttgcatcctatgtttgagcaagtttctgatctctgtctggttggacatattggtatctactcccctacatgtgtttcaagtcactatatctccattgcacaaactagaaagtagtttctactcactgctcttgaaatcatttccaaagcataaagtgtcttgtaccaagaaatatagctacatattgtcatctttattattggaggtgcttagtgctgaagcataatgaatgcagcatacagttcataagtcacaatgtaagaaagagagcaagaaatgcagcaaatgcttctctagcaatgctctcttgagaggcacaacatggaaaatgtaacaatttgcttctacagttgtacataacttattaatttgctttgctactcaatcaaagacaaaaaaacacctaccaaatgttactaaatttacccattgttctgttcaagagtatctatgtcatcatctgaccttaaattatattcttgactgtttgacagtgcatagtctgttgtattccatactagtaaaaacaaatacctgcaactcactttttgagaagataatatgttattgactattatatcctaaagtataattacttatttggttctggccttcttggatttatctacatcagaacaagtactgcatgatatactgtaccaatcctaactcgaaggtgcaatcttctactgtatcataggaggttacttttgggagtctttacttatccagtcattattgcaatcttatcgtgcagtagattctattatgttatgtgcacatgaataaaaagggcagttctttcttatctgttcttatgatgaagtcagaaatcaacgactgcaaagttttttttgccccaaagtcagtaattgtaaataagtgcacatcagtaccttccattggatcactatgttttgcttacatggattaaaaaaagggtttcttgtttgttcttcgcatagaacaaagtcaggatcctataagtggttgttttgcacacttgcacttatcacttactactttctagcgtcccttgttttcctacttacgagtatgcgactgttttgcacaattgcacttatatttcatttccgactttctagcatccattgttttatttgtgcagcctctcctctggccttcttagatattccattttaatactttatagttcttgcaaatgcaggtagtgagatatgctacttcaagaatggggtatgccagggcactgcttatagaatgcagctagcgaggcgacggtggtcgtgactccggcggtgaagggcagtggccggcccagagctcggcgggccgaggcaggagaggcagcgcacgggctcggggcggagcgagctcaagacgtggttctccagactacttcacgccggggcagcggggtcggcggcggcattagcagcggcggggaacgggttgtcatcgaggaggctaaggagctcgtcggccgtggagatgaggagggagcgggagcggcggcgggcgcgggagcagcagccacggtgcggggaggtggcaggtgggacagcggcggagtgcgtcgcggttttctgctgcttcccctttgctgtcgtcgagctcatcgtcctcgcggtcgtccgcatccccgccgcgctctgccgccgcgccgtgcagcggaaacggcgcgggcatgcagcggccgtgcgagggccgcgacggggcgaggcgcgttcgacggcgaactcgagcaggcacacggttgttgatgtaaaacacgaggcctgagagatctgcttaactccagtgcaggtccaaaagcttgcctttaggtgtatgagcgtgccaattgatttgatcctgcaatcaacaagaaacaaagacaaagaaaccgtggttaaatctgtaaactatagctgatcggctagttgccaatgacatatcatttatctttgagccgatgtcatatgtgaatcgatcggcaatcgtgaataagtaggaaagaactaaatctactcgatcggctatagatattaacgatatataatccctatgtcgatatatacttaaatcaagtgattgggataaatcggtcgccatgccgagacagtataaaccacttagattgaaatatatattaacaacgagactatatatgttcatagcatagccgatcagatacatctagcatgtatcggttaatactccgataccactctatattaagatattaaagaaagtaaaatatactaaacagaagcctaatatacttaaatgtaacaagatcttaacataaaggcagatttaacatatcaatcaagcatatggaacgtaaagtagttaaatcaggtaagatcggctgaaaccccaatgctactctaatcggcaaccagaaagcaggctagagattaatattctaatcacgacttataaggtcaaactcaactgatacagctataagtatgaaaagaaagacaatatctaaacaatcaagccgctggttgtttcatagagtggtagatatcttatataatctaagtcaacgtcgatatataacctaatcggttgccttctagtaatagacgttagccgattgaaggttagataacgatattgccaaagattatataggatatatgataactcgacgaattacataaacaaga

SEQ ID NO: 29084 - DNA, 8285 bp, Oryza sativa
  unsure (1)..(8285): unsure at all n locations
tatactaaacagaagcctaatatacttaaatgtaacaagatcttaacataaaggcagatttaacatatcaatcaagcatatggaacgtaaagtagttaaatcaggtaagatcggctgaaaccccaatgctactctaatcggcaaccagaaagcaggctagagattaatattctaatcacgacttataaggtcaaactcaactgatacagctataagtatgaaaagaaagacaatatctaaacaatcaagccgctggttgtttcatagagtggtagatatcttatataatctaagtcaacgtcgatatataacctaatcggttgccttctagtaatagacgttagccgattgaaggttagataacgatattgccaaagattatataggatatatgataactcgacgaattacataaacaagattagagtatcataaagatggaagcactaatcccgagaacgcaagccgccataacaagttttacctcttgttgaagatcgaaaccgatgcagctcaacccgaaagcaagaacccgtcgaaacaaaacgaaaataaagagggtggcgatgcgccgagattgtattgaatatgtgttagattgattacataaggctcggggtctatttatacccgagattacaaaatatgtccatgtcggacacgactcttatctctaacaaactctaagataccataagtctttgcggcagacttttgcccaaacatatctctaaggaaattacacagaatattctaattaatagatacaattgccttctcagaactctatccatgcatggcaatcatcatgaagcacgtttactcggtttgacaacatgtaccgagtcgtattgtcagaatcgacccaatcggctaaccttgtctgactcgaactccaccgaccttgatcgtagccgatttggactccacccgattcttgctctgcttccaaaacaatcttgatcttggattccgcttcgatctaatctccatctccaatactccaatactgaggttaccaaatttggtcgttaacaacggcatagtcgcacgcggcgttctggatagtgtcgtccggtgaggaggttggggatggcgacgacaacgacaacgacggttgtcgtccgttgaagtcgaagctgtcctctcgacggcgtcggcacgggagaagaggaacggctccagcacgggagaagagggaacggcgccgcggtggcgaggtcgtagcacgggacgagcagcggcgtgacggtgtcacgcagcgtggcggcgccgatcacccgccgcagcgacgaccttttcggcacccaccttcttcacccttcggcggcgggccacctgccctttccgaggctcgccgcacgaacgccagcgagtccgccgtcgtgtacctcggccgccacccccccttcaagaatagcatcgacggcaacacgccccccggccccggccccggcggcgcgttaaagaaatccatcaccctcgcatcattatccccggccttctcccgcaacgccgtctctagcgtcaccagcgccaccgccaccagcagcgcattgcccgcaaccattgatcacgagaaccctcacctttccctcccccaccaccaccttcatgaaacgccctccccgccggatccagccgcggcgcggtggccggcgtcctcctcctccgccaccgcatcgacagcgtgccccgctgctccctcccggccacctccgcggcgtcgtccctgcgtgtgcgagaccagagagcgagaggaaggagaaaggggaaagagaaacagagagaaagagaaaggggaaagagagagggtgacgtggacacctgccatgtgaggcccacatgggtcccatgctgacttagctgccacgtagactaaaaccggggtcaaaaccaccgagggacctcgggtgaccggttttgtatagttaggggaccccgcatatctggtattgcggttcaagacgttttcgtatctcggtgacaagttcagggacctccggtgcactttttcccacaggaaaaagtcaaaagcccacagccgagtagccacatttcagaaaaatcaagctacactgaataaaaaggagaaaggggaagcttcttcaagtaacttcttttcagataaggtacttacagattacatcacattttatatgaacatagtgcatggaattagtttcctgtttcaaactgtcaattttacggcacaatttatgtatctgctcaaaattcagtgctaacagaacaaaaaacttatatgcataatttatgacaattgattttatgcagattagccatgcatatctcaattttgatctaaatatgtacatgcagattagttctattctggtgaccaccaaataaacttatgacatgtctaaacttgaagggtctatcaaaagaatgaaaattcactcaaatgacaaacaatgtagttgttcttgtttttcttggttttgcatacatctctcacagaaactagttctcgactgcacacatgctgaaaaaaaatgacaagtagccttgaacaatgacagcttcttccaaggccaaattcagagcaaacaactacactcgacctgaccaaattcagaaccaaaaatattctggttgccatttttcacactggttgtcacatgatctctgacaattcaatgtagctaacagaacataactaacttgattatataacacaaaactcaacatgatatatcatagttttaaaacctaacaaaactaacttggtatttatattaaaaaaaacaattatttattagtagaacacggaactcttacaagggctgacagaacttgctcaaaaaaacatttcaagttatcttacaggagcaaacaaaacaaagtactctcaatagccatcaatgcggatttgatcaacatggattatataagtcttatgtatgcatgattatacaaaactatataaagccaggtactcttcagtactttccaacagatgacaaaactaagtactcttcagtgttgtcctatagatgacaaaacttacagagctaaacaaaactaagtactcttcagtgttgtcctatatatgacaaaacttgatcatagtgagtgattggtatttgctgacaagatagatagaagaagcaagcagaagaacaacacaaaactaattgctgacaaagcagaactaatacccatttcgaactaacaaaactaggaattctagtggctaacaaaactactaattacagtatttctgacaaaacttgaaagtagaggttaaagtatttctgactaaactagcaaaactaggaattctagtggctaacaaaactactaattgcagtatttctgacagaacttgaaagtagatgttaaagtatttctgactgaactaacaaaactaggaattctaatagcaaacaaaactaatctcttttcttacaaaactatgtttgttaaatgccatcataccttttaccttacctagacaagaacgaaatgcatgttagtgatcacccaccagaaatattttagttttaccaaatttagttaaaactatataccttttagttaaaactagcttaggtcttcataatgcagttatctacctaaaatggcagacaaaactaatttattaatttgattacaaaactaacatatttagatgcttagctcatcatgatgcggtcatctaaataacataacaggggagactacaggagagggaggaactaaaagtaatgcactgtgctaagtatttttaattgctaacaaaagtaaaaacgctatgtatcatagtgaagttctgaaaaaaatatattagtttcctctgaaatgttcagaacattaatcttgcaatgctttatattttttggaaaggagcagggttttagacactagcaaaaaaatggcatgatcaaaggaggacttgatggtactcaagctatttgaaaaactaaaaagctctcttgtcagtactaattgtttactgaattaggtaagtacagcttacagaaaaatcatgcttagttaacttcagtttgaattggcaaacaaaactaatactacccccacacaaatgaatcacaccttgctcacaaaacgtccccctcaaccacctgcaaaattcagctccccaaaacctgattttatacattcaacagtaggagataaaaaccattgagtaaatttcgtaaaactgcagatactttgcatgatcgatcataaaactacaattttaagaacttgtttcacaaaactacagattcaatttcttcgtttatcacaaaactacatatactttgcacaatatatcacaaaactacagatttaagaacttgttacacaaaactacagatttaatatcttcatttatcacaaaactacaggtttagtgtctccattatcacaaaactataggttttagcattattaaaacatgtagttttgtgataaatgaagacactaaatatgtagttctgtgataaacgaatacactaaatctatagttttgagaaacaagttcttaaatatgtagttttgtgatagattgtacaaagtacatatagttttgtgataaattgtgcaaaatacttgtagttttgtgaaatttactcaaaaccatttatgcattcaacagtagtaacagatctaaagcatttatacatcccacagtaacagattagagaagaaccccataaaaaatttgtgattacatcctccttatatatccaaacaaatcagcgtgcataagcatcacaaaaacaaaaataaattgctcaccaaggaacgagctggacagatcttgaggcctgagttttttggacccaaaccaacagcagcaacgtcagcctcacgattccccatcgccttgcctgttgaatgctgcaccagcatggattcatcaaagggggcagccgagtagggcgtggccgcctggcccctgaccttggcgacctcggagcttgtctccacggcggcggcggagggcgccacaccatgctcgccggcttcgcctggctgcagtgaatcgcctccgcaagatttgctccctcccctcgacgacatctcagcggaggccgccgcgctacgctcgccggctgagcccggctgtggccgaggagtcctactcttggcctcctctcgccgacaaggagaatcgctgccggcggattcaccccctcccctcagcgacattgtgcgctccgctgagaagtgggtggcactgtttcaaaataaaaaaaaaaaaaacgcgccctgtgtcagaaatatccccaaaccttgtttggattgggttacaaaacggatcctaacccgataaaaggactgcgggcccgataatgttgcacgaatctttatgtctatcaaaggctaggaatttgagtgtgatttggaaaaaaaaaacacgctggtaatgtacagtaaaaaccaaatacaaataaatgataggtacatctaattttatccatattattaattcatacatgataggtacatctaatattattcccagctgcaagttgagcatcagttcgtagttcttgtgccccttggagatggtctccccctgcttcttccccggcttcggcatcgtcggcgcgcgcatacacgacggtgtccgcacccatgacctgtcgttgcgactctcctcgccgccgtcctccccctcaaccaggctgtcaatgtcggacgacatgttgttcctcctgctcgacctcctcccttggtcagctccaacctccggcggccgccacatcccttggtcagcggcgacctccggcggcagccacaccggcttcttcgtcacgggctccaccccaggccatgtcagcaccttctgtgacggcagcagcgacaccgtctttccctcggacatctccagctcctcgagcagcttcgtgatcacccccttgggttcccggggcaacggcaccggcgggccaccggacggcgggtagtacacgcccttgccctgcgtctcggcggactcctggcaccacaggccaatgtacatccccgccgtcggaccaccggaacgtgcccctgcccttgggcttggcgtctcccacgcgccgtcgtaccggtcgccgtccgcccatatcaccgttccgcgggcgtgcatntcgccggcctttcacagtccgatgtactcgtggccggcgcgccagatgtactggcccgtgcccgtncctgcaagccgtcgcgcaagtgccgtcgtacacgtccccgttgacgtacgcttgcgtgccgcggccgtgccggaagttggtcgcccacagccccgcgaacgtgtccccgagctcgccgatgtacgtcccctgtccgtgcatgtacccgccggcgaagtcgccctcgtagatggcgcccgacgaccacgagaacttgccgcggccggccgcgcggccgccgcgccacgacccctcgtacatgctgccgtccgtccagagatacttgccggcgccgtgggggaggtcacagcgtaggtcgccctggtagaagtctccgctgggcagcagctggtcggagtggctgggctcgccgagcgacgcctcgtcgacgtcgtcgtcgtcggtgtcaacgtcgtcgaggacggagtcgatgtcttcgtcgccgtcgtcgtactggtagatggtgttggaggtggaggagctgacggagaggcttggggtgagcgtgatggggtcacctccagcggcattgccggtggcggccgccggtccgtcgaaggtgccgccggaggggacgacggagccgcgaaggatggtggagtacttgagcttgcggatgctcgcctcccacagccggctggccagagcagggagcgggttcatcttcttcccggtcgccgtcgtggcgtcctccgaggagcctaactcaacgtgacagggtcagaacgagaacgacgccggaggcggaggcagagcgaggctgtgcatggctggtgatgggtggcgcagtggaggtagcaggggcaagaaaatgtttggattggttggaggttgggaggagttgtcggggtgggtggatggcgctgccgccgctgcgccaaggagagctcggggggcgaaacatttggaaggaggcagaggtaacggtgagatagaaagccatgaacgctctaaaaataggcaaaagggagaaacagcagtagtaggctagctctggctagtagcatctcagtgtctgcttcgatcttgggggcttttcagttgatagcgctgagcaatgctcaggccctttccaataggctacaacatgagcatttcctacgttgaaatcgcagagaccaactgatgatgaactgatgctatcaggatccaggagctacggaactgaaatctgacagtaccaaactactccctcattcctaaatgtttgacgccgttgactttttaaaacatgtttgatcgttcgtcttatttaaaaaatttaagtaattattatttctttttctatcatttgatttattgttaaatatatttttaatgtatagatggccaaaaggcccgaggcccgatggcccggcccacggcaatttggcccggcccaagcacggcccggcccgatgggggtcgggcccgtgtcggcccggccggccgccgggccgtgcctggcccctccaccggcacggcacgatgggccggctggccaggcccgacaaaaaaataatagggagcaaaaatagacatattattcttcacagttcaaaggatagggatgtaaaatagacttattttagctatatatatatatatatacatatatatatatacatatatgtatatatatatatatgtatatatatacatacatatatatacatatatgtatatatatatatatgtgtgtgtgtgtgtgtgtgccagcccaatgaggagggagggaaaatagacttatttttcaaaagacacgatgggccacccgtaccatcgggccggcccagcacggcccgactgctagtgggctgttcctgggccggtggtgcagcccatgggccggcacggcacggcccggtgtgttggtcgggccgtgccgacccgacagattttggcccgagcatggccgtgccgggccgggccgcccgaatggccaactatatttttatttatacgtatagtttacatatttcataaaagtttttgaataagatgagtggttaaatatgtttaaaaaaatcaacggtgtcaaatatttaggaaagtaggcagtatctgtctcaacgacaatcaaaaatagcaaccacgacattcaagtacactgaaatcagtattaccagtaccaaatctaatatcgaa

SEQ ID NO: 29085 - DNA, 12582 bp, Oryza sativa
taccccacttccacttcaaattttttgcaaggggtcaagcacataaaggcttaacaaacttacctcaaaagactttcagctctctcattttggaggggccagcgccaacgctgccttcaaacacataacctccttgcccttgtcctgataatttcacagttcattagaaaacgtataacattagcccaaactactttataaggagaaagcgcacctgtttttgataaaccaaggccatattaacaatggcgtcagatgacaggacaggtttctgaccatggaaactgtgtgaaagataaagcagattgagattcctcaacctgtcccactctgttgtactcacatcatttctcagcgcctgcaaaaagagatacaaaaaaaattatgcacagcaggaaattagggtatgtcaaatttagaacttactttacagcaaatatcagctagcaagtagtttatgttttccaaagcattaaacatgcgctcacgcagcgcagtaactcttgctgctgtatggacatcgtcctgcagaaaaatcagtatataattataaccaaaacaaactaactaataggttaggttagccaaaagaaaaaagaaatcacattttacctctgctttaaacgtaacagattctgtatatgctattataccattcaagctccagtcaacaccttcgattggggtggaagaactcaatagaagttggacaacattcatctgtttccttttggctgcagcaatgatgggtgggtcctcaaacatgacctaggaagagagggaaaggggtgaggacatgaatgttattgtgactaacactacagagcacaccatttactttgaaaacaaaatgagggaaagagggggatgaagaacaagaggggaaggggtgagacctcatcaattgcgtctgcattagcaccagaatcaagtagaatctgaaccatagattcagatgaagtgaggtcagctactatagctttgccgattggctttgaaatctgaacattagctccagcctaaaagtaagaatatgtagatagataaggctaaaagaaaactacaaccagcatctgcacatgaagatattagcatatctcaaagagccaaacaaaaaaaaaacctgcaacaacgttttcatgcttgtaactgaaccattgtatgccgcacatgctaagggtgttatacctccatcaataatatcatccacctattaataaagacacattatgtgaaaacactagattcatattatgtgaaaacacatcatagcaaaagacgtgtattggtctttctcataagagcttcaagagcaatttcatcatccagtgctactgctgcgtgaattggtcctccataaagagaatggatatgaatgtcagccccaaagtctatcaatttttgcatcgcagcatatttgcctgacaatatatagagcaagaaagtatgtgttgggttgtgatgggattacattttgcaatagctaagaggaattcggaaatatactgaccaagaagaatagatagctgaagcggtgttaatccaagattatctttcatgtcaatgctaggttcaagctttgcaaggacatggccaaaataccctccgctgtttctcggaacagcaatatgaagaatcgtcctacctaaaagtacatttgttaactgaagttgaaaaaaatatgtgaatttaaacaaatgaacaacataactattacaaacctgtgctatcctttttgtcaacatcaatgcccaaaaactccactaaatgatgagtaagagtaacatgtgcacccttggcagagtgatgcagcacatgcatccctttgtagttaaaagtgcgaaaaagtgtcctatatgtgtaagtgcataacggcttctttgccaattctgcataccttggctgttaagaaacagaaaaaaaatgttgtaatgacaatgtaaatggtaggttctacataccttcggatgcatcgatagttgcggggtcggtaccattctcagccagctcaataaaccttaatgcttctataagacattgcagaatgacatgaatgtaagtatagatagagtaaaaacagcaaagggctagatgaagtaccatcgtcatgtttagtcagtttcttctttccagtcagttcccttggcgagctgtttgcatgcaaaaaaaaatttaaaaaaaaacaatcacagcatgttatgtaacctaataagagaacaattacctttttgatgacattgcaaaagccaaccagagaatgttatataacctaataagagaacaattacctttttgatgacattgctaaagccaactagaggtcttcggctctggaaaaagaagggaaacagcaatcagccaccaacaataaatctcattaaacatgagagtgccacgacatatttttacaaggatattgcaatgaaacaacacaaaatgtaaaaagggcatgacttatgaaagttctcatgtcatccagttggatagtaaataatcaaaccaaacaaatattggtacacccttaaacacacataatcgagtttggatctaagatgagacaatcttcacagctaaaatctcagtagttggccgttctgccaagcctgccacctccgatgaacccaaaagtccgaacacagaaacctgggcgtatcaaaatcccagttgaacacccaaaatcctaaaaagaaaatctaagagcaaatcgcattgattcggataataaaggaacgagacctttgttgagaaccggatcaagaaccccaaaatccgacacaaaaacctcacggcatcaaaaccactagcaacatcacacggattacatcgcaaagcaaggcagaaatgccaaaatccgaaccaaaaacctagcggaccccgatgaaccctcaaatttccacaacgaacaccaaaattcaataccaaaccggatcaacaccaccgacacatgattcaccaatgtactaaaaaatacggagactaaaaacctcacggcatcaaaaccactagcacatcacacggattgcatcgcaaagcaaggcagaaatgccaaaatccgaaccaaaaacctagcggaccctgatgaaccctcaaatttccacaacgaacaccaaaatcagataccaaaccggatcaacaccactgacacatgattcaccaatgtactcaaaaatacggagactaaaaacctcaccgcatcagaaccactagcacatcgcaaggactcgcggatacccgatgaaccgtcaaatttccacaaggggcaccaaaagaaagcggatcaaaactactgaaacatcgcacgggaaatgccaaaatccgaataagaccccgccggatcaaaagtcccccatgaaaccctcaaaaatacaccatgaacccaaaatccgaccctaaaaaacctcctagatgatcaaaatcactgggcacatcacacggattaatcacaaagtaaaggatagaggcagatgttaccatgggcctgattagtttggagatgagagctggctttccgtgttagggtttaggaattaggatgcggcgggttgggcaggcgcagggatgaaatttgtagggtcgggacttgcgccaggggtggggcctaatttatgaacttgcgtgttgcgtgtgggaactttcctatgaaatgttacattttaggccctgtttaattcccaaattaaaaaattttgcaccatgtcacatcgaatatttggacacatgtatagagtactaaatatagaaaaaaactaattacacaaattgcgtgtaaattgcgatacgaatcttttaagtctaattgctccatgatttgacaatatagtgctaaactaaacatttgctaatgacagattaattaggcttaataaattcgtcttgcagtttctaggcgaaatctgtaatttgttttgttattagtctacatttaatacttcaaatgtatgtccgtatatctgacgtgacacgtcaaaattttaatacttcaaatgtatggcccttggtcttaggcctggtttagttcccaactttttcttcaaacctccaacttttctatcacattaaatttttcctacacacgcaaacttccaacttttccgtcacatcgttccaatttcaatcaaacttctaatttttgcgtgaactaaacacacccttttgcttattactcctgattcgaaaaaaaaactaactaaattaaatgggactagaaacatcaaattccctccgtcccataaaaaacctaatttagaaccggatgtgacatatcctagtactacaaatctgaacaaaggcatatccatattcatagtaatagaatgtgtcacatctggtactatgttggtttttatgggaagtactccttccgtcccataaaaaacgaatctatgactggatgtgacatattctagtatgatgaatatggacatatatattcagatttgtagtactaggatatgtcatattcggtactagattgaatttttagggacgaagggagtagggggtgtttagatctaggggagtaaagttttggtatgtcacatcggatatacggacacacatttgaagtattaaacgtagtctaataacaaaacaaattatataatccgcctgtaaactgagagacgaatttattaagcctaattaatccgtcattagcaaatgtttattgtaacaccacattgttagatcatggagcaattaggcttaaaagattcgtctcgcaaattagtcgtaatatgtgcaattagttatttttttagcctatatttaatactttatgtaggcattcaaatgttcgatgtgacagggtgaaaaattttggtgagagatttaaactgggcctaggttgtttttatagagtgagtgttttacaaatagacacctaaacacttaggctgtattcttgggtgagggttgggaaccctcacctcccgcacggatggattagtgtatgataaattacaccctccgttccataaaaaacctaatcttggattgggttttttatcggacggagagaataagtgtttgctaaaaaaaacttaaaaaataagttagtatgattttttaaagcaatttttctatataaattttttgcaataattataccgtttagcagtttggaaagcgtgcgtgcggaaaacgaaggagtagaggatgagaacaggcagtgccgaacaccgccttaggccatgttcgacttagaaactaaggatcagtttagcacatttttgcctccacctcctctagagctgagtctaggcaaatagtttaactacacctaaaatggatgggtggagcgctattacaaaatgatctaaaaatgttgagctaggtttagacagttccacagctccactctaaattcaactcttgaagctaaatttaggagttggagctctaccaaacagaccctaatatttcgcgcacataaaaacaaagcaacttattagcacataattaattaagtattagttaatgttttctaaaaaatattaatatggatttttaaaacaactttattatatatttttttttacaaaaaagacaccattgggtagtttgggaaacatccacgtgaataacgagagggtagaggttgagaaagttgagagaataacacaacctaagacatgtttattaggcatgtaaatattttaggatatcatcgacgggttatacccacataccagattcggagggtacagggaaatgtttgtactaggggctatgtacacgagattatatcaagcagacgaagacaatggtttatactagttcaggtccctcaaaaggtaatagctatactccaatttatatggatgatgatgggaataccaaaaggattacaatgcgtctgccaagaatggcccgacgagatctaatcggtgaacaaggctatggtttcatacggattacttctcactgtggctggtggctatgatccgctactccatggaagggacttgtatttacactgatagatgtctccctctccaagtagaactcgaagaaacttatttcgatatagggctgaacagaccttatctcttgcgaataagactcttacaccttctattttgaagagataatttatttctattatcgctgtcgtcggcgaagccggggacggacgtccctcgagcccctccgtcgagcggtgcgcttctgtcgcccgttgttgccctctccttcacctcctgccgtctgccaccgagcagcgctcttctgccgtcgagcggcactcttctgccgccctccgctgccctctcatccgcctcccgcagcatccccgcctgctgtcaccgcctagctacgtaagacaaggacaatgagggaggtgaggatgaaaagtaggccccacatgtcagtgggcccaaaattttttttgaatgacaaatggggcccatatatatatatatatatatatatatatatatatatatataattctaatgtcatataagcgtcatgtgggatgaagactaggtcaacatcaccacgtagacaccatatcagcgaaaccgtcctctaaaaccactgagagagtcaaattgcaccaattttaatagttggggatcaagatatcagtattgcggttcagggataggaatatcactagttaaggaagtcatattggacttccaccgaacgttcagataagtgggtttgcgccgaacggcgtatcagaccctgtctcgcgctaggcggctcccagccggcaatcctaaccctcccctccaccacccccacccaccgacaccgtcgtcttcttcttctcccattagtcgctactcgccatggccgcatcccgttattaccttaatctggattttgacgtttccgatatgaagcctctgcccgactactgcttttccgaggcctgggaggtgtgggaagcccatgctgatcaatcggattatgaaagggaacaggctgttttgagggtaaggaaggaaagctctaaggttgatttttttttaaaaaaataattgattgcgtatctacattctcccgaattactatcattcattcgcatggttttttggatcgttttgtgttagtacgcccgacgccgtcgccttcttcggtggacttggttctatcagggtgcacttcgttagggcttatttgtatatcaggctgtccagattagtcctggtttagaagcgaaaaaatgaactaaaattccatccaattccatgagattagtgccacccgaactagaccgaaatttcgaggggtccgtcggtagacatccctgcggaaaggggagaggtagggcgtgtcggtgggaaaggagaaatgggaggtagagcgtgttggtggggatgaccaagggctgaaccccaaaaattctagtcccacggatgggagtttgcataaaggtcgcaaaatctcagcccgtttatttttcagatttaaatctttgtgttcgatctgtggtatatatacccgctggaatgctggttagttaactaatgattgcgtggatggaacacgtgggataattttgcatctacagttctattttatattttatttttaatgtagaactgttaccggatagagtaagtgctgatatgcatgttttaggcctaagtctttgccatcttctgtttgcattaaacatcagttccttgcattcaagaaacagacgtggcaacagaagtacagtctttaagaatgctacattgtcttatgttctgaaattattggaaatgaatttgctagatgagattgcgccattttttctgataatttgtgttgtatcctgttgtatgatttttttttgtatttcattctgttactcaatttgcataaatattcaactaatatttcataatatgcatgcagttctatgaagaaaaggagaaggagataaaagctgcttattctgaagccctaagtgacgaggatgatgaggagaaagatggagaaatatgtcaggtgatgatagctatcgtgacagtctatttgtagtgcagttgagattcattattcctcatgattattgactaatggttgcatctgttcagcttctgggttacgaagaggaacatggacaagtctctgcagggatggaagatataccagaaaaccatgtcaaaaaaggctgcacttacgcgagcccagagtacctggcggagctaactcagaaaattctattggaaataaatgtaaatgaagaccttggcaatgtaaggcttcaaggttcattcatctgcgtgcttttttaaatttatcttttaggtggttgggcagtttagtgcccagcgcagtttatattgattgataatttttctgccaatatgaaccgagatgaaagttctgcacctattttccttttgtttatcttgtactctgttatgctattggattgaacagccaggtgattaatacactcttattattttctcttttttatcgaagggtaacacagttgtctcttctggagtcatggaaggtgatgaggacaagaaaactgttaaaacaggttaggtgctgatgattttaattttgatttgccgctctgtttttctttttgttcaacaaaactaattatacaacagccatttcatattgcagtttaggttagttgtcaatcatagttcacatctatctctaatgcaaatgtctttttaggtgctatgtcatgaaatgaagcatgctcgtaatgaaggaggacaagtatttgaaggtgagctggaacacaagaaggcaagaatggcagaaagctcacagaacaaaggagaagatgaagagacccttctgccagtacgtaccgtttgacttgacttgatttaattgaagtgttctcttgaagttaatttgatttccttacgagtgttctgatgggccaaacttttgtacctgaacaatcaagatatgctacttcacatttcgtatataaccaaattttgatagggctagcttggaccccttcataagtttacttgaaatgcctacttcacataagttggaacgtgcctatttaaatttgaaccaatctttaggctttcaaatcagatagaaatgctgattcaaataaatgaactgggacttttggagtgcatttgttccctttaaaactacatttctccaattagtgctgagatattgtattttttcatgaaaataactcgattcgattaatttttgaatgttctttggtaggggtgacatggcattttatggttgatctaccaactttggtatttatttgcagtgaaatttggtttctgcacagaaagtattactacttcagttatagtgttcgctcgcattttagttttaacacttttagcttgtatgggcagatggggttttgattagtcaaaagcagttatgtgctttgttgtataagatgatttcttttcgacgcaatgtggtgtattttgtcctagaaaaagttcatgttgctatccgttgagaatgggaggtttgtccaaatgtttgcatacttttggatgtagttcttgtgcatctcaattttgcatttgtttattttggacctctgttgacacccgcatgccctgaaaacttgtttgtttttgtatttagtttattattcttttgtaatgtccaaaacttttttgattggtcgcaaagcctttcttttcttaccttgcattgtgatcgctaagctgtggtataacattgtgttatttcctgacaggtcggtctgacaccggatgacatctgaggtggctaatcaatgtgattcaatagaaactcaatctgctgcagtggtcctttggtgtcccaacattgttaaaaactgtgaacaacgttcatcgttgttccttgatgtcgacttctgtctagtgtcttgaattggcaagcctgaataatcactgttggtatttttaatatggggctgtatagatatcagtcaactaaagttttattaccaagttttgctcactttttatttacggcaggcctgttaagggataatatggtccgttggtgtacatgccttagagattatttaggctgtgtgatcgatcagtgagctttccttgggtctttttaagtgggttctgttggggtggaaaagctaattcgtacatacgaggtagtggcccacatttctatttgaaaggggaaaaagtctactttgactcccttaaaaaggtaggttcgtattctcaataaaaaaaaaccgagtttgacgacttcctcaaatctcaaatattaaaacctgcacagatcaactactatgacaggattgaaggtgtggtgttaaatgatgtagcctttgatcctggtcaacactgctgtcttagttggggtaatgggaaataaagggcgggggcttcttggcgggtttcttccacgtccagtgttccccatctcgttgcttcggcaggaggtgtggctgcggcggcttcgtcgacggcgaggagggtgtaaccgtgtaagagcagggatagtgagctcgccgagtgagggctcgtcggcatctgcttcgcacatcctgtatcgggtaggcccattcgactacgagctggcagtggcgtgcaagtccaggaccaaggctgcgaggtagatcttgtggagcctagacaaccttggtcagtgatatttcaaataccccaacgtgagggtgaggtttttttcgttttgctagctaggctggttcagatttgtgttttgggctggagttctagggtttgttgttgcagtctggtgggtgcgtgcgatttctttgcttggtttgaaggcccgacgagcagtttcatcaaagaattgttactaaagatggcaggttgaaggcatcagagcttgatgtaactaggcaggagttggctacatcaggctgtgttcttttgtctgtgttaccaacaccatttctctcgtttttcgtgtgcacgtttttcaaactgctaaacagtatgtttttttttaaaaaatatttctatacgaaagttgtttttaaaaaagctaatacttaattaatcacacgttactggaccacttcgttttctgtgcgaagacaactccacctctgacagcttaggattattataatctatattattaattaagagtaagctgaaacagatagcttattatgatatattattataatctccgaccctatttgattcagcttaggattattataatctggattattaatagtaagctgaaatggatagcttagggcctgttcactttgatgctaaaataaaccttaccaaattttggcaataccaaaattttggcaatgttggcactattaccaaattctgacataatttcttatgtatttactaaaatttggcaataaactaaatgtaggcactcttttggcaattttgctaaaaaatggtatggttgaaagctagattactataatatggtaattcactctaaatgtgcttttttaattattgggtggctaacagctaacaaacagttaataatctagagaaacaaacaactaacaacttgttttatgtcggtttattataatccagtttatagtaatctggctcaataatctagattacaataatcttaaactgaaacaaacatggcctaaagatagctgtgttaaaggataggaataagttcacatgccgtccctcaacattataccgagtttgtttgacatcccttatcctcaatatcagaaatcttcacccctaaactgtacaaaaccgtgcattttaggtcccatagtagtatagaaacctggttttgctgacttagcatcctagtcgaaaaaaaagtatgtggggcccacatgtaagtgagaaaatgatgtgggcttcacatctcttctttatttcctttttctcttctcttctctccttgtcttctcagtcggcagcagatgggggagaggcggccggtggcaggcgagcgcacatgaagaaactaggcggtggttgtgcgcatcgtctgcatcgtgcctgctccgtccgccgccgccccgcgctcacacactcctgccggccacctccccctccctcccaagcttgtgaagaagagagaagaaagaagatgatgacgtcgtcatccccgggtggtttcccacggccgcacccgacggcgggggcagtggcggcggcggcagaacaacagcttggagttgagaaagtcgtagcgtgtaggccgggcaggtggctgcgccaatggtgacgacattggcggggacagaggcatcacgaggatcgtcgggccggtcatccctccgagcaaggggaggtggagtagcaacgaggaggaggtggacacccgaagggaggaaagcagtggggaggtggagtagcaacgaggagggctaggacgcagccagttgatgccggcagaggagccactcggcgccgaagcaccagcagaggaagacaagggattcgctgctgcctctgacccctttgccgccgggaactgaagaagagaataaaagaaaagagaaaattaaagaaaaaaagagatgtagacctcacatttttctcttttcacttacatgtagacctcacatacttttttatatttttttctgactaggatgcacgtcagtaaaaccgaacatctatatactactatgagacctaaattgtatgg

SEQ ID NO: 29086 - DNA, 10856 bp, Oryza sativa
  unsure (1)..(10856): unsure at all n locations
gcgctaacacactcntgcgggccacctccccctccctcccaagcttgtgaagaagagagaagaaagaagatgatgacgtcgtcatcccgggtggttttcccacggccgcacccgacggcgngggcagtggcggcggcggcagaacaaccagcttggagttgaaaaagtcgtagcgtgtaggccgggcaaggtggctgcgccaatggtgacgacattggcggggacagaggcatcacgaggatcgtcgggccggtcatccctccgagcaaggggaggtggagtagcaacgaggaggaggtggacacccgaagggaggaaagcagtggggaggtggagtagcaacgaggagggctaggacgcagccagttgatgccggcagaggagccactcggcgccgaagcaccagcagaggaagacaagggattcgctgctgcctctgacccctttgccgccgggaactgaagaagagaataaaagaaaagagaaaattaaagaaaaaaagagatgtagacctcacatttttctcttttcacttacatgtagacctcacatacttttttatatttttttctgactaggatgcacgtcagtaaaaccgaacatctatatactactatgagacctaaattgtatggttttgtatagttgaggggtgaagatttctgatattgagggtaagagatgtcatgtaaagttgaggggctgtgttcgggaggaggggttgcggcacgcaaaacgaagcctctattattgcatgattaattgagtatttactatttttttaaaaatagattaatatgattttttaaagcaacttttgtatagaaattttttacaaaaaaacacaccgttttagtagtttgaaaagtgtgcgcgtggaaaacgaggggaggggttgagaactagtactaccgaacgcagcctaatttgtgagatgtactctcttcagtcttcccttccaaaatcacacagaaaaccctcacacagaaaactgccgatggcggacgccgtcgccgcctacgatgcgctgcccgcgccttcctcttcaccctcacccgcgttgccaccgccgttccagcccccgccccccgataccccgatatccgacgccaccccatccgccgccgaaacccccaatcttcccgacacccccgcctccgcaacccgactcccccttatccgacgccgcgctcgccgtcgacgccttcgatgccgatgcctcagccgtcgccgcgccacccgacgacgacgggaccaacccgttgggcggcgccatgaagcacatggccctcgcgcccccgccgtcgccgagcaagaagtccaagaagaagaacagcaacagcgtctggaccaggcccaactcccgcaagggcaagaagaaggccaagcagccggccaacgccctcgccggcggcagcgccggcgccaacggccggcttcccaagcccttcagcggcgacgacgagctcgtcctcaccccggcgccccgattcgcggccgagcgcaacgacgacgcgcccgatctgcccgtgctcctctcccgcgtcttcaagtccgacaaggtcgaggtctccgacgaccgcctcaccgccggcagcacaaagggataccggatggtgcgcgccacccgcggcgtcgctgccggcgcttggtacttcgaggtcaaggtccttcacctcggcagcaccggccacacccgccttggatgggctaccaacaatgctgacatccacgctcccgtaggctacgatgtgtttggatttggataccgcgacatggatggtaccaaggtgcacaaagcatggagggccaattatgccgatcaaggctatggcgagggcgatgtactcggcttctacattcatctacctgatggagagctgtatgagcccaagcagcctttcctggttcactacaaggggcttcctttccgcgcagaagctcccaaggcagctgagcagaagacgccggatccagttcctggtgggtatcattgtgttacttcatgtgtctgaataaactggtggtagattgccagccaggaaaacaacacacgctacttttcacaaaacaacttggtatgaactagcaatttcacaaataataagattctctatgtaataacaaggatgcgtgtttcatgatgttatatggaatacttggagtaatgtagaatttgtaccaattacggaattaccggtagtagatttacatagataaagtgatttaggatccaggacaacagattcgagtgctatttacatgtatatggttatataggaaatattagaacttccaatagctgtaatgtgacagtggtgcacttgtcctaacaaaactaaaaagtacgtttaattaagtttttgcatcctatgtttgagcaagtttctgatctctgtttggttggacacattggtacctactcctacatgtgtttcaagtcactgcacctccattgcacaaactagaaagtagtttctactcactgctcttgaaatcatttccaaagcataaagtgtcttgtaccaagaaatatagctattgcacaaattgtcatcattattattggaggttcttagcgctgaagcatagtgaatgcagcatacagttcataagtcacaatgtaagaaagagagcaagaaatgcagcaaatgcttctctagcaatgctctcttgagaggcacaacatgaaaaatgtaacaatttgcttctacagttgtgcgtaacttattgatttgccactcaatcaaagacaagaaacacctaccaaatgttactaaatttacccatattgttctgttcaagagtatctatgtcatcatctgaccttaaattatattcttgactgtttgacagtgcatagtcttttttgtattccatactagtaaaaacaaatacctgcaacctcacttttttgagaagataatatgttcttgactattatatcctaaagtataattacttatttggttctggaatttatctacatcaaaacaagtactgcatgatatgctgtaccaatcctaactcgaaggtgcaatcttcctactatatcataggaggttacttttgggagtgtttacttatccagccatcattgcaatcttatcgtgcagaagattccattatgtttatgtgcacatgaataaaacgggcagttctttcttatctgttttcttatgatgaagtcagaaatcgatgactgtaaagtttttgttgcctcaaagtcagtaattgtaaataagtgcacattagtaccttccattgaatcactatattttgcttacatggattaaaaaagggatttcttgtttgttcttcccatagaaaaaaaatcagtatcctatatgacatttacacaattgcacttaaatgacatttcctactttctagcatccattgttagatgctagaaagtatccatcgtaagtaggaaaacaagggatgctagaaagtagcaatttgtgcagcctctcctctggccttcttagatattccattttaatactttatggttcttgcaaatgcaggtagtgagatatgctacttcaagaatggggtatgccagggcactgcttttgtggacattcctggagggcggtactacccagctgcgtcaatgtataccctgcctgaccagccaaactgcgaagtcagattcaactttggtcccaattttgagttctttccagaagattttggaggtcgatcagttcctcaaccaatgaataatgtgccttatcgaccatatcagctggcgaatgaggtgcctgcagaaaacggtactgctgaaaaaaccattaaactgcagtgaaaattctgctttagttagagcttatgtaatccggttaaacagcacgcgggctgatggctatagctggtttagtaatgtttgtctggttagatggatgctgtagttattgaatatttttcacttgatggtttggccatttgaccttcgtgtagcaacgcatgccttcaatctttcccatccatgatggggcgaagttaatccgagatgttggggggcggtaagggcggttgcacgtagtctagcagtgggatgaggattaagggcgacagtttaatactcataatatgtaatatttggtcaataatgtttggccgaatcttatcctaaggaggagtaatacaaatagatgagaggtacatctaattttatccatgttattaattcataagaaggtattatacatttttctgtggatacatgtaagtagcttcgttaacagaaaaatgtatcaatgaagctgatattatacagaaaattttctgttgcatacaaggataccagcatttatgccagatgatactcgacctggggtaggcaggtagtgtgaattacctttgaagaaaaaaaattgaaacatcaatatcataatatattataacattttttataccagtgcagtctccatgtaaagaaacacaatgtttgcaaagcaccggacctttaatttccaatgtttcatatcttaatcttaaataaacaaatacaaaaaccagcttcatcattctgcgagataacagtgttgaagagctggaagacaagtgattttctaacataaatatggaatttgaaaatcctatataagacagttgacattttgcatagttttaaatgcatgtacataccaacgtgagagaaataacttcaacttgagtgccatttgattttcagatggctacaagccagatcggttttcaatctgctcaatgccatttctcgatgttgcagcaatgaggtcatgctaggttcactccttttgcgtgccattttccgggagatgttcttccattttgattcgaattcacaggctgcagacaaataattcagttaataggaattcttacgttttggtcaaacttgaaaagggaaacattcctttcatttttatgcaaaagatgcagatggcacctgagtatttaaagcacatagacaatgttaatgtttctctctgcagaaaaagaggcaaataactaaatattttctttatgccaaaggatcaatgaacatgatgaaactttcattataccaaacaaaacaagaaaagaatgaccagtacagacagtcatgtactcatgttgctacattatttcggtatggctaaataaacatagctttctagggtaatgtcataaaataccaacctaagatacaaaataatttcagaagaaagtgcaatgacaccctaaatcaagtgaaaactgcaaagaaaagctgcacttacaagctggagcactctatagctatatgcaattctagtaacatcttaatcaagtctgaggctgttggagaatgatggttacgatcaataaccttcacttctgttgacaaagccttcaataaggcatgcgagattccatggccttccagctgatgaagctttggcgccaccttttaattcaccattatgttgtctcaggctgaaataataaaaatactgtcatcaacacacaattacaatttaaatgtggtatgactaaagatgttcaaattttcacttcatactttctaatcatgttaattgctacatattcaagcatgtaaatcgtacaagcatgagcaagataactactacaatatttcaaggcaactgcaatgtatatatggagaaaaggacaggctctgatatacagcacgagaatatcacagtgacacaaatagacacaacttaacaaacatgatgaagacaggtagagacaagagcagataacagcttatttagcagaaaatattctgcatgtttaacctacattgctagaagtagaccaaactcaggtttgattcatgtgccaatatcttcaccaaaaggagtaggactaaacaatgacctgaatttcgttctctcccaagtcccataacttttcacaacaaatcggccgcaggaactgaggtcgattccaacctcctcaatccttattatttcaaacgctctgcgctgcgcctacttgctactcatgctctaccacaagtctacaaccttctgagacatctcgctctagaaatcagacaggagtaggagacagggaagcaaggtaagctgggaatcaccggcgagggaagtcggtggtgacgccgacgtaggtgcgggggatccgggaggaggcgatgaggtagacgcaccaccccgacgccgccttccccttcgcagcctccgccggcgaactaccgggcgcgcacgacgccgacgcggcggcggcggcggcggcgggctcgccggatttgggaggaagagcgcgagggatcttcgccgatcggaaggtagcggagagcttcatctcccacctcgccggcgaggcgacgacgccgtgagaaaattttcgaattggggatatttttagcacgtgcttttttagaggagtatcaggccgtggcccgtggggcgtgttggacatgggccgaatggacaaatgggccgtaccggaatgtgagcctaattcgacacggccagtttaagcctgggaaacgtgcgtcgaaaatgaattccggcatgcttcgaacgtgtgaaaatatgcgataaatcagaaatctacgtgatggaattcggatgattatattgcagaggttgcacgtgccaaataaccgtgcatatactagctgggaaatggcatttttctgatacgcgtaggggaaaaggctcgcttgtgccaaatttgaagctgggtttgggttgtcatgaaaggcaaatggagaaaagaattaggcactagggtgagtgtaaatcagagggtggttaggcagtgcaaccctggaaagtttttccaaatgtggaatgcaagctcgcggcatgaaagataactgggcgctaattgcctctgcattactgttcctcatccaagtctgacactatgatgttcagttaacaggttgatgtcgtgtaaaaaaaataggttgatgtcaagatcctcagacatcttaatgtggaatacaaatctcttttatttctaatgggaaaatagataaccggcccaattagtgtcaaatgcataatctgaggacacctggtgtccaataatgcaacactcacatggttcttgcttgaattatcttgaagtagatgctcaatctaaaatagtcggttatcttgtactcaaaatgatctagtgcaaactggcggattgtatctttaagtccaaaaggctttctgaataaaggtgcttctgaatttcatttaacgactgtcctatcctgaaattgtcaaactgacaaccagttcagccgaactagcgcgtatttaaattgcactgatctttcatcttaatattaaaatttcctgcaattttatttggcagaaaaaactagttcatcagttagcttgcggcattgccacgtgcagcatgcaaagcacaagaccaccaaactaacattcctaccccagcatggctgcatttcactgtaatcttcttcagatataaacatgtcaatttgcttccgaagaggctggagccttgcatcagtcccaagcagagtggatcattttggaggtttggccgatcaactttcgagtttttggttgcatatagtcacaaccaaactcaagatgcatgatgaatttcttccaagaaaaaaacttttggattaattgcccgaaatgtgggagcagagaacgcgcagctatgaaagacacggtgcctgacaacgcatttcccgccgttttcaaatcaacagaagcaactctgagctttccctccatttctcatgctccctgcgtatataacaagctccatctcggatcgagcgcatgcagcggtgacacatggcggcttctatctccggagctcgcacttgctaccctagcgcggcggtggcgcgacgtggcggcggcggcggccggtgctgctccgtcgtcaggagctcgctggcgacctcgtcgccggcgacgtgcaagccgtcagggatgatgcggattggcaggcagtggacggagctccagggtgctcgtgattgggacggcctgcttaacccgctcgacggcgcgctccggggcgagctcgtccgctacggcgagttcgtccgcgccgcgtacgccagcttcgacttcgacggcggcgcgccgtcgtcgtatgggtcgtgccggtttccgaccagctccctgctgcgccggtccgggctccctgagactggctaccgggtcaccgggatcctccacgccgcgtcgacgtcggcgcccggctggctgtcgtgcaggtccagctacattgggtacgtcgcggtgtgcgacgacgaggacgagatcgagcggctgggtcgccgcgacgtcgtcattgcgttccgcggcacggcgacgtgcggcgagtgggtggacaacttcaagtccactctcacccacctgccggcgcgatccggcgacggcgaggcggcgccggcgatggtggagagtggattcttgaggctcttcaccacccccggcgaagcgcacggcagcctgcagcaacaagtgcgcggcgaggtgcagcggatcgtcagcgagtacggcggcgagggcatgccgccgttgagcatcacggtcaccggacacagcctcggcgccgcgctcgcggtgctcaccgcctacgacatcacgacaaactcccccatgcaacgccacggcggcggcgacgacgacgacggcgaggcgccgatggtgaccgccgtgtcgttcggcgggccgcgcgtgggcaacgcggcgttccggcgaaggctggaggagagcggcggcaaggtgctccgcgtggtgaactcgaacgacgtcgtgaccaaggtgccggggttccccgtcgacggcgacgactgcggcggcggcgctcgggagggcgacgcgccggcgaggaggaaaccgaggttgccgaggtggctggtgtccaagatggggtgggagtacagcgacgtcggccgcgagctgcgcctttgcagccagggcgacacggcgcgcaacgtggttgcatcgcatgaccttgatttgtatctcaagctcgtggcagcctgcacatattagttaggacctgtgtctacgctaacacagtaattaacacagtaattagcacagcttagttaggacctgtagccaatgcattaacacgttaggagtaattaacgcacgcacctcagtttgctgtcaaacggtgattcttttttttttttactgacagagaacaggaatagatcaactacagagtgacagtatcagtcattcacagtttctgtaaaatggtgattcttttgtaatgacaaaacgtaacggaagttaaaatgtcttttgacctgttcacattactgttcttccataacagttcatatactgttcttccaaaacgtaacggagtacgtcatttgcttagcagatgacttaacgcgtacattgtcatggaaaattggactttcgatgtttttttcttttcgtagtaaaacaaagcaaattacgggctgttctgttataaaaatggatgagctacatattatcactgtttcagctcgaaagcatggccatcccgttctttttcccttctgcaccggccaaaacgcagaacattacaactgtcaggtgttcatggcactgtaattcctagtacaaatacagttttacctctcgcaggataaactataagtgtctaatagcatcaggcacgttgcttcttcccacttggcatatcatcatcgtaatgcccgccatcatgccctccatctttgtcacctttctttctcgcaagtatcttgttgattttgtggaggtcattcgtgagcttctggtccttgttctgcttcctcgtcttcctgccatcctgcatcttcaccccaaactggaatgcagccttcggcatggcttccttctggtcgttgtatgtggcccactcctcttctgtctcaaagtcccacctgtgaagacggcccttagcctgcaaaggaatcatacattataatgaagctggaaataggtagtattaagttttttaaaatggatagaaaacatgagctcaagaaatccacaaaagcaagtttatctttttttttctttgaaacagaggagaaacagctcctacccttaccaaatttactcttaaggaaaagcatcagttcagcgacaggaaaagacgaaaaaaaactaaaaacatccactgacgggttacacaacaaactgtgccatcccacacattctatgtaacccctaaaacaggctaggtgaaacaggtccatcaagtccacacaagaggctaaaaagcaactttatctgctataacgaagggaaacgaaaaaaaaaaaaagcatacagaatactacagtactcacttacccggccacccatgtccatcttcgataaatcatcttcttcatcgctgcctgcaatctcatgattatactcctgataaccaggatagcactcggagtaactatccgagataaaattaggatctttctcccgtgcatctttctccctcagctgtttaagcctttcatcatcgcgtttgaaaacagaaccaagacctctgtctttatctgcttgagtcatcaaccttggatcctgggttatatttggatcagctagtacatcacagtcctgagcgctttgttgcatgtactgttctggataagccatctgttgttcgccatactgatagcctgaccactccccttgatatccagcagctaccatttgagcttgaatagcatcgtacgcattctgacatcagaagagaacttttaggaaatacaggtcaagaatagaacaagctaataaatggctatttcagtagaaggttgtaaacaaacacttcgtttgtctccaacattcgacacgcataactataattgctcataacacagtagaaccaaagttaaacattagctggattaccgg

SEQ ID NO: 29087 - DNA, 3235 bp, Oryza sativa
tttgtgtccctctcctttttctttttcttcaagactttcccagatgatccaagtcgaaggtatgacatgattttagcaatcctatcaagtacagaaccatccacactgacagttaccatctcctgcataagcaagaagaatactgaggaaaataataaatttcaggaaacttcaatgtggcatatgatgtattgccataatacctctggaacagagcaatcagctttgctcctgtgaagtgttgtcggaatatcattggtaagtccatcctcctggtttcattaatgaaattaatcactctccagctaaaacccgtagttcaaatcaaagcagggaatgatgaaaaaaattatttgcaaatagcataaatcaatagtactggacatgccacaataataggcaatgcgaacacctttactcttattatcagaaaatcatttggaaggttaaatccattaaatgaaaacattatgcatacaaaatatgatctagtgatgatttctgacttgtaagatggatcatggtcatagtgaacatactgtatattagtaatcattgaagccatgatgcatcgcaatcacaatttaaatgtgcatgacataaaaatcattgcaccagacacatgtaaccgcaatactatactatagtctataagtatgatatttgaagagttctttcatccttcctttatttcttctcttgtttgcatattgtggagtgaagtgagagtttgagcatgttgattgtactgcattccaggtgatgagcagagaaacaaacaataatacatcatgaaacatagtcatgcatcatgtatactataaaagctgacaaaacataagcatgttatcatttacatgctagcacagaattgaaaaattcgaaattgaaatagcaataacgtttatttgcaacatagcagcatcatgtttcgtacagatgaatcctgatgagagatgaaaataaaataatatattgtagtatcatattatgaaggaaaatggccaccaccaattacaaaaaaaatgtaattaacataagggggaactttgaaggaggtaccatgttgtaaataaatgccatccgaccaggaagaaacatttcattcgactttatgatgctttgtggctttatgatccattgatagacagactgcaatgaaccaagaactgcttttagtgtccatgttacattacattacatggtcaataatataagcagccaacatcaattctattgtaaattaaaaggaaacctacctttgcagctgcagtgcggaatgagactgcttgatcttcttttgtagacctgtacaacacaaattcacaggctaaatatatgtatcctagttaaatacaaactcacgaagtgcgtccagacaaggacgaaggacatgagaccatattttcatagtgctacatcccaaatcaagagaaatgcctataagcaattgttgtattattccaatgagaatgctgtacagaacatcatgtttcactgagaatgatccagcagccactataaagcatagtaaaattatgaataattgaaatgcgcagaacaattctgcttgacagtattcatccacaacaaaacaggaaaacacctactaaaattccaacaagagaaaaatggatctctctcttaacttcacctcccattacaagaaataggactaggcctaaaaaaggttgacaatttgttgtatcacaaaataattaatggaatcaactctgcgctttcataaaaattatgcaagtgatagccactgttttcaatatattacagcatttgaaatgaaacatggatctgatagcttgtctacaatacttctcattattacaaaactatcaagagaaagtataattaaatggcgtgaaactaaagctgcagtatggtgggaagtaccttgactgtgtatcctttccatcttctgcttcaggcttcttttctatttcacttcgtactttgtgaagtagagcatagtccaagcctttgaccaaatgtgtatgttccagatcacctttaagatacaaagtgaaaattaaatgtcaatcaacatggtggtttagaagaaagacaaaaaagtgccagcaatctaagtctccaaatccacaacatatatcatattcttagaaaatatgtccaactaaagtatccatctttagttttgagctatagaaccaaattctttgaccgcatataactgactgactaggtcaaaatactaagtatatgctagttcttgatattttaaaataaaaaggaacctaaaaagcaagcaggtattcgctcgtcatatttcaaataaaagatctgaaactgccacaattttgtggacataaaacagttccaaagaaagattcaatttctcatttccacagatatcagaagcaaactatatcataatttcaaccgctcgtgcagatctaatgagcatttgtctatatacaaatgaagtgtttaaaacccaatataagttgttcacaaaaggatgaaaagcattctcttaaaagaaaagggtataacactgttgcagtaccaacctccgagatatttgcttttctcaatagatatcttgtgtgcatctgctagcctgtaatacaaacaattccagatgctgagttccagaatagcatacaataaaccaagcatataaaatgtcacacaaatgaaacctgtggtctgttaccttaaatctgctccaggaggtgccacagcatgaaatgaaccaagctctgtaggttcataatcagggttttgatcttcacgacgctccttagcacgatctcgataccttggtgtctctggttcttcttttttctcctctctgcatgggaaaacaagggagaattaggttagcccgattgacttgatccataagaccctaaagagagaggaatgctggaagtagttgtaactgcatctgatttatcagtgacgggttcccatcctagcggagcagtgcgagagatgacagggccacactagtaaaaaaaatggggatttttattaagtgcacaaaaattggtactttgtggccaggtttggtatctggtttagccagggcccaggggtgtgaaaaaatcattctaggtccaaaaagaagattcttattaatcattatcagtttatcacttcctactttaacatgattacagattctgcaaacttgacttgaaatgctgcaaaaagggaattaattatcctcctctgactacaatggatctgaata

SEQ ID NO: 29088 - DNA, 1125 bp, Oryza sativa
taatgcaagtcagtgtgttgaaagcgaacgagacatctagttaagtgggatggttcagtgagtgaggcaacttgtatgatcccttagaccctaatcacagtctaacaaggtggctataggattaactgcaagaacaatgacttcagtcgtttgttttcattccaaaaattcacgaaatcacactactacatagaatctggatctcaaaaactattttgcaagcaaacagtaactatatcatcacaggttgcaacttctgatatattctttttaacaatcaacttctaataaatttctcctacagttccaaaacatatcgattatgtctctacatcgaatcagttgaaatattgcaaaataaatgcataaatacatctttcaaatgaaatgatacttacttccgccgcatcatcttctccttgtagtagttcttcttggacgacatcttatccaataagccctagcaagccggcggtgggtggggtcagcggcaggggcagaaaacccgcgtggtcaggaggcggcagcgcctagccgccggagacggggcaagctcggcggccggggggcttctcgccggcgctgaaggagacgagacgacgaggaaggcaagctgtgcggcggcagaggaagagaggtgggggagacaacaagtagcgcagctagacgtagggagagtgggggggggcagagctccgcggcggccgggaaggcgagtgggtggaggagggagggaaacgaccgaggtggcctcgccggcgccggagtagcaaacggggagacggagacgacggcctccgatgggaaatttctcgtcggaggaggaggtaggggagtccgtctgatttgcgctgggccgcggccgcgagggtaggatcacatgggctattattgggcttcgtggcgcacggcccatactgatccaaaaaattcggcccgctatctcaagtggtcgaactaacctggatccgatccgatcgtccgcgcgagtcggaatggaggtggaattttcctcctccatactggacgatccattcgttcgcgcgtttgtttggattgcctcttcttcctcccgtctacgactacttcttcacgaacggcctcctcttcaacgatcaggagaac

SEQ ID NO: 29089 - DNA, 586 bp, Oryza sativa
gagctcggtaccctttttcttttcgtagtaaaacaaagcaaattacgggctgttctgttataaaaatggatgatttttatattatcactgtttcagctcgaaagcatggccatcccgttctttttcccttctgcaccggccaaaacgcagaacattacaactgtcaggtgttcatggcactgtaattcctagtacaaatacagttttacctctcgcaggataaactataagtgtctaatagcatcaggcacgttgcttcttcccacttggcatatcatcatcgtaatgcccgccatcatgccctccatctttgtcacctttctttctcgcaagtatcttgttgattttgtggaggtcattcgtgagcttctggtccttgttctgcttccttgtcttcctgccatcctgcatttttaccccaaaactggaatggaaaccttcgcatggctttcctttggtccgttgaatgtggcccactcctttttctgtctcaaagtcccccctgggaagacggccccttaacctgcaaagggaatcatacatttataatgaagcctggaataaggtagtatttagttttttaaaa

SEQ ID NO: 29090 - DNA, 841 bp, Oryza sativa
tggcttgagcagggtcagatggtgggatgggcccatagataggtttctcttcagtgaaataggactgcttctgatggttatgtggggactcatccatatcttcagagacagggctctggctcatttccttgttaggaacagaatagtaaaccccatctccaacaaaaatgtcatcttcatctgctctagcaactggagcagacggtttctcatttttgcttaaattattatttcgagggggtggcggcggtggcatatccttttcaaattgatgtttcagagcagacccattagtttggccaggtctagctacctcatcgtagtcaccacttgctaaactgttcttccctgcgtaacaagaatcaagatatctaacttcatcgagcaaagcaagtgaagatatggatgagaaagtacatacattgcaaatacattaagtgaactaattaattcgttcataatgtaaaacaaacgtgtaacatatggtcataacttaaaatacccaaacttaaattattgacgtgagactataaaacaattgaaacaagactcaaccattgtggaaaaaagtaccaatcatacttttcttttctttttttcacaatgcaagtatcagcttccaaacaaatcatttcagcgtatttcacatattatcttaaccaagaacattttcctaatgtcacttagtttttcagtcaacttccactgcacaaaatccattttaattttcaagtaacataccttttgtgtccctctcctttttctttttcttcaagactttcccagatgatccaagtcgaaggtatgacatgatttagcaatcctatcaagtacagaacca

SEQ ID NO: 29091 - DNA, 756 bp, Oryza sativa
  unsure (1)..(756): unsure at all n locations
gaaacgcatcatatagggcgaattcgagctcggtaccctagtttttaacgacccacgaaaagcggagcgttacagaggaggcctggggcggcgcgacggcatgcggtcgtggtggcggccggcggcgaggcagcagctggctgcggctaggccggcccggcacgggcacggaggcggcggacagcggcggctcggcgtggaggcgcgcggaggtggcttgtcagcggcgggcgtggatgcggcgaatggccgcggctcgacggggccgacccgggcgcagaggtggcaggcagcgcagcctgcccgccgcggcagccgcccccccctcccctcactcgctcggcctggccacccggcggcagcccatggcgtggtgggtcgtccaggcctcggtggtggctcggcgtggtggctgggcagccgggatgcccgcgccgtggccaggtgtggcaccaagaccgggacttgggggccgccggttcggagcggcagcgccaccggcggccagatggcagtgcaaagggagctggcggcggtgggtcgtcttcctcgttgccggtcggcaccctcggccttcatggagctcctccccttctttgcggggagtttctatgttggattgaggcggtagctcctcagtgggggaagctcangctaccgaagcaatgccacctagtcccaggttcttcttcggccaaatctagcggagcggcccgtgggtggtggaacggaggagtctgggcgagcttctcaggg

SEQ ID NO: 29092 - DNA, 589 bp, Oryza sativa
cgaattcgagctcggtacccatctgcacgcacatgcggtacataccgatatacgcgtccctgcacatcaatcttcaaattctcgatcggctagctgctcattggtgccgagcgtcgcgcgcattcttgtcctagtcgccggagcatggcgaccacaggacgattgctgctgccccacgacatgtacaggaggctgcaggctcccacggcagcggccgcggccgcggccgcgctctttattttggcgccccaccttccagaggcctaacgctgccgctgccgtaccggaaggatacagcaacggtcgcttcggctccgtcccggcgtgcagcgaggccatcgccgccttggaggagacgtcggccggcgaggcgaaggagaaggactgctccgtgtgcctggaggccttcgaggaggagagcgacaagctgatgaggaagatgccgtgctgccatgccttccatgagagctgcatcttcgagtggctgcaggtcagccgcctctgcccgctctgccgcttcgcgctgcccacccaggcggaggcggaggcgggactgtggccattgctcacgcctggttctggttcgggg

SEQ ID NO: 29093 - DNA, 1339 bp, Oryza sativa
tggcctcatgatgcatacaaagaaggttgcaaaattgggttcccaaatcttcatgctatctcccacttgttctatttctggtttatgacgattatattctttcaattgtcccatttctgtcttacaatataattatctgatattgtttcaatatatggatccatcttgtagagcctgacaggaatcaagggattatctgaagcaaaggtagacaagatctgtgaagcagctgaaaagcttctggtgtggttctcttttcattgtttttggtctgaaatcttcattacgtcagttctgtatgatttgttcttctgaaactgctatgtttgtttttctcagagccagggcttcatgacaggaagtgatctccttatcaaggtaagttaataggagctgatctgcgtactaatgcatttaaggatatggtgttatggcaaataagtggaaactattccttgcttcatggacgctagagtgcttttagttactccagctgtgcactttccctaggctgttcggtttattatttttcttattttgaagcggaagtctgttgttcggatcaccactgggagccaggcacttgatgagctgcttggcggtaacatatatagtcctctgactctgttatgatcagttgttccattatgttgttctaatctacttacatttttcaatttttcaaggagggattgaaacactctgcatcacagaggcatttggagagttccggtgcgtagatgttcatgttccttttgatattttttgccctcgtttacaactgcagcttggttgtatcaatgaaatttatgatgtgtggccatacctgtctaataaatatggtgaaatcaagcttactaatactattagtattctggtttaagttaatttgctagtgccttttcaaacctgttgtgcacccatttctatcgtctattcatgccagtgcatacagcaattcctaaacatgttctgtgttctgctaaaactgagagcttaatactgtacttctcatttgtaaacttcaggtatatacacatcaatattgtcaaactatttcctttgatgttataccaaattggttctactaaacattacatttagctgatttatcttgttttgcaacaaatttgatgtatgatagagttcttcctagaattgtatcgcgtggaacaatttggatttctgtagcacataaaacatcttactatttaattttaatgtgagccagccaaactttgaaccttgatgtgctctggagttagttttcactatttctcaatttggttccggcttcctagctttgtaatctttcacttttttggtcctcagatcaggg

SEQ ID NO: 29094 - DNA, 1334 bp, Oryza sativa
  unsure (1)..(1334): unsure at all n locations
tctccactcaggttcatttttaatacatgtttttgtcatcaccaccttactgccatagattcagtgaattattttctttttttttgttcataaactgcagcttccaattcacatgcatggggggaacgggaaggttgcttacattgacactgagggaacattgtatctttttgaatttacttagcaatagcttcatctgatccatccattcaatggatttatttgcatttctgtatctctccaacttgtttccttaatggagttttcagccggcctgaacgaattgtgccaattgctgagagatttgggatggatgccaatgctgttcttgataacgtatggcccttaatttgactttaccatttcaggcctaacaaaagaagctatctggtatatttgcatctatttcttgtttagatcatatatgctcgtgcatacacctatgagcaccagtacaacttgctccttggcctcgctgccaagatggctgaagagcctttcaggcttctggtaggcatggcttaacataaaaatacattgataagtttgtgtatctcaatctcttatgtggtagtattgttttacctggaattagattgtggattctgtgattgcactattccgtgttgtttcagtggcaggggtgaacttgcagagcgccaggtattgccaatatttgtgttggctaaaacacacacaaataaataatcataaagtagttgaaggcctaaagttatgtactaattactctgaacttgcagcaaaaattggcacagatgctctccgcccttactaagatagctgaggagttcaatgttgcagtgtacatcaccanccaaggtgtgctttcaggactaatcctgtctatcccaagaaagagtaactcaataaggaatttcaaattacaagtgtctttgtttcagtgattgcggacccaggtggtggaatgttcatactgacccgaagaaacctgcgggaggccacgttctggcgcatgcagccaccatccggttgatgctgaggaaaggcaaaggagagcagcgtgtctgcaagatctttgatgcccctaacctgcctgagggagaagctatatccttttgcattgtgcatacatgtttactgaaactacttgttcaattggttaccttggttcagtatgctgctaaaatattgattgattttttctttgtccgaactttctcctcaaaactcttgcagctgctgtttttcccatctgaaaaaaaaacctgttgttttccatcactgaaactctgaagcttcgcatgacagattagcaataatgtggtgtaaaaaaaattgtttcccttgaccaa

SEQ ID NO: 29095 - DNA, 1630 bp, Oryza sativa
tcggtgtactttttccgcgtgccccacgaccgagttcgaacttgattccgtctccgaacacgatcagcatatctccctgcaaagctcttcaataaatctctctctctctctctctctctctctctctctctctctctctttgtttattttgaaaaaagatattccaacaataaatcttgcagtctaggtggtatcactgtatatcaatctgttcgttctgccggaatatggcgggtgaagaaccatggtcaagcgaggcctccgacgatgtccccgacacatcgcacatgtcggacgaacaatttcaacagttcatcgaccagtactgggcagagcaaggattcaacatttggagttggattcgtgcttccaggacgtcgtcaagctccacgccggggccaaccaggcggacggcggcgtcatggcaggccgtcactttcgacggggacggcgtcgcgcgcttctccggcaactccgaccgtagcggcggactcgacgaccaagccaccagcggcttcagcatcgtggacctactggacggtatcctacaagcggatgacgacggcaatggcggtggagctacgccggcgtcgagcatggcgatcgtaaacctgccggagattaccgtcggcgacgagaaaggcgaggcgaaggactgcccggtgtgccttcagggcttcgaggagggcgacaagcttaggaagatgccgtgcgctgattcgcactgcttccatgagcagtgcatattcagctggcttctgattaaccgccattgcccgctctgccgcttcccgttgcctgctgagacggaggaggatgaagaggtggtccaggcagagaacgacgacgacgacgatgatgaagagaccatcctatgtctgcatcgactgttcgctgatgcggctgatgagtatacgagttgatcagcattgagagatgcaatttcagtttttgatgtaaatatggatctgaatggctggaattgttcattacacaattatgccatgtgaaaagagaatatcacgattaattaagagaatttttgagattgctaatgcgcgcgcacgcgcgagatcagcaagtcacgagcgtttcggcgtttgacatggtcctgctgggcctcgtgacttcggaatcgctaattcgcgcgcctcctcccacgccttttttacgtttttttaccgatttttttcattttttcccacttttttctgatttttttaatcttttagcatgttttgagtttgaaagtttttaaattttgagtagaaaatttttaaatctgaacttgaaagtttttaaatcttgagttgaaagttttcaaatctcgatttgaaagttttcaaaattttcaaatatggacttgaaagttttcgactctcaagttaaaagttttcaaatctcgagttgaaaattttcaaatctcaaattgaaagttttcaaatctcaaattgaaagttttcaaaatttttaaatctggacttgaaaattttcgaatcttgattctcgagttgaaagtttttaaatctcgagttgaaaggtttcaaaatttaactttaaaatttaaaacttaaatcaaaagttttcaaatctaaacttaaattttttcaatctggtagtaaaaaaatct

SEQ ID NO: 29096 - DNA, 4753 bp, Oryza sativa
ttttttcccacttttttctgatttttttaatcttttagcatgttttgagtttgaaagtttttaaattttgagtagaaaatttttaaatctgaacttgaaagtttttaaatcttgagttgaaagttttcaaatctcgatttgaaagttttcaaaattttcaaatatggacttgaaagttttcgactctcaagttaaaagttttcaaatctcgagttgaaaattttcaaatctcaaattgaaagttttcaaatctcaaattgaaagttttcaaaatttttaaatctggacttgaaaattttcgaatcttgattctcgagttgaaagtttttaaatctcgagttgaaagttttcaaaatttaactttaaaatttaaaacttaaatcaaaagttttcaaatctaacttaaatttttttcaatctgttagtaaaaaaatcttccaaaaaattctccagaatctttcctaattactatcattagtgttaagtatattactaatagaggtagttaaggcttaagagggggggagtgctcgctagcgacgcgcacgcgctagctaggagccccctcgtgacttatcaacgcgattcagtcatgtatgtatatatgctccctattaacacattcaattagtatcttctggttgtaattggacaactgacgtatatacatgcatgcagtgattagaacatttaactaaactttttgacataagatttaattttaaaattgaaaattttgaaaactttcaactcaaattatgaaaactttccactcggcattttaaaactttctattcaaatttgaaagttttcaactcacaatcttaagaatttttcatctccaaattcaaaaaatttcaactaaaaattcgaaactttcaaatcaagttacaaactttcaagtcaaatttgaaaaactttcaactcaatttttgaaactttcgactcaaatttgaaaactttcaacttcaatttcgaaaactttcaactcaacttgaaaacttctatgtcaaatttcaaaaagttcgaatcaaaatttaaaactttcaactcaaattttaaaatcttttgactgcaaatttaaaactttcaattacttttcaaaaaaaattggtaactgaattatttatgttactgttttaaaaataatgctaatgacggtaattaacactaatcaccgtaattaccggcgtcagctcgtggactactagtgagggggcgcgcgcggctgtgcgagttaagaagctggcgcgcacgcgccccctaggaagccctgagaaatttacagtataatatactacctatatatacttgcagtattaataaaaggggttaagtccattttaccctccaactcttcgttttgtctaaaatacacccaaaactataaaactggatatttcacaccctccaactttcaataccgttcactttacaccctcaagtggtttttcaactggttttcaccaacgtggcattgatgtggaagtccattcagcaaataaaaatttggaccacatctcagtccatagccacggagccacttcttcttcttccctcatctcctcttccctttttctctctatccttcttcctcccagagcacgagagcagcggcggtggcattcttgagcttgtggagtaggagatcggtggcggtagagtaggggactcgttgcggcgacgaggctcaagcacatccccagccttcccttctgcgctgactgccggcgagacccaggacaaggtccgcctctcctgtcgtaaccgagctcgccggtggagctagagctgctcggggacgtagagttcgacggtggcaacggggcttggggatgaggaactgaagcttgacgagacggcggcggctggcggatgcggatatgagcttgagcttgtcctctaccaagcgttggcggcgctccatagggaggactcccccccctcgtgtgtagctccggtgaggtccgcctcttgcgcgcggggcagcaagctccaccgtcgtcgccactctccttgccggtgaccacctctgcaaccctggcagccccaccgtcctcgcagcagctccacaccaccgccgccaacggtcgtgaggaagagaagcacgaacagggcagggagagatagagaatatgggcttggcccatattacctcgtgggctgacgtagcgagggttgacgtggcatctgacgtgtcaaaaaccacggtaaaaacagttcgggggttaagtgttcggtattgaaagtttagggtgtattatatctggttttgtaattcgggggtgtattttggacaagcataagagttcgagggtgtaaaatggacttttccctataaaagggtatattagcaatatatcagctttataatgtaaagatgaacttgaaatgaagtgcaatttattactcgtacaaatctcacatgttccccacttcctgtacaggatatgcactttcacctgggcaccctttttaagtgaagatacaagcacagccaacaggcacgtcaacagcatccgcaaaggctccgacagctgatgagcagtgactcactggcagcgaaggcagcaggcggactccaactcggaaccagcattaccatccttgattactgatttcaattccgattcgaactagctcgaacacagcggcgtagtcgcgtgcgtggtatgcgagccctagctataaatctgcacgcacatgcggtacataccgatatacgcgtccctgcacatcaatcttcaaattctcgatcggctagctgctcattggtgccgagcgtcgcgcgcattcttgtcctagtcgccggagcatggcgaccacaggacgattgctgctgccccacgacatgtacaggaggctgcaggctcccacggcagcggccgcggccgcggccgcgctctttattttggcgccccaccttccagaggcctaacgctgccgctgccgtaccggaaggatacagcaacggtcgcttcggctccgtcccggcgtgcagcgaggccatcgccgccttggaggagacgtcggccggcgaggcgaaggagaaggactgctccgtgtgcctggaggccttcgaggaggagagcgacaagctgatgaggaagatgccgtgctgccatgccttccatgagagctgcatcttcgagtggctgcaggtcagccacctctgcccgctctgccgcttcgcgctgcccacccaggcggaggcggaggcgggactgtggccattgctcacgcctggttctggttcggggacatgatcagcattctaatttggcaattgtcaccgtgcatcatcaagcatgcacatgtatatgatttcttttgtaacctggctcgatcagtttgttgactcggccgcacggaaaattgtaacaggcaaacgcagattgattaattctttgtagacactataacatatgccatagagatgacccttttttttttttacattcatagagatgacccttaattttactgaactgttcgctgttgccgctttgccatgctttgatcggagtaacgccattcctattgggagatgttcaggtgggccagcattggcatcgttcgggagcccgtttagaaggcccaattccgtccgggaaaccggtccaattgccgggcgaacgacttggacttccaaatgggcttatgggccttggctttgtttgagtcgaagctggttgattaatcttcggaggaaaaagtacaacgaaggtccctcaacttgacatctagttacaaaatcgtcccccaaccgtaaaaccggatacaacgcatcccctaacttataaaactagtgcaaactaggtccctcgacggttttgaccctaattttgtccgacgtgatggctgactcatcgtatgacccacgtggaccccacatgtcaggatgccacgtcagcagggcggcctctccctttctctcctttcctcctcctctctctctctctcacagacacacacacaaccttctctctggactgggcaggccgggccggcccgcgggtggggaggagggcgtcggcagccggcgacacggcggcagcggccgaggcggcgacgacgacgacacgggagaaggtggcgacgtctccgcgtgtgcgagctcggggacggagcggcccgggaggcaggagaaggaggagggccagcgggagaaggcggccggcaagggcggggaaaatcagacgagcttcatctcatctccgacgacgacgagctccaccaagaacgtcgtccccctctcgccgtcgtccctccccttcggcggctgtgatggggtgcgcggcgtccgcgacggacagcgctgcgcggcagaggccggtgcggtcgcctggccaccgcgagacgtccaccgccacgggcatcttggcggtgcgccacgagcccacgacgaccagcagtaggatgggaggaggcggcggcgatggcgccaccagctcgaccggccgccgccatcttctcgacgatggcgcacggggagaaggcccggtaggtcagtgtgcgcgggcacgggcgggcgtcactggcagatccgggtgaggaacacgaagagggagagcaggaaggggacgtcggccgcttcaggaattaatggaccggcgacgacacgacggcgggggcgacggtgaggtgatggctatcctcgggttcgccatggatgggtgggcggcgagttggtggtggtggtagcgcccggactcgaggaggaggttggaggaggccgcggcgagggaggagc

SEQ ID NO: 29097 - DNA, 3732 bp, Oryza sativa
cgtcttaaaaaaaaaaagacaaaccctgagttttcgtgttcaactttagctgtccgtcttatataaatttttttataattcgtattttcattgttgttagatgataaaacataattaatattttatacgtgacttgtctttttattttttttttcataattttttcaaataagacggacggtcaaacgttaggcacggaaaccatagtttgtttttttttggacggagtgagtacgagcaaggaacatggctgattgcatgattgctccgacaggaccgtgcccaaacttttgcaaccctttcacgatcgcgacagcctaacagagcagtagtagcatatccatcgcctacagagaaaggtagataggcccatatgcactcgatctcatcagctagcgtttcaagatcagttatctgtctaccaatctctcgatcgatgacgttactgctgcactgtactgtcaggtacgcagtacgaactcgcgtcggcagggatggaggcaagcgagcgtgcgcaatcggtcgcaaacagcagctagggacaggtccattatgtgatccgtcgagagagaaaggggaagcagcacagagcactggagcagcgtcggctctgcagttgctgtatgttactgagatggttgaacgagtggtggtgattcttcagagttcaagctagctagtgtgcaagatggaggcagatgtgtgttggcttactgcatctgaactatgcactgtattctgtttcgattgcacactcatactcttaggtcttttagacagtcaatagttgcatcctgtgaatgtgaagtctgagatcatgcattcactgctttcttggtaataccggatggtcaagcagtcaaactttcttgcatgcaggtcccgtttctgagcatcactgtgtgctatgctatatgtactgtagactgtagaactgaacttgtcacagaatctttccagtctagaaaaaaaaacactaacagtatcaagattgataccgagtgatgttgggctaacagtttatgatagtggtatgacaaagactgccacccaaacacagtggaacgaggaaacggaatgtgacctttccccgttgctcatagaacagcatcttgctgatgatactgtaggggatagccatataaacgacaagatgataggactagctaagtactactagtacacaacaaaatgttgcttgtaaccggtatccacagcattttaggtcattttacaagcagcacaactctgctgcctactgtttacataccaagttacagatcaacaaaaaagagggaaatgcactacctatgcgagaactatttttctataattttttctatgtttagtctttcttccaagataagagcagctgcaaaacgacctaacgtcagcaaattgattctgaaagcagccgaagattgatagggtatcctttgagagttcgtgtggtggggaagaagacaagtctatcttcttcggtttcttcccagctgcaaattcattggtcaagttgttatggaatcagactggtgcccaatttggatcacaatgtggaaaatccatttgcagattatctacacctttctggctagcaagatagcgattgaatttgagagattaaggtggcttacctaaagcgcgttacaagatgatggaggaagatagaaacgacaacccgggcaagctcatagccaggacacaaccggggtccaccgccaaatggagtaaatatattggcccctaccgcattctgaagtttattgttgatctgcacaggaacaaatttgttgcagatagcttcagcgtgaattttacttttgtagcacaggacataattgaataagtagacccaatagcaataacacagagcccctaggagtacctgccatctccaagggttaaatgtccgagcattctcgtagtgttcattattaaggtgcacagctcggaatgaagcaaaaatcttgcatccctttggaattgtgtaatctaagaaacaaagaaaaatgccatacataatgagcatttctgatgaaaaatgtatggggatttcttttagataatgaataaaatgtacgtggacttagtatagtttatattgaaatacctttataatgaatatcagtgtttgctcgcctgaatactccactaataatgttacccacacggagtgtctcatttatcacctgcagaaatgttaacccttcatttaatcatgatgtgagtaaaccaactgtaccgtttcaaaggttcagttaagagatgccatttacactagatggattcgtgctgttggcatgatatttttaggagtagctaatttttaagaaaacaagggctttccaacttacacattgagtaaatggcatggacttgtaatcgctccactctagtggttgttttttccctttcatatccctgatattggcatgctcttcctgtaaaatcagcaggatatctggaatcagttacacatgtagtgaagtaaaaaataccacttggaccaatcttgaggactctcaaagcttaacatattggaaacaaaacttgtaccaggaaaagtcatgaagttcagatttctaagatttggacctattgtgatattattgctacgattctctcgctttgttgttagactgaggaacctagcactcatcaatgcaagtaaataaaatgagaaaaaaataaaatgaggaaaccagagtactgactgaactgaagattcattcttacacagttaaactaaaagaagtcaggactcaagaacataaatggttcgagtcaataataaattaatactcaggatcaagtattcaagtcaataacaaaccaggaacaaagctgtagtgaacttgactaaaaacaacagaccggaaatagaaagtagaaacttctcttttggacagaattggtgtgaaagatagtctaacaaccatatttttaacaattaacactcaactataataaatgaaattcctccctatttcaggcgttatttgacaattgacagcacctggtacctactaccgcacgtgtatacaagaattgacaattactaccaaacaactaatttaaatagttttataccttgagctcagctagcgcagcaggcgtctcagtgaggaacttgaccgcgagcgtcatgagcatggacgtagtctcatacccagccaccagcagagaaaggcagaaatccaccatctcttcctccgagaagctgccaccctccgcctcaagaagctcctcaaccatgtccttcttctccttcttcccctcatcatccccaatggagccaccattctccgctttctcctccatcctcttctttatcacctcccgcagtgcaccggccaccttcttcctcgcctgcaggaatcaaatcatgcaatgccacatttttatgagagatataagagtacatcaatagctgacgccaattcgttgtaaggcaatgtaagatgcatagggaaagattaaaaaaaatgaatggaggcaaaagaacgagcaccttgagggcctggccgtaggtggtaaaagggaggaggttggcgagaggaaaggggatggagaaaaagccgtcgatgagcttgacgtactcgcggcggaggctcttggtccacggtcccggctcgatgctgacgagctgcttgacggtgaggttgaaggtgattttcttggcctcgtccatgaggcgcacggtggcggcgggctcccactggcgcatggtgg

SEQ ID NO: 29098 - DNA, 4573 bp, Oryza sativa
catgaggctccgacaaccagaggatctgctccaaagggtaggatgtttgtggggtatttataggtggctgattaaattattgaggaaagaggttaataaaagggattagtttagatttttttggagtggattaattattaatttagagttagatgcataaaataatgttgtttggtccaaaaggggaatgtatggggcagcatgcgcatgttgggaaaatatgatagaatgacttttgagaaaaagaacatcagaacatgggagtttcatatgcaggaatcgtatacatgcatcatatcataaaaaatattcatattagaacccaaaatacggctttgtagcattgaagagattaacctatggagaacctatcctgatttgtagctaaaatttaatatatttaaacgggggagtatggtttatgagagaggggctacttctcaatgaactgaaagtcctcttcaacacgttacgttagtaaggttctcaaaataaaaacttttcacccatcacattaaatgtttggacacataaatagagtattaaatgtggaaaaaaaactaattacatagtttacgtgtaaattacgagacgaatctttttagcctaattacgccatgatttgataatatagtgctacagtaaacatttgctaatgataaattaattaggcttaataaattcgtctcgcagtttcctaatggaatctgtaatttgttttgttattagactacgtttaatacttcaaatacgtatccgtatatccggtgtgacaaccaaacctaaaatttttccctaactaaacaaggcctaaacaatactttagatgttaatatgaatatatagctaaaagttactatatactttagatagagggagtatttcatgatagagaaagtacatatctttgtaattcaaattagactataaatatacctatatttgagctacaaatatgtatattttgagataaatggagtttgggagttctaaatataaaatcgaggccacatatggaacgaatttcatgaaaattaaactaagaactccgaaagagcatgtgtggggttagaaatgtgatgtgacggcctcatcgtgcaaggtgcaggataacaatgttatcagtagcgacatactactatagtaatgatagatcacacacgcatgaattgtctgttgatgatggtgttatttcggtggagataccattttgtaagcttgtgcatggaatatagtatggcagttgcgaccatctgcctgtctactgtatctcaacagtaactcgtgtgccgcacaacgcacgaacaggcaggccgttcgcacacaaacacaacggctggatcaaatccgcacccagaggccgcgcgcgcttttacccatcaaccggaacggccttgtggcgtacgtgtggcccatataagatgggccggaacgggactgtggtgtacgtgaggcccatataagttgggctggaaggtgtacgtgcgtgcagtccatataagttgggtcggatagggactgtggtgcaggtgcggcccatataatttgagccttaactggactggaatgtagctgaggcccatttgtgttggcccataagtggttcggccgccggtcgtaacgttcatccgtgtactaagcctcgcttcggctacaaaattttcgtgcggacggaaactattctgacttttctgagcatacgatcgattcgcacgtttcacatgactgcatgaatcactctccgttactgtccattacaatcagcagcgatgtgatacagtgatagtactggatgcattcttgctgttttcgtcggttgcttgtacagctgtactgaagagacgacgttcatatcaaatagtacgtggaaatctgagaagatacccaagcccaaactaaatccgcgtttgatgatacggaatcctccacgctctgttccgttcggtcccaggtgaagtccacaccacacgtacatgcaaatgcaacgcaagcgcgcgcgtacgtacaaactgggattgaacaggtcaaggatcgaaacgcgagccaaaatgttcacgacaaaagagcgcggcagttgcaaggaaagcgaaaggcgcaagcgcaagtgggggaggaatcgggagcgtatccgcggcacaggaaaacgccactttcgtggtgatcggcagcggatactccgagcaaaatctctcgtctcctctcctcgcgctcatgtcaaaaccatcgccgccctggaaagcgacgcggcgatcgaacgcgatatcatatcgaatcatctccacttctcgatcttcttcagttggccgtgccaggcgtcaccggatccgcgccttcagatttgggtgactccgcgaaccacttcgcgttccatgtgttttgccttcctactcgctgagtcgctgatgatatgataaggaaagttgctggctgcatcgccaagatttggctggggaaagttggtagcaaccgagaaatcgtccgatcaggaggatttcttggctggtgtggcaaccccatccgatccgaggatttgaagcctgattatattttaatcttgttgtacagaagatgctattttactaatcttcttgtacaggagatgcttatcaattattagcagtttgtttgtggctagatcagaattcagatatgtgccagcatgaccattagcggttaatctttaatttgttctctgaggcatggatgtgtgcagtattattcccatgcaagcatgcgacttcacataagtttgatgaaacgatgtgtgacagactgacagtgtgagtgtcaagaaatgactgtgattgtagcaatatatgtgttgatgtacagcaacaaatctgatgcagcaaactggcaggtcacacatggagaagaattttcttttgctttaccaaatcgcctaaaacgatccgcatctttcagtctttcaggtcatccaacaagaggacaacccaattaactaaaaactaaagaaaaaaaggatttgaaaaaggggatagggagcaaaagaaaatggtggaccatctttcttgctctagaatacaaagagtactactgatgttgccgggggcctattctttgtggagtcaattcctggcaagatttgcagcaaatctgcccgggatcttgctttccatgaggcaggattttctttggtcattacacctgttttccccatcagcttttcttcttttttcatatctccaagaatcctttcacatgcttatgtatatatataagctcaaccacacccaaacgcccttgtaaagcaaagcctttcatgccaagcacacacaccatctgcatcttctcttctaccattcttgctttctccttgtagtctcttctgttctttcagagaagagaaaaacatatctgtgctagctttgccttcttccatggcagtggctatagaggctccgttccatgtcctggctgtggatgatagccttcctgacaggaagctcatcgagaggctactcaagacctcttctttccaaggtattacaagatttttcttttgtgcttgcagactcttttcttctctcggttgctgtatgaattggcatctgatggtaggtttggcttttgtttgtgtagttaccactgttgattccgggagcaaggctctggagttcttggggctccatgatcatgaggacagcccaatttctactcaatcagatcagcaggtaagaagatgaatggtaccataggtgctaaccatgaaaaaaaatacggattaacaggaggttgcagtgttctttgttctgaacaagagtttctgaattgctcttttatggattaacaggaggttgcagtgaacctgatcatcacagactactgcatgcctggcatgacaggatatgatcttctcaagaagatcaaggtaattaccatctctgctctatttgattgtaccaaccatttgatttgatctactcaagatgacagtgaggtcagttcctgaatacagttttttccctttgggtttgttcaatcaggaatcgtcttatttaagggacatcccagttgtgatcatgtcatcggataacattccttcaaggatcaataggtgagcactcttatggatctaccatattatttcgaccatctattacaatacaagcatcttatgatatttggatgaacatgccaaagtcagatgtgcagataatttagtaaaaacttagagcacaaaaaaggagaacatcttcgtatgcatatagagaaaaaaggtagtggaaaccttatcatttgtgaaaaataatcaaatatagaaccaagctggtttaaggctaaacttgatatggagatctctccgaatccttaattgatttggagtcacatgcagtataattaaggaacaagccccacacagctcacgtcgtcttaatattctatctcgacagttttggtgtaaaatcaataatgaagatatggagtgatacgcaaatcaatcttgtcgatcttccatgatgtggtgtctaataaaatggtctttagttgcagacaactaactagcaccacatgtctttgtcacaatatattctattatatatgtacaaca

SEQ ID NO: 29099 - DNA, 2613 bp, Oryza sativa
acaacaaatggagcaacaagagggcactctaaaagtaaagtaaaatatcctccagatatcataagatatgaataaaaaaaagaaatttgtaatggatagtacatggagaataatcctgtgtttaatttctggattgcatatcatggtttttgatcttagaataaactctgatacagttttgattttgttatctgaatcagatgcctggaggaaggagctgatgaatttttcctcaaaccagttcggctctccgacatgagcaagctgaagccccacatactgaaaagcagatgcaaggagcactaccagcaggaacaaaacctgcaaagcaacagcgaaagcaacaacagcagtaaccccacaagcgagaacagcagcagcagcactagcagcaacagccacaagagaaaggcagtcgatgaagaaattttgccccacacaataagaccaaggcatagttgatttagcatctgactggtcatttgacactgattttttttcttgcttctgtctgatcggtttttgacatacagattcgtaaaagggatactaacatctagtttacaaaatagaatggaatccgttaacggatactgcttgaattcgaatgggtgattctcagttcatcacattgtgattttaagccagttaagccttcaaattcctgctgagattaagggccactgaaaacatcttgtgccatatttgttaaggaatatcttaaaaccactaccaaacaactttaatgggcaagtttcccaactgcattcaggtaaagttcccaacttaaatgggcaagtttcccaactacattcaggtaaatttcccaactttcatgggcaacagggcaagtttcccaactacattcaggtaaatcacgcaaagaggagtcacatagatgatagatcaacaactagtagctaataacttactacaaccttcatccataggaacacatggatccctcaaaagacgcatcggtatgccacacgcttcccagtaagttcaccgtcatatataactttaaccacggttcccttgtcaaagccatagtagcgagcaacagcatcagtctctagcatgcgtggcaactgaaagatacaagcaccatttcagcgaagtgatgtaaaggtatttcaggacagtaattttagtgttaaaaatgccatatattaatgaccggaaggagtaaaatggtagtgaaaacaaaaatgatttggctttgaggcacaacaagattccatctaccaaaacaaagaaaattgtccatttctcataatgaatataaagaggatcactggtatgtttaccacataacaaggatactgcaataacaaatatgatgcagatcaacatgtgactatgcaaataatgtagaggatcaacatttatagcaaaacatggcatattgtggatatgggaaatttaatacactcaaggggacctgtactgtacatggatgtatgtgccctttgggctgaccatacaacttactattcacattagcaaccatattttacaacaaatgtagttttacaaaagcatcacattatttgattactgacataaaaaattggtaacagattctaaagccctgttgcaaattatagacaagcatacctgtgagtcttccacattgtattccttgaagagcttggccttttgatctgcactcaacacttcatgcttgggtttcaggacatgcttagtaatgtttaccagtaaatctgtggcctaccattggaaaaacacctcaatttatgtgtaaaccagagtatattaacaaattataagacagtaaacaaaacgtatgcatgattaaagtcacgaaatattaatccgaacatagcattattggtttaagagcataacttgcagaagcatgtatatggattagatatatatagcattattgccagaactttccgttggaaaaaaggccatagaaactaaacaaaaacaaacctggaatatgtccactttaaatttaaagatctccttgatagcctctctagctctagataatattttgctctgcagtatcagaacaagcctggacaagttctcttcttttgtttggagatatatctctcggatagttgcgattttgacaggctctggtggacagaatacaagttgtacctgagtagtgattgagttagagtttattttaacccccttaccaaaaggtaacaaaaatagacactccaagaaatagcattatgcatggaaaaagatatagacataagcactctaacagcaggcgtggaagtataccgattatgtaagcattaagtttcaacagttacataataaattgaacccatttaaagatggcgctatgcatggacgataaaaccacaagaatactaatttgctaaaccataataaaaacccctaccagatgcagggtttatccacttttttgcctatttgcaaactaacaagtaggagtatatgatatcactggaacacaaaaaggcaaatgtgccatcgtaacatactctttatcatacgcattagcaatcttttagcaaacttttttttcctgaaaagtatatttcgcattccacaaaataatttaaacaaccactggatagtactataacacaa

SEQ ID NO: 29100 - DNA, 3210 bp, Oryza sativa
ccttgttagggtcaagctccatgcgtgctttgttatatgcatctactgggaaacgtttcctcaacctagcctggagttcagcgagttcatccttatccttaggaacctaaagagaaatgaagaaatgttgatcagtacggtatggatattgcaaacaaagcggactggacagtgctatcatgcatcatgctatgaatacaatgcaagggaggtcattctctcgaaattaacatgtctgacgttgtttttttttggcggtgaacatgtctgatgttaatttcaaccattctgcagcaatggactgtactaacaaacaataaataaaaatagctgcccagatcttgcatcaagcagtgaaagttcgcacctcaattttggcccagtgttcatatgcagaataaccatcccatagatttgtttgcgtcttacttctgtaattaaaaatttcctctgtaatttccttcctttggcgagcatccgacgttgggaggtacattattatcccaacctgcacattgatcacaataaatcaggtcactaaaactgatgttacagactacaaagtgaaactgcataatgttggacatttctcaaagaagaagcactactacatcagttgacagtaccgataagaaaatctcgaaaaaagagaaattgcacagttctcccggaaccagttaaatatctatatacagttagttgcctaccatgtattcaataaatattgctcgattgtggtttataccttagaaattctagagggggcatagcaaatgttgcagaacatgtgaacagatcatctacattgaagttgaagaaaatatttttcgtacatgtaaacagagtaccattgaagcaagagggagcatcctctaaactatatcatatgaagaaactagccaaattccaagtgcaatcaatgtggtaatttcgagcccatgagagcaaatgccaaaggttctttttctattgtttaaatatgtttaaatatgtaataatatattataagaaagactacctatatctatatgtagacacatttgctgtcagaaatgcaaatgatagctattgtagatttgtaggcagaggaactatctgccatcttgtatatcaattgcccagtccaactgtttaccaagttatccaatattcattacaacaggaaacaagttagcagtaaaatatataaacaaccagaggtggatggtggcaacaaggaatccttgttaaatataatgaaaaaggtaatgtgcagagcaaattacccatgaaaatatgtcatcttcttgagagcttgatgctgggctcatgggactcctgctgcaggcagtccaacgctgctcaataggtgccggtgcgggtatatcttccttctcaatcaactgcagcagctcctctatataatccagatccttcatattaggctttgctagggtccctgcagggaagcaagtttcagaaacccactgctgcccaccacaatcaaagcctaatatttcgtcactccagcccatgcgataaccctctgacttcttccaatattcagcttctgctttgttaattctgatcacatgatctttgtctagaggatccagggtaagcaaccgatccctcaattcagtgaatgaaagctgatctacttctgggtcattactttctgctttagttctgaaaagcatctacaagatggcattagctagaaactagtgaaatgctattgctgagtaaagctagaatgtttagtgcaaaagaaaaaaaagtaccattgagtagatatgtacagtgcatacagctacaggttgaatgcagtgcatattgttttgaggtagtacctatatttcttcaatgactcatgataaagatcacgaacatgttgtatagcctcatcctttccatattttgaggtaaactttggagttctccaccttgaaggaggattgcattggacaacaacaactgtatcggtgtatggaatccataagtacttaatatgtttattttcagagagccatttcctgagaaaggaggggagtgaaagaaagtcagttttctccagtaaatgatgacaaaattgataagcaaaccaattccagacatccatttaatgatcagaatgagataacattacttgtgatttttcttgacttcgtctgcattggaaacgaaagtgtgttcaataagttggtgtctttccacacattgaagagtaacttctgctacaactccaaggccaccaagtccacagcgagcaagatagaataaatcaggatccttctcccttgacaactctattgtccccttggcaggggtaaccaatttcatgctaataacttgttcatcaattggtggcaatcttgcaccagtgccatgggcaccaacctgcaatcagtcatgaaatgatcatctgattccgaggtaagctgtacagaaatgcatatggcctgaactgcatgttaagtcccatctatttattctggtttgagtaatactccctcgtttcatagtataagttgctttgaattttttcctagtcaaacttgtttaggtttgaccaaacttatagaaaaatttagcaacatctactataccaaacaagtttcattaaatgtaacattggatatattttgacaatatgtttgttttgtgttgaaaatattgctacatttttctattaacttgtcaaacttaaaaaaaatcgactaagaaaaaaaattcaaaacgacttataatatgaaacggaggtagtacttctttatcctccctacctaatccacaaacacatcttccctaacaagcttaagccaactttcatcgaagggaacaacatacagtagatcttatttccatcatttcaacagtaaactcagtgaatgcttataaggtagccatgtcattccatacatgagaatcaacagatatgtgataacagagtgacaaaaaaaaagttatattccttgtccaaatacaaggaagaacaatagctgcggaagttttcagtatatcggaatgcaatgccatgttaagaacaaacagtgaatgcatttctagcttccccaaattactatcaaatgcataaaaaattacaacaagattgtagagtagagataaccgtgacatttttccgatttgttactttttgttggatgactatcgtctaatcagaaagcctctctatctcaccaatttatctgggaaagttctattgatgtc

SEQ ID NO: 29101 - DNA, 1928 bp, Oryza sativa
aagcccatatatctaaaggcccaatggctgcaagttagtgggccgtactagcattccgtgggcccaagggctgcccgactccgctgccaaatcaaaaccctagcttagctttcccctttgctcgaggtaaaaaacgatggcgcccaagaggtagccggacgacgacgacgtacgtgggggaatcatccgacgagttcgcaaatccattcgacgacacgatgcagttcaccaagccggtttacctcgtggcggtgcgcgacgacgaccaggcggccgcctactccgttctgaagatcgatgccgccgccgttgccggtaacgacgagccgcggcgcgtccgcgccgtcgccgtgctgacgaccggcaccgagcctggcatgtccttcgtcacggcgcgttcgaggcacgggtcgtggattgtcggcgtcgccggtgggctaagagccggcaccatcatcttcgacccgggcaccatcatcacgcggctcggctaccccaagcacaagcccgtcttgatctcccatggcagcgaggtgtatgccatctcaggcacccccagagtgaagccctccatggactgcgagccatggtttgaatctctcagcttcaaagatggtgtcccctccaaggagtgcggccgttgggtctcatggcatcacctgccgccaccacccttcttcccgtgtttcttgaatccctatgaatttcgcaatccacctgaaatttttcagtctcatcctatgctgtcattggctcatacattttgatttccccacagccggaactagtggtaggtacttacgcttttcatgtggtgaacaaaatttgggagaagatccatgaaaagaacctgccttttgttggtcaggcagtgcaccttggcggcagcctcttcgccgcctgtcccatatccaacactgcctcaacctcaacatctgcctctgtgttccacatgtccatcaaaatctcctcgtccattccctcattatcaatccaaaagttcaaggtgatggcatcagtggacaagattaccttcccgctcttctgccccatgggaatgggcagcttctgttgcatcaggttggggccatctcgtctccggcacagacgaaaaaccaactatcgtcgctggcgcagcccaaaaaccagctgcttgaaggaggtccatgttatctcgactgcctttcggatagagaacattgaagctatcatgactcattgtcagtcccaggaatctaaggctaaggatcagctacttgcactacaagtgaaggaacagatgcattcatgcgaatccaaggaaatacatggtttgctgggttctggcattcctgtggttgctgccctctccatgtaagcacatgaggagtctccctcttgttcttatctattatactcccatttagtttgtgattttattcaagtacacatccgaattcgctgaaacaagacagatatgaatgtgctttgactcggtccaatttgaatccaatcagtttttttttttgagaaagagggcgaagccctcccatttcattaacgaaataaaaagatccttgaatccaatcagttacaggtgacaaatttcacaacaatgtgttactacatcagtaaacaatttgctactagtataaaggttaaggcatcttcactgtaggccgaactactgagagtgatcacctcattccagttctgtcggcttcttcacgtaagttgggctttgtcgaacagaactagacagccagactctgtccattctgattagtgattacttgtgcttctgagcccatcccataaattcacaattgtgacttcataattaatatggaacttttcgcattaacacaataacacagattatacaacagatgcaatgaactttctgcatgattcgtctccacgtctccagaaaaaaaaaaacaaagagt

SEQ ID NO: 29102 - DNA, 4632 bp, Oryza sativa
atatttgcagctaaacgggttcttaaggaacatattctgaaataaaggtgccaatgggacttacttatatggacaaaatagcgaaagcaaagggagagaacccatgggatgaacaggaaatcttgaaggcatgttcctattggttgcagactgtaacctctggcttcacagccaacaatgtttcctctggagcctccaatggtgaagtgttctctgtttgataggttctcaagtctacgtgtgccttggttggaaaaaaatcgaggttcttggaaagaatcacgctgttgctgtcaagcgagaaacttaaggaacagaagagtccatcctccaaggaaaagaagcatgaccctgcatcaacttcatgttccatgtatttcaccgggagcacaacgatggataagcaaggatcatggttcttgtcagaagttgtgacattgatgcgataagcattgatgggcccattatcctttgataagccaaggaacacagagccatgtggggcggcgcatccggtgaaaggtagcttcttgttgtcaaccttgtgccacttgattgagttggtgtcaaatgcatacgtgccccatggctgattgaatgataccaatatgtaggcatcaaccaccacataggacatgacgattacaaccggcagcaatgtgtaatctaccgggcgaagcttccaagggaagcaaggtggatgtggtagcttaatccaggaacatccctccaggtggtagccgcggccagcagtagcagcgacgactttggattgggagagatcgagtagctcgaaccatggcgggaaatcggggtctgcaatccaggagggggacttggacatggcataaaccttgtcgcccactgccattagggcagggcaccattttgcggagttgagagcgggcccatggatgaccttctctgtcctcgtgtcgaagatgatggtgtcgccgggatcgcccccgacgccaacgatccacgcgcgatggatcgaccgcacagaggtgaagctcttaccgccggcagcggtgggcaggcgggtgatccggcgcaggcgcttccgcttcgcctgcggtggagatgaagtggcggtggcagtggcggtgacgcctacattgtatacggagtagggcttagaatacctggaccaatcccagtggcacgccacaaggtagacagaccgaccacgtccttcatccaactcatcgccgacgatccccggctggttgagatcctctgttgcttcttgcatcggctgatcgcaatccgcttgatcctcgtccgaatcaccgccgatgatccccagatgccccgactcaaactgatcggcgtcttccgtttcttctagctctggatctgtaatggatggcttgggcttgtcatagaaagccttgccccttgctccatgacggtctctcgtcttcctcttttcgctgcccatccctggtctatgctgtcgccgagaggccggaggaggaggagatgatgacggcggcggcggctgcggctgcttaggacagagtaaggcccaccaaacacggaaaggaaaacaggcccaaacaaaacaaacggctggactctgttcagtctgattatacttctgtttctcagcccatctcacaattgtgagttcgtatttttttttcatcttttgacattaataacacagaatacacggtcatggtggatattcacggaacttctctatatgcaattggtagcaatacggatggatatagctcctgaatatgcaatgacagcctatgtttgacttcttcagtgttcacatggtttcacactgaagaattaacaaacttgtatgataaccagaaagttaattgtagtgataaatttctatagaaagtacatactcactagtacatattcacttttgtgtacgttgaaacttggacttgaggagtcaagccactgctctctcttggccaattcgctgaactttcatagttactcctgccccattatcatctcttcaatacataaatagagacgaccagccagttgacgcctcatgcgtgcactataaattcaagaaccatgcagaaaccagtactctgttcacgcagtgttagtatagctagtgctacctaagcatttggttttcattatccttctttcttatttgttgttctcattcttatcactgtgtttctgcggaaatatgttcactagaagtctgctcgtccatatgacgaaggtgttcctacctctgttccagcctctgaattttcttctctgtgacaagcacaacacacacagcacatgcccatctgaacattctgaaaccaaagcaagaacagagctcacgcatggcgatgtcgctgtggtaatggcagcgcttgggctcagtttcaatgcggagggcaacgaggtagaggatgaagctcttgtactattagaagagaagcaagcgagctgggaagaactagaggaagctttcagcgtgttcgacggcgacggcgatggattcataagtcccctggagctgcagaatgtgatgagaaggttgggtttgcagcacgacgctggccatgaggagtgtgagagaatgctcaaggttttcgacagagatggcgatggaatgatcaattttgacgagtttaaagtcatgatgcaaggagttgtctgagttttgttttttttagagaagatgttcatcgccggagctgcctgagtgactactcgatctgaaacatgcacatacgcggatacgcccctatcgatcacctgaggctgttacttttgtttcttgatttgaacaagtaatggtagctgagctgaaccattttcccttggttgcctatgctggtttctgttgtgttaccaaaaaacttttgccgatgtatggccacatatcaatttaaggagttcctgtctatcatcggctcgttgcttttgatacgcacgacagtaatggatcggcatgccactttgtactgacagaatatatttggcaatcagtacactcaggagtaataaaataattaattttcactagaccttacatgtggtggtatacttgcagaaatatacgaatgggctgggaacgggccggaagctccgtcctggtggtttcagcccatcattttttttaaggaaaaaactgaaggcgcgtctcctccgttccaccgtaatcctgtcctttaccttctccgatccgaatttccttccaggtttccgtgtatagcctacacctgtgcgcctatatattccacacgacgacgacgactcatccccaattcccccatcgattcttcgccaccggcaacatccatcgatcgatctcagatcgcctcctcttaccaagcagagagttctctgcgcaaaaacgcatggatccgacggccgggacaggttcctccaccaagaagatccctagttggatggtaacggagctgccaatgctatcgacggaggccaaccgcttgccacagatccctagttggatgataaggaagccgctaatgctatgtatggaggccggccgctctggcaaggccgccgccgccgccaccgcggacgccatggagcagagctgctcggtgtgcctcaagaatttcgagaaggacgactgcatctggtcgatgccctgctcccacactttccatcagctctgcatcttgggcgaccgctcctgcagggtctgtcacccagctgctccgccgtccaccgacgagaaaccggaagcccctcggactatgcattgattgaatgaattcgcgcggaatcagtgctttgtttaactgatcaatgtcgtggccgtgcaacaaatctgcatttctctgaaaattgcaagaaacatgcaactctctgagaacttcattatctgaattttttgtctctagttttcctgcgaatcccttatggaatatattttttgtctccagttctcccatgcatgaatcccttatggaaatttttatcgaaatgtttaaatttacatagttatatacttctgctttcttgatcttcaattcaaagtctgtaatagctctttgcattatccttctttttctctgttctcattcttgtttctgcgcaaatatgttcacggtacaagtctgctcctccatataacgaaggtgttcctacctctgatctgatgtctgaattttcttcttttctgaacattctgaaaccaaagcaagagcagagctcgtgtcagaaatttcccaagatcaaactcaccaaaccactcaccctctgaatctctgaatattgtcggatgtgtacagtacactgaagaactcagaaaacagagacacaagtgagatggatattgatacctcgaggggattgtctcctcgttgtttgcttgtcactctaatagttatgaaaaaaatttgagaagatgttttaacatgtaatatatcactctataaatatgcaagttcaaattaatggtagctaagctgaaccattttcctttggttgcatatatgttggtttctgttctgttactgaaaactttgccgatgtatggcgggatgtcaatttgaggaattcctgtctatcatcggttccctgctttgatacgtacgacagtaatgcatcggcatgcagctttgtaggatatcagaataatttttttccaattaattactactagta

SEQ ID NO: 29103 - DNA, 7357 bp, Oryza sativa
aagttgaacggagtcaacgggaagagcggttgggaagatatgaatttggaagtttaatttggattttctggtcaaggaaatgatttatcggaattttctggaatacgagaaatggtttatggggtttgaagaaataatattcccaagaatattattaacagtcactgtcatgcgggaccaaaggaaatgatttgtggaattttggaataaggaattgatttatgggacaaaggaaaaaggatttattaaatccctggaaaaagaaaaggatggagggatgtcaatcagacttgtctcgggtggcattggcgcggcccgagggacttgcgcagctcgggcgagcctaatgggccggcacggcctgcgagaagggcggcccaatggggcgcggggaagagagggacggcccggtggaccgattccaccgcgcggggtcccgggtggggcccgcttgtcggtggcacggcccacggtgggatgggcgcacgcgaggtgcggcgcacgggtttcgggtgcgcggggcttaggagcggtgcaccggttggacggatggcggcgggcccatatgcagtcgcacggctttccgtggaccgcgcgcacgggagggaagtcggagggaggggacgactgaccggcttggcccagtcaaagccgaggtggcgccgacgtggcgcctacgtggcagccacgcgggccggcgggaggaggaagaaggggaggccgagatggacggcggacggcggccgtgttcaccggagcaagcgcgacggatttggtcttcggggagcacaccggagtgacgagggcgtcgagaaggagcgagccaacggctcggatttcgccggagggagtttgtcggcggtggaattcgacagtggcggccggcggcgagagaaaggggaaatcaccgaggggcgacgaggactcaattcgaggcggtgaaagcatctccggggttcaaggagtccgcttccggcgtcggatggggcggaagagcaccaaggagggctggcgacgagcggcggcctccgggagcgggcggcaacggcggcgaggccatgccgggcggcggcgggtctagggaatggtttggggaggtcctagggagctcaaggacggtggtggcgcgaggtattggcgagagggcccacggcggctcacaggcgggcgcggcggcggtgaaccagagcaacggcggggcggcacgtttaaggggacgagcgagcacccgaatggctcggggcttatccaaaatgacgcagatggcgagaatttgggcgaggagctcaccggtgtgcgggaacggtatcggcggcgatttggggatggaaaggggtggaaggccgatgacggcacgcgaccgagcggcggcgcacggcgaatgacgccgaggcggcgcggcgtctaggcgagtgcgccggggaagaagagagggagaggtggcgcccggagctcctcgtcacgcgttcacgctcgcaccggctcctccggtgctcggcgacggacgacgacgacgagagcgggacaagcggcaacaaggcggcgatggtggttcggtggtaatggcgctacagcggtggagactgaagcggggaaattgagaggagggactcggccttataggcgaggaggagaggtcggtttggaggagggaaaccgacattggcagtcaagggatgcaagggcgacgagctggcggtcgtcgacgcgtgcagccaaggcggcggcaggtgatgacgccggcggtgttgggcaaaaggaaaaagaagggggaaaggggcttggtcccttgccaaaacgagaaaaggaggagggagagtgaggaggaggaggagagggagagcagctgcttctcccactcttggacgggtgcggcgtgaagtgcggggggcccatggatgacgtcgacgatgacggcgccggtcggtttggcatgaagcggggccgggtggctgcgcggcgcaggcgcggcagggctgacggcggcaatgaccggccggtcggccacgcgcgagcgcgggaaaaggcgaaggcggtggcgggttctggccggcgacggcgggaagcggcgtcggcgcgggagagagacatcgagagagagagagaaacagcgagagcgagagagacagagagagcgagcgacggctctctctctctcggctcgcatgcgtgcaacgcacgtgcgagggtggggggaatgatgggctgggagggggagatgggccgggggaggagaatcggcccatccaaaatcacagggaggtaaggtagacttttacagagaaactgatttggatagaattggggagatttagggtttggattcgaattcaaatttgatattcgaactcgagggtttagggatgtatcaagggaaactcaaggagaagtcatggaaaagatttaaaaggaatacttgggtatttgtcctcgggaacatagggtggagtcaaggaaaggattcgaggcgggatttggataattctggattcgtagaagtatttggcgaggattcaagggaagggattgaccttcggatttagatttcggagacttgaatcggaagaggaaatttgaggcggaggattttgattttgatgagagggaacaacgggatttgaattgagatcttggcacaacttagactcgcacacaaagaacgaaaattttcgcaattaggatttttgccgaattagtttttaacgacccacgaaaagcggagcgttacagatccaccccccttacaagaatctcgaccccgagattcgaaggtggaccacacacacgaaaccaaaaaggatcttcagacttcttcacagcttcaggctctgctagtctttcttcaacttattgttgtgtgcttgccgcaaaacggtatggtactctgactcacttagcattcttcatcttactgtggctctgctcttgcctgtggaacctgttcttctcctgctccttcaacttgctcgagattcacaacttttccgtttgtttctacttgcacatggttcagacgaccttgtccgacgggcggtgaggtcaacgaggcagaaccactgtttggtgactttgaactttttggtccagatacgttgggaaggcttgttgttggttggactcgttttgacttgactttctgagggcagcaccatgaatagtgtcccatctcatggcagatgaaacattcgactcctgccttataaccacgtctttttgaaggtgtagggcatggtacggagttgcttccttcatggctattactgttgatcattgtggcttgctgaccaggttctgacatagtcgaacgagacgtagaaccggaactagttgaatgctgagatgctttctgatagtattgtgctggcgagtttgtttttcgacacaaatcttcttttgcttgaatctctagggacattactttgcgtctcttgtattcttgcatctctttcttttcttggatgtcttggcacatgtcgcaggatgcttttgctcttttgtcatcagggaaggttgaacgtactgcattaacatttggcgaatttgggcttccttggggatagaagggcatccttgaggtgctcatattagcttgtagtggtgcatccatatagggtttttgggggcagtgtctcatgtaatggccaattttgtggcaaatgaagcatatgaatccgggaacgtgtctgatcttctttgatttgagggtgggggacttgggtaagttttggcaagattgcattgtctgacattgtgggacatcttgcatgtcaacttctgatggcaaggtctttcttttgtgacaacttccttctttaatcatgctattttctcgcgatacggatttattgattgagttctgaaggttggggcaattattagctcgaagtggggttttcatccctgtaatcatcacatttaagaattctttgttcttctctttatgggtatcagtgccttctactgattgtgttccttgtatttctgcggcctcattcttactcttgtctggattcaccttgggctgtggtagtagcagttggtgttgtatagaagccaaattttgagctatttcttgtagcatctgagtctgattggctagaatctgataaatatccattgaggagtgttgatttctggttgcaacttccttgtttggtccaggaacagtattatcagtcttggcaacttggttggtgacttgttcagctagttgatttggattttctgacaaagctgggtcttccttagaaccaaggtagttgcggacacaagtctgacaggttggttgaggtgccatctgcttcagagggactgagatctgaccaacgcagaaagtagataagaagaaaaggaggaaaacaaaaacactacatcaaaacggttttcgaaatcacagaagacataggtggtgtgttccagccggtaacccaactggtctaacacctgaacacggactaccaaacaaaactcacacacgcactagtttaccacaactcttaccgagcgggtgacggtactaaggttagcctaccaacaagggcttaactaagactcctaaaggcttgagcacacctttcttcaactgggcgtgaagacaggtttactctaggatataagtcaaaacgaacgactagcttctacttttggacacaaaagatttttcgcaaaactagagctacaggggacaacgacaccttagctttcacaaatagtttttgtattcagataatgccatcctattcaggggtttcgatcctagggccaactaatgctctgataccatctcttgtcacaccccaatctgataccgccgtaaaacggcacctgacaggagcgtgtcgtagggaaaacggcgcgaaccgcttcctacgaaaccgcgatctcggtaccagtcccaggacatagtgctggtacccacggtgacaaatatgaatcatagcaatccttaaaataaatagaggacttatttatcttaacttaggttgcagctcagacagcccgagaatacaaccgacgacgcggacgaggaaacaccaatagcagcagcagcagcggaaccaacggtctaacacccaacaccacaggcgacggctgggaaccaggacgaaaccctaatcttcacttcactttatcttctcttcagggcggaggaactatatatatatttatagagcaagggtgagtactttcgtactcagcaagtcacgggaacttaggtgtttaatgctagcttggaagagaggtaaggttgttttgcaaatcttttgtttgaaatcattttgaaatcactaagtgatttatttctttctatgtttgggcgaaaagagacttgcgtctcgattcgactttaagagatgcttttcaacagctcatttagcaatgtaccgacctcccgggtcagatcattacttctcggctcccagagccattccacttgattaatcggctcccagagcctttttcattttctcggactcccagagcccagctgcccagcagcacaacaatccgcttccactcgggaagcctagtctatgatgcccgcagacatcccgaatcacacagattcgtttctgaccactcaggtcgtccatctgccacataggctgattctggttacgattcccacaccacaacaacttttcacaaagcacaggcaaacaaatctacgcaacgggaaccacctcacatccgcccatgaccgtgggcacggctgttcgaacagttagttaacctctgcagaggggtacactttacccacaagatacgaacttattccgaacacccgtcggtatcggaggttcgcaacaaagcctttccccagccgacccagggttacctcatgccacatagaaggatcaaatcctcacataaacataggccattttaggcgttcacaaatcaaactccaaccacctcgatcggtaatctggcaagcttcgcgttcttgccttaccaggaacccggtttggctccaaccgaccccgccccggcgttcccaactattggcatgcgaggtttccctgaaccgactagctacttagccagggtgtcccattccaccttgtggttgcactttgattatgttcgatgagtttctcacaggaatcggtccttatatgcgaatacgggacagtaccacataggcacaacccccgcatcgcgagtttttcacaattcattttattttcaaacacaccgacaccacatgtcgggttttgaaggcttcacaaacccatttcccaagttttcgacaaacaacggtgtatgtgggatatttagtatacgcgctcagagagcacgaataccaaggtaccacaagggtggagcgacaaggaaacagggtagtacgacctacggaaattagtgcgactactgggtaggtccgtcggtttggcatggaaaccgaggccaagcaagttaagtgtgtgattctaataatgcaagttgcaaacgaaataataatgacttttcaattataggagcaattgatcaaagggtgacttgccttgctcaaggtcttcacgaagcttcacgaatcttcgagaaaacccgcgatcgacgaaaatccgataaccgcaactatacgcaaacaatcgaaaacctaaacaaaagaccaaaagaaagatcctatttagactaattagtagtgccattaaatagatctcaattttacggaattactggaagttgaacggagtcaaacggaagagcggttgggaagatatgaattttggaagtttaatttggattttctggtcaaggaaatgatttatcggaattttctggaatacgagaaatggtttatggggtttgaagaaataatattcccaagaatattattaacagtcactgtcatgcgggaccaaaggaaatgatttgtggaattttggaataaggaattgatttatgggacaaaggaaaaaggatttattaaatccctggaaaaagaaaaggatggagggatgtcaatcagacttgtctcgggtggcattggcgcggcccgagggacttgcgcagctcgggcgagcctaatgggccggcacggcctgcgaggagggcggcccaatggggcgcgggggagagagggacggcccggtggaccgattccaccgcgcggggtcccgggtggggcccgcttgtcggtggcacggcccacggtgggatgggcgcacgcgaggtgcggcgcacgggtttcgggtgcgcggggcttaggagcggtgcaccggttggacggatggcggcgggcccatatgcagtcgcacggctttccgtggaccgcgcgcacgggagggaagtctgagggaggggaccactgaccggcttgcccaatcaaagccgaggtggcgccgacgtg

SEQ ID NO: 29104 - DNA, 2852 bp, Oryza sativa
ttagcctggttttcttgggccaagccaataagagaaacaaaagggatcaacagatttgagaattcgtaattcagtgtatatatagttcctgaaaataattcagggagggtgtccataaaaatgttacagccggtgatgattgttatcattttttttttaaaagtagctatgcctattttcattgtattactgttttatgtatgacaatgacagtgtcccaatatttcccagaaatgctctagtttaactaaacgtcaggtttatacactcagtgtgacacacatgttgatgtatggtcccttgcctgatgaacatcagtgttcttggaccatatgatcttgcctgacgaacatcagtgttcttggaccaaatgatgccattctataaagttcctactgagctaacaaattgctgtcctgacacaaagctgcatgaagcaaatgacagatttatatataaccaagactagcacaatgccgatgctaaagctagaaggcaagcagagtttctcatctcagttcagccaatactatcaggtcagaatactagacatttttttagtaacacagttgctaagctaaaggctatctccaggtttacaaaattgagagcagccacaacatagtgtacatcttttcaggacaaggtgtcaacgggtatcatgtattcgttacccatgaaagcttacaccaaggatatcagtttttcatcttcacagaacccacccatgtaaaatgactactcagttggtcttcatagaatcttgttttgatgcttcatttggtatcgtcttgtaactgcagaatatctcactaggactaaccattcaaactgacaactttttgcagatccctgaaacaagaaacaacacctataacttcagataagacatcatagttcttatgatctaaaatatgtagacttttttttctgaaagatatgcaaggaagtttgcgtaatatattaatttcctatgagctaaagcatccacactgaactttatcatagcagccagttttaccttcatatccaagtaccacaaaagttatcctctttcttcaaatttatcctaacgtttggtgataacctatcaaccttctcaagcttctgttttgcttgagagagtatgtcatccgcattacttgttgtagacataatggtaagattttctatggaagccccatgttctagcaccgcggaagcaatagcaatttcagtttcgcctccaccatagtcaaacaacttgagaacttgtagatgtgactttaggcaagctatgtctttcaatgcagatgaccaatcatcagaatgaacgtcacattcctcctcaaagtataccttatcttctctctgtaaaatcagtaaatggttattggtaagtagaatcaaatcaaacaagaacaagccatgaatttcaaatgcttacccaaaggacaagttctttcagttctgtacaagatctgaagaaattcaacaatgcatgtctgccctttctctctttgaaagcaatactcagctcaagttttctaagacttgtaataggcacatggccccacaggaaatgcaaatcagattagtttttttttgagaggtaaagggcaggagcaaaacagattagatttgaatataggcagacacatgcttcacaacacaatcaaataacatcatcaacttaccacatctaagtaaacattgtcgatgcttctagtctgacttgacaagttgaaccatacttctcgaagcataggagctccaagaatacttatccatgtggaagacgatgtccgacttgagaaagatttcattccctgtgctgctccaataatgaccttctcaagttttggtgcccattgaattgtaatgtgactaacactggaccgccaaatttggaggaacttaaggctctctgatcggattcgctcctttccctcactgaacatgccaatgtcaagctccctaaggctgacacattggcaaactagagcaaacaaattctcgtcgcttattctgcagcatgccaaatctatgacagcaagacttgaaacatgatcgaggtacatatcagggatgttgaaaaagcagagatgcagagtcctaaggcttgagcaattaagactttgaagtgggaactcaatagggtgggatggccattgacagtttgccatcaccactgtctccacatttttctttcttagaacatcacaccactcctcaatcttctgttgagcaccattgttgatgacagatgaatcaattctgaaataactaacagggccaggatgagagaggagaatcgatgttattttacctgacaagtcgattctttcattgggcatgccaccttgatctttcattgcacgaacaaggtccagatcatgaaagatgagaggttttcccagccatagttcattccaaggactagagacaactgatccatgtagagtgagctctttgccaacctcaaacgcgatcatcccgtcgctttcatccacgctgctgggaagttgctgaactgagctcgaaccggctccctgatcctccacgcatgcatccccatgggcttgaaccgaagcagcgacatagccatcaccggcgcggttcccctcctcgagcctgcggccgcggccatcctcacgcgcatcgcggcggaggcggacgctacgtccctgatcacgcccggcgccgatgcgtagttggtgggttggtgcggcgtccttgcgctggccaacgcagcgcgcgtccccaaatccatagccgcgggcattctcatcatgcgcgctgccaccgctggggccttgatcaagtccaccgaggccgcatgcttggcctcgcgcggcatgcctcccctgatc

SEQ ID NO: 29105 - DNA, 6758 bp, Oryza sativa
tgggggggggagcgggagagttcaaatgaatgagatgtcgtgaggaggacgggagcggacggggaaaatgcaacagaatttattccagctggcaccgctctttatctcgtcccgagttcgttagttttgcttccagaagttactaaaaatgcattgataggtgaaaactgaaaagtattttcaatttggactcccagaaggcgcacgttggcattttagttttccaatagtattttgaattactttatgcaaccggggaattcaagcaatactggaaggtgatcactgatattctttttcaattagatggtcgctgcaattctggtacatgcaggagagccttggcgacagcgtgaataacagtgcttacatatcaccgatttattaagcaatcacaaatgcgcatggcattgagcattgcaaaatgaaatgcagcaaatgtggattgggatgtagtattacaggaacaactactactaggagcacgcttgcaggacagcaagagagctggagacaaaaattcagatactaaaatcttcagggagatgcacacttgcaggagcacggcatcatttgaacaaagcattgatcctcgcattcactcgatcactgcatgctccggagggccaccggcattgtgcataaacctgaatccagtattccagtgcatactgttttgagggggaaatttaactatttgccactcttgtgacatgtcaattaacgatttaccacaccttgtcaatgaaatgccctcatgtgtttatgacatgtgggcttagtggcaaatcgttaagcaccactcgtaagagtggcaaatagttaaaagccccgttttgaggcagtacctatgtttcttcaatgactcacgaattcacgataaagatcacatacttgttgtatagcctcatcctctccatattttgaggtaaactttggagtttccaccttgagggaggattgcattggacaacaacgactgtagcggtatatggaatccataagtatttgatatgtttattttcagaaagcagaaaagatgggggtgaaatttcagtcagttttctccagtatagaacaaaaaaacagataaacaaaccaatcccagacatctatcaagtggtcagaattgaatgagatagcatttcttgtggtttgtttcatctctagccgcggcgtatcctctcagtgcgattggtcttgggttggcatcgggaatctgcagagcgggcagcgatggctgaggcggagccaatccaagatgcaggtcgcatggaagcaatgcgagcagggcatcttcgtcagcttctctcccgcctcgaaatcctccaggcacacagcgcacccgcgttccctggcgtcgcttgccatcgcctcctgcagttcgaccatggccttgctcgacgcggggacagcgccgaacccaccgttcctgtacgcatcctcctccagtactccatccatggcaatggcagtggcagtgccacggcgctgacgctgaagaatatgatcgcgaacctgatcaacaagctgctgcaagaagtcggcgtccagttctatgcgcccccgacgaatgtcagacctcaagcgctcgcgaatgatctcatgagcttcttcctgcgttaatagcgtccgactacctgggcggtacatcaagtcggtgttagaatggtgggattaaaccacaagtgtaaaagaggcacccaaaaaggttctacgctccctaacgctcctagtcgcctaggagatctagaatgaaagaaatcgcagaacattccagcataaggagctcccaccgagtggtcttctgacaaaaatcaaggacgaggccaagatatgggccttagcaggcgcgcatcatctgagaaattggcttgttccttagttgactagggccaaaggtcttgagtatttttctttccctttacgctgtacagttttctccttatatattcgatgaaattggcggctcgccgattcattcaaaaaaaaaagaaagaaagtataacgggggaagccttggaagctcaagttctcgatgggagggaaatctcttggtagtgctcttgcgaccgcggaggcatccacctccatcgatctgcggcagcaacacacgccggaggcgctcaccgtacgtcccctgcagaagagatcgccaatggtggaggcgagcaaatcaataggcggccgggtgggggggaatggatcaggattcacgaggtaaacgaaaccaagacacgatcgagcccctacctgcagagtttatagacgaagaaatcgatcggactccgtctccgcgtcccgatcgaaatcgagagtgaatccgactcggatccacccccaaatccccaattactggtgaagcttccgtttcacgtattgaaaaatttgttgccgtgccgtgcgtcatggggatgattaggtcagtcaagtggatgctgttagtagcctgtttccggctagcagcattattcacgtgattagaggatcagcaattcagcgttaggatttactaatacacacgattgcggaaaaggcaattgcagatttacagtcttaacagatacttgcatatttggatgtgacctgagattgtctatcctaatttctgccctgcggcctgcgcccctactaactttgtgctcactgtcctacgctcctgcgagatcagatgttgaagtttatcttgtaatcttgttttcttggctttcatatgtcgtagtgtcacggtgtcagttgcatgcatagaagcggtttaagtacaagcaattatcggacatggtgagtttgatcatcgattcatcgtattgttttttttggttcaaattcaaatttaagaaagagggcgtctgaagacgaggaaactacaagcaaaacaatggagaaagaaactggaattagtatcgtgatcaaaggagagcatcgacgtaatcacacaccgcttcaaaattaacaagttcaacttctccaaaaaatttggagaagtgcatttgaaccaaactgcatcataggtacattgctaaacttgatctttacccccataaataggaggtgcgcggtcaattagcattgttgaatcgtagctgtaagacctgtatccattgctctagctcagcgtgcagctcctccaaaacatcgttgtacgaggacatcgccgagcggcagacggggcagttgtctctgatcgcaagccaaccgaagatgcagcgctgatggaacgagtgcgagcacggcatcatcctgagctcctcgtctttctccccgaaatcctgcaggcacacggcgcacgcctcctccctcgtctcccccagcctcggccggtgcagcgactccagtcgatggtcgtcgatgccggctcgtgcctgtagccgtcttcgatccatctcttcgctaacgctggccaagtaatcccgtagccatcttcgctgccgcatctccctgtgaggaagctgatgatagcgagtgtatcgctgtgcctccggtgggctgtgcagtagcgtgtatcttcttccccgcatcatggtctccacgcggatccgattagcgtcccggagaggcggccggttagaatcgacacgtcgtgtgcgctccattgattggtttgcactttgcagcttagcttccgtcctagcgatggatacaagattaacgatgagtcgattagagacaacgggtagatgaatctcgatttcctactgttttgttataggcagaataaggcagtatagtatacggatttgattcgtcttcagacgtgatcggcatggtatgtcgaggagacgaacaaaaagattgatatggaggtagactgcacgtgttgggctttaatttccgggcatgcagcccatgacggacattaatgtcggcctgtttagcccagttcgtagaagcatggtgcagcccggcagtgggcttccagaatgggctggcttcctttgatctccgaaccccccggccctctgtttcaagctcccgagaagcgggaaaatggcgatcgagttggttgggtattttgcaatgccgtgcgtcacgtcgatgattgggtcagtagatgctgttattacttgctaacagctaaaactcacgtgcttataggatgaggattagaatttagtgcacacaagtaatctgaaaaaggcaattgcggatttacagtcaacagatgttgaattagaggaaacgtacagtgtattctattttgacggtgatgagttcatatgttccttagagttgcaaaatgtgatgataaggatgctaggtatgaggactgtgaaaagatgattcatgtttttgacaaagatggtgatggcaggattagcttggatgagttcagagctgtgtgactaaaacctctttcttgttcagtttaactggtatagaactagtatgattcagctcaagtttattgttggttcatgttaatggagattcctaaaaagtggagcattactttacttatcttcccatactagcaatgtatcccaaattcacaattgagcttcataaatgaaaggcgaaatttgaaagcacccatatattaatagtctgatttgaaacactactagaaatatgttattgaattttatgcaatgtaaatctaggatagaataattaatattagtagttgaaaatattcgtttgttacagtaaattcattttctaattttatattctctaacctcattaaaaaagaaggccccacccccaaaaataggataggcactagcggtcggagatcaaaaccccgaacccccattgccctctttgattcttgtttcagtggtatgtccgaactctatccttactgaacacatgaggtcctgggttcgactccccatgggagcgaattttccaggatttaatggcattgtgctttcagtggtaggcgacgtacccgtcaacagcgaggtgcctgtggtgacttcgtcaatcttaaggatttgccggcccagtcttcggagatgctcatagggttagagtttacgtacgtgcgttcataggggtgagtgcgcatgcgttgtgagtgtctccgttgtactgagtaattcttaaaaaaaacatatgctgaaaaatatgaaacatatgtttataaccaatctctgcaagattatctgaaataaatatatagagatgaaacatttgcacttcgatcgaagaacagattaggctgtcagatttactactgggagtatgaaccaggtatatgaagcccaacaagtgaagagtacacaaactacacaataacatgaaagcaggaaaaaaaaagtgatcagttttttatctgaaccaaagaaagaaatttctgttgcaccatgacgtggaaagtaagtgtatgtgtgttgtgtggtgtgaacgagtcagtcaatgcagtcaacattaacaaaccccacactgtctctactagtcttcgtcgtcctcgtcctcgggctttcctagtccttgccgcgacgaaatcaagcacatgccgctcacagaatcagtcttgcagacttgcactccagtactcttctgggaatttggcgtgaaatccaccgagcgacgccgacgcaaccccaacgtctacagagaaatctcaacgcgcagccgcgcagcgcaggcgcaatttctcagtacatcaccacgccgactggtagtgaagacacggcgagtgatctcgatcgactggacagtctggactgcgaagaacgcttgcacttgtgtgcagcgacgcgcgaatttccagggatttgttgctgccacctaccggccggagtccatggagacagcactactagtctactactaccaccgtactatgaagtaagcagattagtactctgcagtcgccgccgtccccgatagggacaaaatggcggggactcctgtcaggtcaggaaatttgcttgaaatcttcccgacgcgacgcaaacgcggcaagaaatttcccaaaacgcgggtgcggtcactattaaatcaccaccatttgctagtgaagttcaagaaaacaaacacatcgctagcaacaattcggatttagacgcgttaggaggggggaatggccgctgacgcttacgctgacgccgcgccgccgcggcgagctccggcgccggcgacttcgacagtggcgaaggaggcggagttcctctgggagcttcgcaagtatgttctgctgctggccacgctcgccgccaccgtcacctacacggcggggctggacccgccgggcgggttctggacggacaacgtgggcgagctcctcgccggcgacccggtgctccagaagacctaccctcgccgctacaaggccttcttctactgcaacgccaccgcgttcgtcgcctccctcgtcatcgtcaacctcctgctcgtccgcttcctgtgccgccgccggtggtggctgcgcgcgctccaggccgcgatgacactcgacatgttcggcctcatgggggcctacgccgccggcagcagcagggaggcggccatgtccgcctacatcctcgttctcgtcatcttggtttgctcctacgtctccgcccatgtcctgctctacgggctgacggcgcaggtgagcgcgccggacgcgccggagcgggtggagcgcgcgcgcaagtacctgctcatcttcgcgactctggcggcgaccgtggcgtaccaagccgggctgagcacgccgggcgggttctggctaggcagcctggacaaccagcacctcgccggcgaccccatgctccgcggcaaccacccgtaccgattcatggtgttcttgtacttcaacacca

SEQ ID NO: 29106 - DNA, 7942 bp, Oryza sativa
ggaccgtgtcgcgccacgggttccggtcgagcgcgctctgggtgtgcgtgggcaggaccatggtcgggctcatgggcgccttcgccgccggcagctgccgcagcttcaagacgtccatctacgtcatcgcgttggtgggcgccgtcctgctctacattgccatccaggccatggtgttcttcagcgagcccgtgaaggattggctccaccgcgccggagaaacgctgcagaagtgcttgaaattggatgaactggagcagcgaaatcagcagcagatcactctatccaaccaaggcaatggcgacgcctactttcttctcaagaaatctcgcatgtacttgctcctgcttgggattctcgcggcgagcgtcacataccaagcaggactgaacccaccgggaggcttctggcaaagcgatggcaccgacggttaccgccattacctcgccggcgatccggttcttcacatcacgtatcaccggcgatacatggtgttcttctactccaacgccaccgccttcatcgcgtcgctggtcatcctcatcctcctcttgagcaacatgattagcacgcaggggatcaagtactgtgcgctgcaggtcgccatgattctgaacttgtttggcctgatcggagcttacgccgctggcagctgcaggcaggcgtccaaatccgtgtacgtctcggttcttgttctgccggtgttcctatatgtaggtatccatgtcttggtgttcatgctcgaggtatctccgacatgggcgacatggcgaggacgggtgagggagaagctgaagcaacgtatgcctgaatggctcaagaatctgcttgagttggagaagcatgtcgaggaggaagaggaggagtggaagctggagaagaggcgaaagctcctgctcctcgtcgcgattcttgcagcaagcctcacctacgaagcaggcatgaacccaccgggcgggttctggcaggagggcaagtccggccatgtcggcgacccggtgctcaacaacgacaactaccggcaccgctacctggcgttcttcttttgcaacacgacggcgttcgtcgcgtccttggccatcatcatgctgctggggaaccggaagctctcggcgagaggaatccggtcgtacgcgctgcgggtgtgcgtgattcttgtcctcgtcgggctcatgggcgccttcgccgccgccagctgcaggaaggtgaaaacgtccgtctacgtcttcgtcttggtcctcgccgttctgctctgcatcgcgttccaggtcgcactggtcgtgtcggggtcgctgcgacgtctcgtcaacagcctcctctccaagctaggggcgccgcttgaggaggacgccggtgagcggctgccgcacacggccgccgacgagcctcgcgatctctgggacgagaagctccccaaatacttgctgctcctcgctgcgctcgcggcggccgtcacctaccaagccgcgatgagcccgcccggtggcctctgggatgacggccaaaccgagcacatcgttggtgaccctgtcctcctgaccaactatgcacgtcgctacaaggccttcttctactgcaacgcgacgtcgttcatggcgtcgctggtgataatggtgttgctgctgatcaagagggtgagcaacacccagccggcgctcctggcgctgcacgccgccatgatactggacctgttcggcctcatgggcgcgtacgccgccgagagctgcaggagggtgacgacgtcggcttacatcttggcactgctcgtcggggtttcggcgtacatcgttgttcttgtggtggtgtccattggtgtggcgagatggatgaagaaggtgatggacaaggtgggggagaagctcacacactgcttctccttcgaagatttgtagagcctaagcctgactccatggcccctgatatggggcatcttccattcttcccagatggatggtgatcctctctgtacagtcacaactctgcctgcagagagaggggtttttcctaggatttgtaggaatttctagtttagttgttttcttttctgtacattgttgtttgtttttgaattgttgacagcttccagttgcaatgtatggaaccttttgtactcattgtactagcataacttgtaatgatttgttttttagtaacatcttgtaacttaactaaaaaaatcataattatcttgaggagaattttggaagtcattttattaaaaggaaaaacaataccgactactggacggtaaaattgatttaagtatttctcgcataccaactattttgctacaagaggaaataagtaaaacaaaaatgaaagaactgttacatggtcaacaatttctgtcctacatccttttcaagtcaattgacatgagtacaattacactacttctaattagtaattacacatgaaaagatttgggaaatgtacaaaatctatacacccatcaggggcagaaaccgtcagactaattacgtattgccatctacaacataatgaatgaatgatcttacctacaaaatagtcctggaaatggccaaaaaaacatccatcagctggtcgttatgctttcttcagttaagaattaagagtgttcccttttgttaatgaagtatttactgtaggtcttcactaaaagccctgtaaatgaaatccctgaaccttttgcagtattgctttggatcaacagccgatatggagttgggatcatattgcatggatttgtaggcatgctcaagcttcttgctgatatcatagtcttgtaggatgtcaatgattccaaagaacaggataacgtcctggaattcccctgtaggttcgccaatgagctgggattcactttcaggattcttcacaacattctccacccttgagggcatgctgatccctagcttgactggtgcttttctgcaaaattataagtagtgtgttacttctttggaatcaatatttctctgtactaactgtcaaagtgcatataatatagaggaggccgctaatgcagtagaacagagaaactgctttgtgaaagcttctttagtggtgtcctgaaagatagaagcttcttcagatgaaagcagtggcactttttttcaattaaaaatttattgaagaatagtatctaatatattagatgaaaaagttcaccatgttctaaaatcgtcaggaaagcaatttgtttacctttttgaaatacgtatgactgtatttaactgaaaatagcctattataaccatgttttagacacaaatgcgtcctgaaaacacactaccttctttcctcatcttcaagagcagtttgagttgtctcgttgtcaggactgctgctgtctgtaaccatgaaaaaagtattttcaggcccatgaattaaaatgcatctcctcaaaaaagattgtaactgtaagtattcaaaacaatcactatagtgtgaacatatctttgcatcggtctttgaagtgaacgccaaccagaagactgtaatccataattctctcttgctccagaaactcacaatccttgtccaattgcctggtatgaaaaaaaaatgcttgcatatatttaagaatgtctgctggcacagattggctttggaacctcaaatacacttatacttttttggagaaataattttctagtacaagtagtaaatagagaaaggggaacattctacatatgcaatttggggagagcaaaagtacctgcagaaatcttcataccatgatccctctaaccggaaaatgaaattgagatcaaggtccttcaaagtggtagtctcatcgatttgatcaatgggtttgtccgttgtgcgaccatgtgatgatcctttcaaatcaaagcgtctgtggattgaatagttggagcagaaaagattccccattataacaaaccgaacctgtagttatcaatgataccaaaatatgagcaattgccaggcatcattttttcttattacagtttgatcaattgatcatagcatatgctaacctttttctgaatagctcctgtaattttaacacaatgcaggccgaaaaattttgttactagagtattatcaaaagaacgaacgtgtttataataggctggaagcatcctcagaagtacctgatcataagaaaaaagatacaaatgcaacaggaaatgttgaatctcttctaaattagctaaacaaggaagaatggagcttactttaacttctgctttcttcattgttttgatcatgtacttgtcatcattggtgaaataaaagaaacttccacttttaccgggagatgaaagctccagcagtgcatcatccccgcaaatggagagcatgtagtctcctgggtcaacatcaaagagcttgcgcaaagtcctgtggtaaattatacacgaacaaatcaacaccggttttgaagcttccaacaacagttaagagaatgaagtttactatctgtagaacaaaataaagaaggaacatttaatgatattgcatcctggatgcagagactgggatgtaatttgccttccttatctcaaaaacgaccacatattttaccacagtagcttaatatactgacctgaaaaccaatggacagtagtccttccaccggaaatcacatgactggtgaggaggagtatgctttgatccttcaggaggaaatcttgtccacaccttctctttcggatcaaatgctgatgatttaagatccaatgaagcaggagctgactgccttcctacagcatgtctgtatccccaaataacatgatcaacaaatgtcaaatgcatcgaatttacaagaccaattcatcagcattcagaaaacaacaataaatcaaatggcaatacgtgtaataacattagtagacaacatgaagcaaatcatcccacctgatacccagctgcaagttgagcatcagttcgtagttcttgtgccccttggagatggtctccccctgcttcttccccggcttcggcagcgtcggcgcgcgcatacacgagggtgtccgcacccatgacctgtcgttgcgactctcctcgccgccgtcctccccctcaaccaggctgtcaatatcggacgacatgctgttcctcccttggtcagctccgacctccggcggccgccacatcccttggtcggcggcgacctccggcggccgccacaccggcttcttcgtcacgggctccacccctggccatgtcagcaccttctgcgacggcagcagcgacaccgtcttcccctcggacatctccagctcctcgagcagcttcgtgatcacctccttgggttcccggggcaacggcaccgccgggccaccggacggcgggtagtacacgcccttgccctgcgtctcgccggactcctggcaccacaggccgatgtacatcccgccgtcggaccaccggaacgtgccctgccccttgggcttggcgtcctcccacgcgccgtcgtaccggtcgccgtccgcccatatcaccgtcccgcggccgtgcatctcgccggccttccacgtcccgatgtactcgtggccgccgcgccagatgtaccggccgtgcccgtcctgcagcccgtcgcgccagtggccgtcgtacacgtcgccgttgacgtacgcctgcgtgccgcggccgtgccggaggttgttcgcccacagcccggcgaacgtgtccccgagctcgccgatgtaggtcccctggccgtgcatgtacccgccggcgaggtcgccctcgtagatggcgccggacgaccacgagaacttgccgcggccagccgcgcggccgccgcgccacgacccctcgtacatgctgccgtccgtccagagatacttgccggcgccatgggggaggtcgccgcgcaggtcgccctggtagaagtctccgctgggcagcagctggtcggagtggctgggctcgccgagcgacgcctcgtcgacgtcgtcgtcgtcggtgtcaacgtcgtcgaggacggagtcgatgtcgtcgtcgccgtcttcgtactggtagatggtgttggaggtggaggagatgacggagaggcttggcgtgagcgtgacggggtcacctccggtggccgccgccgccgccgcaccatcgaaggtgccgccggaggggacgacggagccgcggaggatggtggagtacttgagcttgcggatgctcgcctcccacagccggctggccgggggagggagcgggttcatcttcttcccggtcgccgtcgtggcgtcctcctccgagcgtagctcaacgtgacagggtggtcagagcgagggtgtgcatggctggcgatggatgggtggcgcggtggagggagcaggggcgggcaagaaaatgtgtttggattggttggaggctgggaggagttgtcggggtggatggcgctgcgccgcgcacgccgaggagagctcggggggcgaagcatttggaaggaggcagaggcagcggtgaggcagaaagacatgagtgctctaaaaataggcaagagagacaaatagcagtagtagcatcaccatttctgcttcggtattggggacttttgaaatgtttttccatggcaaaaggcatcatttgtcttcccaagattcagcacgttgacttcagttttggggctagcgttgttcaaatgctcaggtcaaacagtagatactcctttccaatagtactactccaacatgtgcatactagcctacgatgaaatcgcagaccaaaactgatgatcgaactgctatcaggacaggatagtgggagctaaggaactgaacctgataataactaaattatctgtctcaacaacaatctaaaacagcaaccacgatattcatgtacagtgaattacgtagtatcaccaataatccagtatgcaaatctaatagatattacaaactaacagccagaacaaaggtaacaaaacgacttgggtcacctcgcaagaaattttaggttgtgtctagttttcactaggtcagagctcatatagtggcagaaaagcattacatcaagcaagagaacattacaaaagagtactgtttggaaatctaacccagtaaaatcatagatacagctccaaaacaatctgacatcagtaaactgcattcaacccacattctgcttagaaatccatcttcaaccggctcatatttctgtccaagaaatatcatctccaacttgcatgcaaaagcaaaactcaagaacatttcccaatacctgttgctgctcaagcaactcttcaagcatctcctgccctctccttctcttgatcacttccaaaggtcaaggtcacataagttgcaaaataaaaaggagcacaatcagtaagcaacaagaccaaatgttttttgaacccgaacaaaaccaaatgtcatgccactaatacagtattataaatgtcctgcacttcaaacaaaaatctgcactccacggcattttgttcataatcaaacgaatgaaagaattgagataatcagggaggtaatatcaacctaaagcatttgtttcttgtaattgaaaaccatgtttcacaaaagtcataactcatgagtattcttgtgagcatctgcctacaaaattgaatactacttgatcagtaactcacatgtattgcatcaaggtaagaatatgccaagtttgacatgttttatagtggaattgctagctacagcagatgatttactgtataactagcacatgtacagatatacaggtcaatcttactgaaactgaaagtaaccccacaggggcactaccaattgtcatgccctttagcccttacaatatttatcataaatcctctaaaagaagatgatcaatacagtgctctagtctaggccactacatttgtaaagttctgtacatgtgcatctgaaaaacatacatagcaacattccgaacttatacgaattcaagaaataatctgaactagtctgaccaaatatttctgaacatttcagaaataatctgtacaaat

SEQ ID NO: 29107 - DNA, 698 bp, Oryza sativa
tcgagctcggtaccccataactgaggtggacaaagacggccgacctagtgccccgacagaagcagctaagaattttgtacgccacagcggttgggttgtgagggacaacgtgcctgtcagcatggtgtactggcgcagaacaagggcacgcggggataatgacagctttgtctaggactcagagaaagagatgttgtgaaccacaatgctcgagacgttcacgctacccgcaggtacggagaacataatgaaacagtggactctgaagaaaatggcaaaacagttccagagcttcaagggagatctctacaagaaatacatcctgaagggattaacaccgagcttcgacgtattcccaaagctaagggatcattgggacgagttcgttgcttacaagacagggcaacaagggcaagtgatgatggccagaaacaaagaaaatgccgccaagaagaagtaccatcaccacttggggtcaggcggatatagcgtcgcgatgccgaagtgggaggagatggaggctagcttgcttgagaggggtatcgaaccggccaccgctaattggctggaacgatcgaagttctggtactatgctcacggtggaacgcttaacccagttgatggctcccttgtcttcagcgatcagatacgcgaggctgccagtcgactaacggacgcagtggtagcctcttctcagg

SEQ ID NO: 29108 - DNA, 1077 bp, Oryza sativa
  unsure (1)..(1077): unsure at all n locations
tctgtattttcaaaagagaacgaacttagaacttgactcaaatacagatctacatttccaaaagcaaacgaacttaaaaaccgactcatatatggatgacttaccaaagtaccggcaaaaaaacaacttcaattttttataatagtagagatataatatatatataataggtaaagaaatacaaatattacatattcaactggtgaatctgtcaacgggtgatacccgtagaccgaatatagaggatatcggggtatgttggtacaagggtctacgtaatcngacatccagcaaacaaaagacgaagattatactagttcaggccccttgataagtaatagccctaatccagttgatgtgggatatatgacggaaaacacaggttacaaagggaacgatggaactcgatggatccggcgagatcgtagtcgagttggttcgactagatccccggcgatttggctcctgcaggctccgacttcgtaggctgtgggggttgtgttggctctgagattcgatcccttaggtcctccccggggggtcccttttatatcgcaggtcaagcggttttcaagtaaaactcggagacatcagaccctacacgatacattgacgacccagtcttgtccgagtaggactcttttcgtccgtaaactccgtaaaggatttccttagtgtatgtagagagtatccgtatgcgcgtgggtatgccataccgatatgtgacgtatatcgaaaggtaaagggtatacctaacccgtaaccccgaatacaaatattacatattcaactggtgaatcaacgaaagaaaaacaatgaatacagtaaaagtggcttagtgaaaagatgcacaacacaaacgtacatgaaaaacgcatgagttgataaaattatcaaattcatcataaatcatgtataatatcttatcccatttatttataccaacataaagatgagaattcaacagaaaaaataataattaactatttagctgggcaggagcagaaccagccaagacaggaaggagcccaagaggcctacggcgatggacagatggctcaactggtaaaaaaaaat

SEQ ID NO: 29109 - DNA, 1153 bp, Oryza sativa
catgtggtactgaccgttaagcaccggttctgctaatttgggaaaatcctttttgttgatcttggggatggcctaaaattatgcatcaaattaatggccaaagaataactcgtaacaaagcatgtaagagccataatggaagcaggtaacatatcagctgttatgtctcctttgtaacagttgtatcttccaattttgcttaatattcaaggtacacaaagataatagatttcccccaaaggatataagttgaatgtgggggagtaaaataaaccctggatgaagctagaatctaaaatcgatctttactggctacttctctcatgacataatatgtaagactaaaaaaatcgcgactgccatgatgagacgaaataaaaataacagaagcacacccgtctaagatgatcaaatagttgaagtaattatataaagatagtgttatgtgctctttcatgagcagacttgtgcatgcaggagaagcaaataacacaattaagttaaaacaggaagaaatggcttacccattcaacaatatttcgctcaggcttagctcgactgtcatctataaccttttgtcctgtgatgacctccaacatgaccacaccaaagctgtaaatatctgactggacggtcagtttaccactctcaagataatcaggagcacaatatccaagtgtgcccatcactctagtcgaaatatgagtgtcatcaccagttggacccatctttgccaagccaaagtcagaaagctttggatgatatccatctccaagcaaaatgttttcagatttcacgtcgcggtttatgacgggagggtcaacattgacatgcaagtgctgcaggcctttagctgccccgacaagtatcttgatccttgtgttccagtcaagaggcttcttatcaggggaaagatctggaaaaattaagacccagttctgattagacaaacttctaattatttagaagcagtgtaatgaaggagggaactatatatgttactagtttgtaacatactaacataccatggagatgacttttcagggaacccaaaggcatgtattcataaactaaaagcctctgatcaccatcctgacaacagccaataagcttgacaagatttgtgtgatgtagtttactcaacactgaagct

SEQ ID NO: 29110 - DNA, 792 bp, Oryza sativa
ccactgccactggactgaattacaaatagacaaattatattcagattagtcacataaaaaatattcagacaaagaagttagaatcaaaatactatgagttacacggagagttggggacttgatcccacattaaaggtaggccaacaaaaaaaaacaaacttacactgtggcatcgtctccaaacatgctgccaaaggttcttaagttcattcttacgtataggcttcactagaaagtcaactgctccttttgacaaacacttaaagactgtacccattgagtcattcgaagacatcactgcatgaaaatgacatcagcatcagtcaaacatattcagactaaaaggttatgtagaaatgtgtcacagtatataagtgaaaaatgtggttgagcaagaatgctacttactaatcacgggaatatccttgcaaattttgtggcttgtgatcttactaagcagaccaatgccagacagacgtggcattacgacctcggtcaatacaaggtcaatgtggttttgcagatcttcaagacattgccatgcatgtagcccattttcagcagggataactagaatgaaagagatacagtagatgccaaatcaataaactaacataatgcaaaacatagttttagataaaccttcagtgctaagagaaacaagcatgcataattctagtaagacatataacatacaataaacatactttccaggttaacaaaccaatcatgatgcaattaacatgtttacgatccatagaattcacttcaagatgtatttaattattcctc

SEQ ID NO: 29111 - DNA, 871 bp, Oryza sativa
accagcttgttcttgaggaagttgtacgagaaagatgcccaaaacttggttggtgtttcaatgatattattactacacttgtccttttgtagcattctgcatttcacattatcttaaaaaaaacatggtcctggtcatgcttttgtattcagttgaaatgttgagatgactttatttgtttgaacacataatgtatcaactttgtggtgtatcactctgtacttacatcaattacaaccctctttcagcaaagcatatggatttcctgggagttcaggtggcatgggtgactggaccatggtttctttcaattttcatcaatatgcttccatgggaaagtggtcaggttttatgcaatagcttggtgctttcattaagatatatactcatacttatacatttgatgttcggtaccagtcccttaaattgaacgaaacatgcataccaaattgttaggataatgagaatcccgttctattattttttgaatgttccatattcttgtcatgtatgttaataatttgttaggtttaacatcatctgattgaaacttttgcattctcttagttcttcgtgtttgggatgtgatcctttttgaaggaaatcgaacgatgttgttccggacaacgcttgctttgctcgacttatatggtataacttaatccctgaaaaagctattgtttcctattatttgttcttttctaataagcattgatgtgtaagtgtaatctacactgttgtctttgtatgttgatttgtagggcctgccctggtgaccacaaaggatgctggagatgcaattacattattgcaatctcttgctggctctacttttgacagcagtcaacttgtgttgacagcttgtatgggt

SEQ ID NO: 29112 - DNA, 730 bp, Oryza sativa
cgcttgtttgtcattgaacctaagaatacgggtaattacattgttatggctaatttatactcaaatgctggcaaatgggaagaagctgaaaccataaggagcatgctgtggggagttggattggagaaggttcctgggtgtacttggaattgagggagaacaatcgcttgcaagttttattcctgtgtttgccttaaagccgaaagctacacacattgatttggttgttgaggggttaaatgggttgaatgatagaaaagatcttgacatcaacctaagagttggatgaagacaagttatgtcgatagcattcaatagagctaaaagttgaaatgtgattatcatgcctgaaagcacatcggcattttggaattatttggaccatcggattccatacgccattatgtggtcaattatattgatctgaccaattatcaaaccctaggatgacaaaggaaaatgagaactggaaacaataagagctttgctaccacaatcttcaaacctttcgaagtgtatgatcttgagctctaatttttaataaggccaccagttactacagcaacaggaaagtcaatgattacaaaaatgatgaaagcagttgcattctgatttgaattttcaggaagtgcctccacaagttaaatctcagtgtttgatgaaacaccaaaagagcagcatacaaaagttagttcagttcatcaaaagtagttgttctagcttcagtgtt

SEQ ID NO: 29113 - DNA, 771 bp, Oryza sativa
actaaatgaagtgtctcctttgttaaactaattttctgcctctcctagctttgcatcagatatgttgcccaaacaacttatttcagttactaactctcatcttgtttacaaggtttgggactggatcttcaaatgaaaaggcggaggaacaaaagaggaagtccagggctgagaggtgtgttaataccactatttgcactctgctattgtagatttttcttattccccgtaatgccgaactgatacatagttggatgaattgtcactttgtcagatttggccttgcctcatcttctgctgacgaagacgctaagaaaaaagctcgtttagagcgatttggtcagagtacaaatgttcacaagggggaagaagaaaaaagaaaggcacgagctcttaggtacgaatgtggcagtgctatatcattcttgctaatagaatcttaacctagctatcagctatagctgacatctcttcactactttcccaggtttgcagaaacatctagtggaccatctcaagaaaatggcaaagacagctccaagccggtaagtttatcatggtattgtgtgtaacttttgcttcttttgtgtgtttttgtatccgacccatatgtgtgttgcaaacgcaggacgcggccactgtggcaggcacggcataatgggagcactccctgccttttgtgaggttatatattgctgctatcatcctacaatatttcccattgccaagggcttgttgcttgacatgcaaagtatcactccattcttgcag

SEQ ID NO: 29114 - DNA, 1062 bp, Oryza sativa
ttcttgcggcggcttaaggtggagctgaagctgccggtgctggcattggtggactccaacccatatgggctggagatcttgtcagtgtacatgtgtggtccaagaacatgtcatatgacagggccaacctgacaacaccggatattaagtggctcggagtgcggccaagcgatctggacaagtatcgggtgccggaacagtgccggcttccgatgactgatcacgatatcaaggtggggaaagagctgcttgaggaggactttgtcaaacagaatgaaggatgggtgaaggagctggagacgatgttgcggacgaggcagaaggctgagatacaggctctcagttcatttggtttccagtatctcactgaggtctatctacctctcaagctgcagcaacaggactggatttgaggaccctttctatgctagatgaataggtgaattttcatgcatttatttgactactgcgctgtgcactagatttatttatttaaaataaggtatttttgagaatcagtattcccatgggccatggctagtcgaagtcaaaaggtagctccaaaatgttcagtcaaaatgcatggttaactaatttctatgttagattaggttctttatgttaggttctttaggaagtattgcacacccctgactgagagtttgtaggatcaaattgataagggtgaccaagattgcctcgtagtaccgtcagatgtggaaatcttcttctagcattatgtatttgaacagcagctgctgtgtgtattcactaatttttaagaacatggaaatgcttacttcagcatgtattcagagcaggtatagtgacaggaaattcaaatgttactgtgatattactcatgtatcctgagcatgtattcaaaacaatgtattccagcatttatgtgccaactccatgtttggatcaatgtagaattggagctgttcacatgtgtaactgagcacatcatggcatgtttttaagaggcacaacaatacagccatgggcatcttggacatttgttttgcaatcaggtttcaaatcttgagcgaacaaact

SEQ ID NO: 29115 - DNA, 6563 bp, Oryza sativa
tttcttgctcgtctcatcggctactttcataatatcgtcttaaaccaatctattaaaccccatagacagtattacaaccgattgggcgtgtttagggtttattattccttgatatatccagcacatagcatatttggtctaactccatcggctgagactatcaactatacactatcggctaatcaactatcgaacgactaattctgcttatattctttcttgctgattgtaggatcaaatcagttgggacgcccttgacacactcgtggctagcagtggacctgcattgaagttaagcagatctcccaggccatcgtgttttcacatcaacaaccacctaggagtgcttactcatgcccccaaggtttggagaggtacaggttgatctgcagagtcatagggtgcgagaacttctcaattcttgtggatgacatcaaactagtgctggaagccgagaagaacactacttggctaaagttcaaggagagcttcggctatcctgcagccgacgagggcaggctcaagcgggcggctttcaagaatataggcaattattggaaaatcattaagtccaggctggtcgccgagtacgtcctcaacccggctactccgaagccatatgggctcttcccattcatcacgccaagagtgtgggagcagttctacgagaagaagtcgacacctaaatcccgggccaaaagcgaggcttatcaggaactctaggctaggaacttgcactcccaccggcttggcactgcaggatacgccaggaaggaacaacaatggtaggaggaggatgaaacggtaggggaatcaaacacgccgccggtgtttggcgatatcccacacccatgagcaaggaactgggcaagggcaaagggtcacaagaacgacgatgggacaatttcgtcgccaaatccccaagatcaacaagtgtacgaaaatatagtaagtgtctcatctcaatatgttggcatagtttccatcgtacttttgatttaacacaaactcaattgtactgcagaaggagttggttgcctcgcaagaagcctcgtaagaggcttgctcttaaagacacgaggacgtatatttaggcatatacgtgcttgcaaccacactactagctcagaatcaaatcctccactttactcaccttgcttcttgacgtagtctctgctactaccttatatatatcttagcctaagtctgaatatgtatgcgaaggtcacagagcataacatattattgcaatatgcatgaatatggaagaaattgggtccaagttgtgcggtagaggatgcgacctcctactttacgacatgaaaatacttttgagaatggaaggcattgggagttattaacggagattacatgttcatgtcagtaactatgactggtttgaattcgtgacaatttatattgtgcgatgacatcaatcgtgatgaagttcaactgatactctttttggcttttttactgcagagatgtccaatcagtgcagcttttacatgctggtggtgtgttggtcaggctgaccgtaaatggggccgttgccatgcggccggatcaccatttatctccagaccttctgggaggacattttttcgtgtccaacacaagatcaaaatccattgatcaaaacaagctagtgaagctaatttcgagatcaattcactttcgtagaatcaaacgactaatttttacgataatctgacctgcccaaataaattacctactggccaaaatatgccacaaacactggttctccgcagcaaggcaacaatcttctcagcgaaatgaccccgatgggcagcattgtttggattaacaagccgctcgaccacagtacaaacgctgcgaggcagccagagaaggagatgagagttcattgttaccaggcccatatttaggggagaactcagatggaagaccacacaagccccattttttgttccttttcaattcaagccaatatgcgtttcaatatgcctaagagaatgttcttgcttcatttctttcgaatgaactctttttcttccactggtatggttgcaacacacttgttttccatagctttaataagcattcaataatattcatgccttataaaagaattgttacccatagagatgatgactgaatgtgcattcttgacaatgcaggttccattttttttgcttgctacgaaaattaaatcggtgtatatggacacaattctttgtgtgtacctgtttctcgtcgagtacaggtccggctctaggcctaggtcggttgtgtgatcgtctcaagcctgcagcagatgggagcccatcaccacgcaaaaccccatgcccaggccttagccctcaggctgaatagactccaagcgaacatcccagaatggaagctgcgtaggtggccactttaagaaggaaatgtggcaacagcacaccccacaaacccgttggttcgtcttcgatctaacgatctggctccttgtgcccgcggctagcgctttctctctgctcgacagcttcctgaccacgattgcaccatgcgacgagctgataagtcgagagtgaggggagtctagacaatggatttggacggaagctggtttgtgtgacgagatctaacagccatccagtcaccggcgtacttctgtactgtcactgctgtcatcattgctttaaccttgtgttgagggttggcgtcatatagtggtcaggtacagtatccaacacggtaccaaaaggggtgactgcagcaacagcattttgttctggcgtgacgaagacgttgtggttatcatggcgcgtctggatgatgttgttgtgaaccgagcgcccttgactagctagatcacgttggtaatcgtgatttaagtgttcttcggcttcttttcacgtaggtgttcttcctgcacctcccttcatatgaggcttctccgtcttcaatcgtagccataaagatctcacgaggtagagaaaagtcatctgaacaatccaggatatttggtgctccccatgctgcaacaagcatagtcatctgaccactcggagccacatatctcctccatgatgctgtgggagtccacaagtgggccaatcaaaactcgctacccctcccagggcccgtgctggaacggtgtgtgtgaaaatgtgaattaccagtgcaacaacggtgtgtgtaaaaatgttataaagcacataatcagtattcggcaaacccacattatcgccacaaacaacaatcttattcgtgaaacagtcgacggtacaagcaaacctgataagtgtttccatggtggaagccgctgtcaagggctaccatcctgcacggcgcatggcggcggtggcctcctacgcgaggagacaaatggcagcggcagtgcacggtgtggcgcggctgctatgcggtgtggaggcacacagtgctggtggcttcctcgggtggacgcagccacctctgcgtggaggcggatggcagcagcgatgggaccaggtggcggtggcggtgcccccacacgcatcgagctagacgcaggtgcgaagctagagttactcattggggtcagtagaccacgacgattttttgcgaatatcttgtaccagcactaatttaccggctatgactccagttaaggaaactactagaccccggtggtccaatgccatttttctgttcaagctcaattagcaactaaacaatactagtaagtagtaattagaaaattagctatcgcatataatacgacagcccgatatacatatgagatttgagcccagaaggaaagcaactcacacaagtccacaaattgccttgttgcgctgctatgtattcctgctttactccaaaagacattattttattatattatggtcccgttcttttctctagcaagagttggatgaagattaagattttcgtggtacgcttttcaaactgtgtaaacagtgcgtttcatacaaaaaaaactttctatatgaaagttgctctaaaatatcatattaatctatttttcaagtttgtaataattaaaactcaatcaatcatatgttaataccaccttgttttgcgtaaaaatcttaatctttatttttatcttcaggagaaaagaacaccacctatatggtcgatagttttgttttcggattatcttaagattattataagctatagtcaattaaagattattataagctatagtcaattagtggtgaccccggtgactatttttctggcttcgccccctggctagacggtggccaaatcacggcttagaggagggctgagggcctgaggcggcggatgggaggtgccaccaagaatcaggctcgagatcgatgcgacgaacaatcttcccattttccacgcgtgaaaccgactgaatgtagaactaaacggctgggcggctccacccgcgtgaaatcgattttcgctatcggccgactacccgtcagcacaaatgaattattttcaatggcttttggtcgttggcgggatagccagccgccagcgaaaacccatcttagccgccaacaaaaacacggttttttagccccactaaattttttacgttcggtcgtgcatttttaaatccaacattagttttcatgtttccactgtacacgtgatttgcattatatattttcccgtgaatcaatacatctaaagcaactactaaaccgatttttacgtgccatgtgaaaaacaggtgttgtacataggtccctgaattaattccactcgagaactccatgggagggttctcatataaagtgataccaagacaaccatgtgaaagaaatagagaatcgtgtcaggattatcaccccacgaaatcgatgtattgttagaggagaggctgatatattggttgtgcgaccgggataagtaaatcgtccgtcggagactggataggagggtgttccccaagcagttgttactattttcgagttcctgggagttcataccatgttctcaggaataatacacaaatgtcccaataggaatctcgtttgttgtatagtgatgacgtatatgttagacatggaaggcatcatgaattctaggtggccacatttccagagatctagttgataatttccaaagtaggattaatgatcgacaaggtagtcaaaagtgaccatgctatctagctcagtgatataatcaacgtgattttagaaacatttttttagtagatcatattattcacagaagttgggggtttatctcatctcgcatttttttaaagctcttctatgtttatttctaaactttttggctgtgtacctacgggtagatgccggagatgtaatccatttctattattaaaaaaaaaatctagctcagtgagcttgaggcacttcactgggcggctagatggatgaaatgaagctgcaaagaaatatcttggcgcgatatagcaaatgagcaaaaaattgtttttcttgttaaaaaaaattgtatgcgggaatttagttaatagtatttagtaacaccatgcatcatgcttgaagtctttatatatgcaatttgatttggttgccgaagtagtattggctgcacctagcataagacaatatgatagtatcgaccggcatgtagtaaaataaaatactatgcccaagtttttttaaaattcaagatgcaaatctggtgctctctctgttttttaaacctggggtgatcttatttgacaaagggattaagaatgataaagttttttcgcgtgtgaataacagcacaactggaataaccgcgggttcaatatgcagtaccatttctatattcagtaaaagaaaatcatagtgtgccgtgtgcgcatatatatacatctcgttgattctctttccaaaagcggagctcaaaagctcaagcccagtttcccatctcatatatatagtttatgttttactccagtacaagaacaacattggtgctcctcagacaaaattatcatctctgctgagagtaatttcgttgtgagttttggggaagtcatatcatggcctgaatcgaatttgcatatatgaatatcgggggcggagatatatgctattgctaggcatggaaggtatttggaattttggtcctctagggtttatttacctgagcatctctgcttcgactccctggtgcttctggtctcttggcagctgtgggaggtatgaaactatagggttttcgaccccttcccgctgcttggagtttgtgtctagccgtcgtagtttttttaaggttcaactttttattttgcttttcctcacttcccctggcataagtgttgtgtagctataactcttttcttctaatatattggcaatgcaatccttttacgcggtcacggaaaaaaatagaattttggattgtgaacattttagcacaagacatcacaattttgaaagttggaacgatgcttatatcaaccgtggtgaagcttgtggcaaagaaaaaccacaagacacattttccggccggttgaccaatcacgccaactgggcggaggtagtatatgttaggggggtgcccaggaatccggtcaagaaaatttttttagctatacctcatctatttca

SEQ ID NO: 29116 - DNA, 15272 bp, Oryza sativa
ggagaaagttggtagtctggagaaaaagttacgaatttatgtgtgtaggaaagtttttgatgtgatgcgatgtaatggaaagttgaaaatagggggaaactaagcacggcctcagcaaccaggacaacttttgccaaggtcaaaggaaaaggaacgaaaggtgctagacgaagcctcctcgtagaaacaagtggcaagtgaagtctatgaatgctaattatgcttttaagtctaagaattcttgtaattgagttgatgaggccccaattttctcactgaacgttctagtgaacgatgtaattatgtttccagattaataaagcgcgccaaatggcttcccttaaaaaaaaaaacattgatgtaggtagaagaccagtttagaggcatctgctcggtttagggcagaactgtaatctaccgtctatcatgtttatctatagaaggcatataccatcaccagaaaaagctctctctggtatttattcgttacgccgatcctacaccaggccatcttgttacaactgctgggctttgtttcaacagtgtgtaacgaccagtaatcctgcacgagctagcacagtttccatcaagacattagacatactttctcttccaaggcgctgtaggcttgggaggaatcatgaacgatcgctggacatgctcaaccgaaggtgctacagagacatcaccaagaacgaagtacccattatgcagcttaatcttcatcacgacatggagagctgtgcagctacctcctttaggaaatcttccatcttctcgcctagcatgaccctcccttgttctctcttgccgtaagtgaggtactgatcagggatgaactagatccgttacaaaacgttgctcagctagagaacttatcttcgttccgccatatatatcactcggctgcacggggtgacggaaatatatatgtaactcgtttatctttttgaaaaaagaaacaaaaagtaccataaactggtatgaaagtcattatatcgtcagatggccgtacttcctatccatataatatgtagtcgtaatcactaattcctaatacgaaaaagtacgaattaccaccccgaactatcacggtcgattaaattagcccattgaaccacaaaaccagacatctttcacctcaaactatacaaactagacaattaacccccctcagcactgttctgagcaattttttagttgagcatgcacatgtacggcgccaacgtggcgatccaatcagcaaagaaaatgaaaaagctccatggacccacctgtcatccctctctctctccctctctctctcgcgcgcgcgcttgggcaaccgatagtggaggaggagctcggccggcttgcggtggaggcggaggcgaagagagctcgggcaacaggtggaggggtgcgtcgaggagggcgctgctgcagctccctactaacggcgataagagggcctctacagaccgcgaggagagaaggatgagaggggggagaggagttcgtttggccggcggtggagcgagccgcttcccccaaatccagccgccgccgtcctctaatcccctttggccatccgcgagaagctcgggcagaggtgggtagagctcgcccggacggccggcagcggaggtcctctcgctcctctccttccttcttctctgcttctctccttcttcaatctccctcccactcctcttctcactcgcgccaaagccaaggatggcaatgctccttcgcctccgccattggcgcccgagcgatctccgccttccccaccggtgcccgagcgacctttgcctcccccgccgggggaggccgaggaggagctcagctcggcagggaaggagactcacgaggagatgctggggcgtccctcgtcatcatcgtcattgtctgaggccgcggcttctccggtggggttatctcggggtggtaggtgaggagaaggaggagggggatggtgggagaaggggcggcatcgtcggcgaccacggcgagtagtggttgtagttgcgtccgtggtggagagaggtggaggggacagatcagacagtgggccccacccatttttataaaagaattgcttactggattgccacacgtatgtcaagcaggaccaaaaccacctcatattgagtcggcgggcttttttgtcctgtttacataattgagggtgaaggaagtctggttttatggttcaggggataattcgatggaccgtgatagttctgtggagtaattcgtactttttcatttctaataatttgttttggccaaaccggagaggtactgtcacgcccggaaattcactagtaatttccgaacttgtttgtgcataaaatcctcgtctaggaatcagccgaggtacacaaactgacaatttaatatacagattcatcaaattaactaaaacgataaatacttacttaagaggcacttagtcctcaccatgaagaaaactgcagcggaaaataaaatctagcgaagctccggctccactcccacaggcagctcaactggggtataagccaaacgtcttctccttcgcaacttgtcttcaactgaggttgattgattattgcaaggtgagcatatgacatactcagcaagccacacagcaaatatgcaagtgcacaaggataccaaaggatggcgtagtataggctcatttgcgaaagcagcatttagcaaagagtttagagtagtaaaacagtagagtaattaatcagaaattttaatcaacactgaacagcatacccatgctgtacaggcccaaccatcctgaacaaccatacccggctgtacagatctaactccaaaccaggagctaagcaaattattaccagttataacatcaatacttattgtgagaggtgtgggactaatcacgaaaaacattgctcaactcgcccataaccgcgggcacggctattcgaatagttttactctggccagaggtgtaccactgtacccacaagacacagcctcaacatcatgtctacgatgcgtcgcgatactagaaagtacccgaatagaggctgtgacaataccctctgcataacacaactcaccacagtgcatcattcctggatcataatcaccccctcaaaaaccagaggcatggactccccagcgacccccgtgggcttatctcggccacttctcagtctggtgctccgcaatgaatcatgctatacaaaaggtaaagccgttgcccacgctggcttgtggttggcacgattaatgtttcacaatagtagctcgcgaaccggtccttaattgtcatgagcacgactctcaaaaccatgtgctcacaacccaccattatcaagttttagttggcaagtaattaaccaatcactactgaccatcgtgagctaccattaaatataaccataaatgatagtgaaacattagttatcccaattgtgtgctaatgtttctaagcatggctaagcaatcatatctaatatctagctgaaccaatatataaagctcaactagtcaagttataatctcccaaggtaacaaggaataaagtaatcaagaacaaaagggccatatcaaagaataggttaattccacccaatggcattcgaaaataaatgcacagttgaaataaatagagaatttaaatataggatcaacatgttcaaaggattgtgtttaggatctgtgtgacttgccttgcaataatcggtcttcaattaatcttcttgaacacttccggcgcactcgcaaaccttcgcaacgacggaaacgacaagctaacacgcaaaacgaagaaaaagactaataaaaaccaaataaacaatacataaaaagtaaacaaacatgtagatcataattttagatgaattatgagacttgaacggcctcattctgacttcaaatgaatttattatgaattttacaagattaaatctaattaaagcccatttaaaaagaattaaataaatttaattcaatttatggacaattttaatatgtagatctttattttatataacttttgcaacttgaaccacattaaactgagttcaaatgaattagttatgaatttttaaagattaaatcggattaaaacacttatattgattttaattgaattatgacgcaataatgaattaattttgaaaaggaaaagaaggattattgcgtcagcggctagggtttgcggtggaccgggtgcacggcagcggttcacggaaacgaacggccgagatcaactctatccaaaacggacggccgagatcgatcggtccacgaccggctcacgggagagggcgacgatgacgtcagcgatgacgtcaccaccggcggcggcggctcggcggctcgggctcgcatgctcgccggcgaacgacggcacggcgacgcgaacggagagcaccaggacgtagaggacgacgcggcgaactcaccggtgaccaaaggaacggcggaaaagcaacggacgacgccggcgacgaggatgaagcggcggcggagatcgggtcgacggcggcgacggtgctccggcggtcttcggcggcggtgaagcggtggacgaggacggcgacgacttggcgaccacgatgacgacctccccgagcgacggcgacggctggagcgacggcggcgcacggctggagcggcggcgacgacggcggcacgagacggcacggcgctagggctctacggacgacgagaggcgaaggcgagggtggcgacgggtagaggagagctcgggggtccttttaaaggggctcggaggcggcggcaaaggcccacggcgaccggcggcgagaaggaaaggttgggctcgaagagaggaaagccgatccgattcgaactcgaatcaaactcattccaaaccgatttagccgaagtttccaaaggagaaaaggtagaggagatcccgaagattgtttcccctctattgatttcaccggagaaggaaagacgcggctgaatttggaaggagaaggcggcggcggccgaaggaggacgacgaacctaacaagcggggcccacctgtcagcggctgagagagagaggagagcggcggctcggcggactgggccggctgggccgagggaaagagagagagaagggttttgggccggactgtggagtaattcgtactttttcatttctaataatttgttttggccaaaccggagaggtacactatgccatgattttgtaaattcaatttgatcgtagacattaccagcttaagaattggagtggctaacggatatgcagttacaaaagcacaaaataggtcttaacttattttttagtacttccacgtggttctctgtcagtatatatagtacgtactgtactatcagtattatcactagtaacaacagtgctctaaccaattatttatcagttctacttgcgtaaaaaatattgttccaatgattaaggtggtaatgtaaatatatctgctccatcgaatgagaaaggatgaaattgcgctcgagattgattctactgcatgtacataacacagtgaaattggtgattttttcagtgtaagccatatatgcaaagtttttgcaaggggtcaggttgcatatgtatggacttacgagttgtgatggaacaatttgacaagataaatttatcctaaacttatccattcactacttcagtatctaaacttatcctcgttagcttgcaattacatagacttcgactaccttgataggttactgtattgaaagcaattcaataaattgcttgagaatcatatcatcaggtcttgagagttggaatcctatatatggagactagcagggtagcatttaaaaatcctctagtggtttttgaaatgcagtgggtagaaatctggggtattttttctgtacgatctgcaaattaaaactggcgttatataccattaatttttcaccaaataaatacacttgtcagtgctaccaactcaaaaaaaattgatgtattgctggagaaggacaagatgggtcatgctactacatgagggtgttcgccgcacatatgttttctttccgagctttccaaaaacggaaaattggaatcatgccattgtaataattttacaaaatttgagatatgccattctgacccacatatcattgactcatgtgggtcctatatgtcattgagataccgatggcatatctcaaactttgcaaaattataatggcatggttctaaattacccatctgaaaatcacatgccatgttctgaatccaatttgcccatgagctttctgaagctcgtttgggcggtgtatgtgtggttaggtcgttaggcacagaaggcatcatgatttctagatggtcatatactgtggccggtagttcaaatttgaaagcaaaacgcaaaatggagcgacaagatagtgagttcgtgagtttctggtgctgcattgctgtttttggaggtttattgggagtgtagtgtgcctctgccccccgtcccgctgatcggagttgcgtttagccaccgtagtagtttttcttttcctacctatagttgttttttgttttgccttttctttgtcacccggcataggcatgtttggctaattgcgttaggtaagaaaaactcttctaccttctaatatattgacatgcaatcattttgcgtgttcgaaaaaaattgtttctggtgttgcagtactgcaatggactgaaggaaacaccgattttttattaaaaactaggaaggtagcccgcgcattcgcgcaggcatgtatcgtgtgctgcatttgaaaacggattatatttatcagatagcctctgccatgttttggaagtacatttcctcagcaaatatttttcgttgacatcacgttgataatttctctatgctatatactatatagtatttaattaatctgtataagcaattatctatcatcttcatcatcatctaaaaaggagttagacctagtttgtttagaaaacatgtttattaaattaaaagcaaggtgtttttttcttttttttttgttgaatgctttgggccctgatggtaaaaacataagacagctaaattcattgttccttttcccctaccatacgattttcatgcagctcctagtcaccgtgttgagatgtggtcattgcacctatggaggttgtcttgtgattcatcgtacttgtgatcactttttttgtcaagcttagttactcctattttcatttcttgttatatcgtaaaatctaaatggactccaaagttaatcattaaagtatatatgtacaacaaaaatatatttgcagacaattaatgttcatatatagggatgattcaccttttgaatgatctatgcacaaagaaaataaacggaattacccgaaatgcttagaaggccagaacaacacacttgaacatataacaatgatatactaattaaaagtgcattaagcaccatctaaagtcaattagatggtaacatagtttagagcagatacacgaaagatcatttagcttgcttggattattttagcacatttttaaaaaaaatcatgaagtaatcagatattctctaactaaagccattggattttcgatgcattggtgctttggacttcatattttagttagtcctatttgcttagatagtgtatatctaatttagctatgcatgtttgacaaacaacatatgatgatgcaacctgtattggattatttcgtaattcttttacagcaattcaaatgacatgtaaaagggcagggatgttcttccttaataaaaaatgtttcatagttcactttgaaatttttgtttggataactattgatttaatttagctatacatgtttgcagaatgatgtatagtgatgtaatatgtgcagcaaatttgttttgatggtatgcaaagcgcgcgggatgaatgtggctgaatgtcatattttgtacataggaaaatataaggatacggatcttaaattcctagtttaattataaacagagcaacaattatattagaaatcaggcgtagattaaaaattatggttgttttaatatattaattatctctcttttagcttactcatacccaaaaatagggatgggattagcagtggtcttcacgcatgtgaagggggcgaggaggtagatgcgatttgtttttataacttctccaaataatgtaacttaaaaccaatgataacaggtttaattttttctcaaaatttctaagattatttatgattttcaggacaagacatgtggcggcgtaagattttttgtaaattaaatttaatggttgaaaataatggtccatgaatttaattgaaatattttataattttaaaatgtgacatatggtgacttaagtgtgctctaaaggtgtttaattggtttttattacgtagactgatttaatatgaataatacatgttttcattctattataatttttcattttcattcagtttccatgcaaaggagtattttaatttttatatagtaaaatacaactataatggatattgaattattcaattaattttaaataaaacaatagttaaaataaatgaaaaaaaataaaatataattttagaaattataagccatttagctttttttttaatattaggttgttagataaaaaatataaggcgagagattagaggaagtatatgtatagcaggacgagagatagagattttttttctgagacatattccaacggatcctagtctttagttatctatttttaaaatatagatataattttagatctattagaaaatgtgttgggtgttgtatttactaatataagctaaatgttgccaatcatatggtttaaaaatctaattgtatcgtgtgaccaataggtagttgctagcagcatatgacccaaagaaatacatttattttaaatgtagttaatgtaggtattgaattctaaattttattgtaaataatctcatgctgtgcatagataaaaaaaattgctatttagatggtatagttgttgaaaataatttattacaaaatatgtttttcaatattaattaagaaaatgcttgaaaataggagggcatgtcgccctcatgtattagggtgagggcaaggatatatgatacataactacgtacatatacctaacgtaatgtaatggatggcagcggtggggtgtgggcctttctttttcttttttttttaagtaagtcctatggtagaaaatatgggtccactgtatattagtgaaagtcgatggctagatgttttgttttttctataatttgctagagtgagacatggtgagatgagagcatttgtagaatgccatatttttaacggtttaagagtgtttctaggatgtttaatagacttttagtatattatagattatcaaacaactaactattatatatcagccccatacgtcgtgatgtatttaggaccacaatataacttttataatttaattaaagtacaacggaatcacaaattggatatataatttaaaaataatttagaagatagttcgaggaacattgattggatattttatattattattatagatcttagtttaactatatatatttatatttgtgttgtagtttttttagaaaacagatcatcgatttttatgatgtattattttattatcttttctatgtacgtgcgtactgtttttttcttttctttccagtgaacagtacgtaaactatttgttttgtttttgtgtaggtaagtacgcacgggagaaggacgtggtttgcatcgtatcaacttgtacgtacatggcaacaatagtagtgcttaaatcatacaaagagaaagttattattttttaataatagatctaatccaatggtgtaaaatggcggatccaccaatttaagtgaaaatcgacggtgagatttgataatgccatgtggcggtctaggagcgtttgtaggacaccacgtggcggcttatgagcgtttgtagtgttaaatagaccatagaatttatatactaaataaaaatgactatcatattcaaacagaaatcactttgtctcaattttatgtaaactcgcctatcaccatcctccgcaagatttttttttcttttattatacatctaattcacctatgtatgtttatgggtaatatacgaaggaataatttatattgttgaaattatttgtgctaattgttaatgctatttacatgagaacgacataattaaaaatgatattatatggggtagggtatgcgtatatgtattcatggagtgagtatgtacacgtttatatgagcgcctatgattacctttacaatattttaaaaaatctttcaaaaaaattggtgggatggcgtgaagtggcgccatagcggcgttgattctttgataacatcgccaggagtggttgctatatacatatataatttgaagaaaaccttaaggctataaagagagaaacagaaaactaccaagatgggacagatcgtatgcactcttctctttttcttcttttcgatatctcttgtgtgcatacgtacatagggatagattagctgatttttagaagcaagggattagaatatatctaatctaatggttgaaaatggattcatcggtttaagtgtaaattgatgaccagatgttttgcctttttttcttatatttagcatcacatagcatcttaggctgtgttcggcagtgactgttcccatcctctcctcctcgttttccacgcgtactcttttcaaactactaaacggtgcgtttttttacaaaaagtttatatacgaaagtcgcttaaaaatcatattaatctatttttagaaaaaaaatagctaatacttaattaatcatgcactaaatactgctccgttttgcgtgccaggtagtgagggttgggaaccctcactcccgaacgcagccttaggagtatttgtaggagtgtaggaatgctattactcatactcacaatctattgtagtcaactattatttgatgtggcttggtggcactctctatttatctatcatttgttcatacatgcccttagcctgagtttggaactgagagttcccagctctcctcactcatttccgcacacacgtttctcaaatggctaaatagcgtgatttttgcaaaaaaaaattctataggaaagttgctttaaaaaattatattgatatatttttcaagtttttttaggataatacttaattaatcatgcgctaataaactgctccattttccgtgccagcgggaaacattcccaactctaacgaatgaaaagcagcattagtattgtcctttatcctctgtgcttcatgacaaacgtgttcattggatgtcagctaattattagacgcaatgtgcatggataccatgtaagcaatatgacttggcaattggtggatagtggtttgtatatagaacttagggataaattagtggggacattattgaaaaattatatattgtatgctacatattagttttagtacatacgtaatatatttatagttaagttctaaaacacttatctgattggctactcactttgttattgtgactacgtttaccgaattgctaaatggtgtgtatttgaaaaatattttctatacaattttttttcaaaatcaaataaattcacttttgagtttataatatttaatacttaattaatattgcgctaataacctacatcgattcgtgtgccctggacatgctcaaccaatgagctagatggaacgaaggctaagtaggagataaagaacatcaatatggtgtcaaaagaatatatttattctttaattttctaataatatatgaatagagaaaacacaaaatacatgaaaagtgaaaagtacatttatgataaatttagaagtgtcattttgatatatgtgtattttttattgttggagttatttttttcgaaaatataagtcgtatctaatttaactattatataatctacatttttcaattcatttatgtttttcatggatttttcgatgacatgtgtctaattagaatacaactcgaaataacatattccctctatccaaaaatataataatttttcactatgaatcgggactaatacttgttcagaattatagttaaaagttagaatgtagtacatgaaatagcatagtacatgtgtattattattcattatggttttactatatttttattgttttgttgttatttggttgtcacgcaaatgtcaaaagtatgtatatctttaaagttagaagagtattttcttatatgtggatttaatggtttcaccggttaaatgttatggatctacagatttaaatgcaaattaatagttaattgttttctttataatattttttttaaaaaattaaaatattagatagaatataggaaggtgagagagaggattattggacgatggaggaagtgtgcgtgctcatgtgcgtgcacggggtgttcggagggattagtatgcttttgaactaatctaaataggaaaaaaaaagatgtgcaaacgggagtacataagtacgtacatacgtttgtttttcttttttggcaggaatactatgcacatacttaattggtagtttctgatagatattttccggaatacttacgtgtattttttagtagatgtcgatgtatatagatctaattaaaattggtataaaatatcaggtccaccaatttaaatgaaaatcgacggcaagtatagatctaatctaacagtataaaataacgggtctactaatttaaatgaaaatcgacggtgagaatagactgtgccacgtggtggactaagagcgtttaaagatagaacgtttaaagagtattgattggatactttatttttatattaattttcgtaaatttatagagtagtatattttatttttaaattgtagaaaatcctaatttatgtaccatcgttttttttaatgcactacgtacctatgtttactttttttttattacgcagcttcttttcctgttgtacgtaattacggaatactttttgattggatacgtatacggagtttttgtttggtttcccggcccacagtaaacatgagaaaagtattagtttctttaagaaaataatacatccaatctaatggtctaaaatatcgggtccaccaatttaagtgaaaatcaacggtgagattaaacaatgctatgtggcggtctaggagcgtttttaggagcgccacgtggcggcttaggagcgtttgtaggaagtttaatggacttttagtatataatagaaagaatagaatagatagaagatagatagatagatagatataatagatagatagatagatagatagatagatagaagatagatagatagatagatagaagatagataatagatagatagatagatagatagatagatagatagatagatagataaccgatcccttcataggagttcagttatagtaatatttacttgcaggatactattctcattgctgcagtactgcattggtctcaaactctcaatggacagaaggaagctcagattttttttattaaaaaaatcgatcccttcatgggagtttagtaataatatttacttgcaggatatatactattctccttgtttgcacttcaaattattttgcacagtctttagactagcatcgaatatgcaaaattaatggagtaaagacctccataatttcaacaagtgactagaaaggcattacaaattcacgacgactacttaaaattttgttgttctctaaagttcagactaagtgcaaaactaaaggtctggttttgtatctgatggcgctacgaatcaagtgcattcacaatataccaaccagtaatactggtgatataaggtttggttttggttttggatgcagttggtgatgtaccgcaaaagcccagagtttcgataaaatattactactgaagaatacatatgctttcctgctctcagtgacaaaatgagatgcacataggcagatcatgagctacactgtcagatcacgagatcaccgaacatatcctcgttaggtagcgatacgtagatctgactaccttgataagttgttggactggaaacaattgaaaaaatcgcttgagaataatatatactccctctgtattgtaatgtatgacgccgttgactttttaaccaacgtttaaccactcgtcttattcaaaatttttatataaatataaaaatacttaagtcatgcttaaagaacatttaatgataaatctagtcacaataaaataaattataattacataaatttttttaataagacgaaaggttaaacgtttgttaaaaagtcaacggcgttatacattaaaatatggagggagtaataggttgagagtagggaaactttcagttggtggaaaactagtggaaaaattttttgggtgcgaatcagtacataaaacggacgacacgaacatgaatttcagtgaggaatcccatgtgaggattttcagaaaataaatatacacttatatggcaatgtgaggaacggtcttgtcagtactaccgtcttataaagttttgctggacgaggatcaggcaaacatgttttgctggacgaggatcaggctcatgctacatatgttccccatacatatgttctctttgggagttttctgaaaatcataccacgttctaagttcaattttcacatcccaaattgcatgtcatgcagagatataagtgtgttaggcatggaaggcatcaggatttctatattctcatatactccggctcatagttcataaatttgaaagcagaagaaaaagtggagagagcagtcattgagcttgtgagcttctggtactgtggtactctctccgattcaggttataaaatattttgactttggtcaaggtcatactgctccaagtatgaccaagtttattgaaaaatagtaatattttcgatccaacataaatttgtttttgaccaagtttatttacgatgacgaggcgccaccgccgactccacgtgcacgcatgtaatgtcccgattttcgttcggtattaaaaatcattaaataatgcatttccagaaattatattaaattttaaataaatttaatcaagtgaattattgagggaattaaaaattttctttaaaaatcattggctggaaatattttgtaatattcgctgtgccctaatatactctccggatttttccacaatttttcggagctcaagaagtaattataataatacaaagggcttgtttggtacaactccaactcctaaatttagctctaggagttaggtctggagtggagttgtgga

SEQ ID NO: 29117 - DNA, 1950 bp, Oryza sativa
gaggccgccgcctacttctccacttcctgccccacttttgtccaaaaggtcggcgtcggtttgaacccctcatgctgaacatcaccaccccacgtcgtcggccgattccgtctcacccgacctcgattccacactcttgcgcccatgaaaagcatcccccgaccatgctctctcgtttcccctccccgcccggctttcccccgcactctcccgttctccccacgcgagcacaagcgtcgtcgctcgccatcgacctctggacgcacgccaccgccgctagggtcaccgccaagccacgccaccgccaccattgtctccgccacgccgagccacacctcggcatccgctccacctctccccgtatccctgccggaaccacctccgcaccgagcacccgagccacctccaccatcgccacctccagccacgccgcgccgcctctcatgtccacatcgcgctgcgtcgtcgccttccccagcaccgcagccaccgtgcgcagcccgtccacccctccctcctcgcgaaccatcgcgggagaccgcttccctccgtccaaggtgagctctgccgatccttgccgcttccgggcgccatttccctcggtgccgggcctcctcctcgctccctaaaccccctgtctccttccccaggttcttccggccgctgtccgccagttcccgctcgcggaatgccgccatattgccgttgccgcgcctccccgaggagcctgccgccgctttcccatcgtcttctcgccgttgcgcgagcacggtgagcacccctccctctccctctatctccccttcgttggctgcctcgtgcgcgccgccgccacaggtggccattcagccaggctgctcgccgtcgtcccgcgccgccagtggccgcgtgccgccgccgtaccatggctcgcctgggccagtgtcacattctgatttttgtttcagggtttataaattatttaataaattaataatagaatttatattaagtgttctttaatttgcaagtgaagtaaaatgtgggaaataaaatttcctaaatataaagcatggatggatttaatttttattaaattctccatgattaagtcaactctctgaaattttctcggatttttcagagctcaattcctaaatgatacaaagaacagttcagtaattatttgatcattaatgatctaattataattgttaagtgcttttcttgtttaaaatccttaaattataaattgttgtttaaaaggaataattagaaataattttaaaagcttaaaagagaagatctaattttaatttgctaaatctcaatataaaattgggctagataaaattttgttaaatactttgcttaattctataattcctagatttttctgggatttatttgagctaaggaagtatttttaataaatggaattgcatttaagaaataatttaaattgaaaaatgtttttaaaagtctgttttggctttgggccgaaagccggcccaaaacctctctctttctctctcttctccccggcccaagccggcccgcagccgagccgccgctctcttctctctctctcagtcgctgacaggtggggcccgtctgtcggtttcgtcgtcctccacgcgccgccgccgccgcccgaaaccctagccgagcgccgccgccgtctccttccaaaattcggtcgatcctttccttctccggccgtatcgtttgatgggaaatgatcttctcgatcacctcttccttttctcttttggaatcatcgtctttttcggtttggaaatccgtggattcgaagtcgaatcggatcggcttttctctctccgagcccgacctttgcctttttcccttttccggggttttccccggggcggtcgccgtggccttcgccgccgctctagcccctttaaaagacccccgagctctcctctattccgtcgccacctttgcctt

SEQ ID NO: 29118 - DNA, 980 bp, Oryza sativa
caacggctttaccttttgtatagcatggttcattggagagcaccagactgagaagtggcggagataagctcacgggggtcgctggggagtccatgcctcttgtttttgagggggtgattatgatctaggaatggtgcactgtggtgagttgtgttatgtagagggtattgtcacagcctctattcgggtactttccagtatcgcgacgtatggtagacatgatgttgaggctgtgtcttgtgggtacagtggtacacctctgatcagagtaaaactattcgaatagccgtgcccgcggttatgggcgagttgagcaatgtttttcgtgattagtcccacacctctcacaataattatggatgttatacctggtaataatttgcttagctcctggtttggagttagatctgttcagccgggtatggttgttcagaatggttgggcctgtgcagcatgggtgtgctgttcagtgttgattaaaattcctgattaattactccactgttttacttctcttaaatgttttgctaaatgctgcttttgcaaatgagccaatattatgccatcctttggtatccttgtgcacttgcatatttgctgtgtggcttgctgagtatgtcatatgctcaccttgcaataatcaatcaatctcagttgaataaaaaggatctcgaaggagaagacgtttggcttataccccagttgagctgcctgtgggagtggagccggagcttcgctagattttattttccgctgcagttttcttcttggtgaggactaagtgcctcttaagtaagtatttatcattttagttaatttgatgaatctgtatattaaattgtcagtttgtgtacctcggctgattcctggacgaggattttatgcacaaataagttcggaaattactagtgaatttccgggcgtgacagtacctctccggtttggccaaaacaaattattagaaatgaaaaagtacgaat

SEQ ID NO: 29119 - DNA, 15931 bp, Oryza sativa
  unsure (1)..(15931): unsure at all n locations
gctaccgcctccaccgtcctcctccgatgctgcctacccgcatccgcctcgtcttcttcctcctcagatgcttttctgcccttttccttcttcaccagttcaccaccaccctctgcattgagatcaaggaatgaccacggatatccacttgttcaggtaaaaaatctccctgttataccagatccatgatttgtttggtctgaaatgagtgaatgtatgcatgtatgtatggattgtttcatgtgttaaattataagtgaatgaatggacaaaataaacaaggagaaaatagcgaacgagagattatctacctgcttggctgtgacagttagatcctatgcattgtcagtctgtcacttttcttcctagtagtaccatgatacacttattattatcgtcctgctcacaaaaaattgcagagttcatcatcagggatagataattagaggctttggatatatagcattgcaatgtcaatgttgcatatgcagcagtgtgcaaaccaactttttttatgtggaggaatcttgtctctgagcctgtttggtcagttatattgttgagctagacatgtgtgagaaacagtatatgttgagcctgtttggtcaaatatttattttaagtgacattataatctatttccaagtttgaactatttggctctatggtgcagtttagtcgtccactaccgattttgctgcaatcaacctagatatcatccaaggtgtacgttgctgagcatctaccgaacagaagtcccgaacaacaaatgtacaaccgttagtatcctcctgcttgccatgagtactgtgctaaaaggctgaaatgttatatcctcatgttatatttttcttgtgcaatgttttttatctttttcccatgggcacactggtgagtacttgtacttcacgcacaaaaaacaccactgaaacaaactaattttaagtggcctctgaaatttgattgtcaatatcagctttggataggagatggatggaccttcctaggcacaatttaacctgacaatgaaattgaatatgtagaccaatgtcctgatttaggtggcggcacaaacattactattgatccaacatatgtttctcctgttagatcaggtataaatggaataattgttaatgcaaatgaaaagagaaagccatttcaccctcttctcagacgcaatcttttacttttctgttgttttacagaattgctagatttttgttagaactgctattagaaaaattgagtcacttggtgaggaagtggaaaagttgactgaattacttgctaattctcgagatggacaacaagtcaatgtaaatcccttagtcatgtcaacttcttcaacaacttaaatgaggtaaataatgcgatgaatacagttctattctagatgatcagtgcctgtttccgtttcattacttttggccaacaatttgtattggttgaacaggagagtacaaatggctagctttttgttagagctactgatgctatcctggacatgaagagttgcatgttgaaggtggtcgcttgttggttgaattatttcatctacacatcggtggaccatcatcatacaagagtcttgggaatttttgctaattaaatagacttgttttgtatgaatgctaagaaaatgtactcgtatatatgtacactgaagcaagtgtttgcacactctgctgtgttggatataactacttttgatcttgtggaatcttaaagtcagtatgtttttttgatgcaacttaaagtcagtatgttaaacctgagttgttgaatgcacattgaaagcctatggggtattgaattgctgaatgtgtgttgaatgcctatggagtttgtactgattttgtgggctgatttggtaccgatctgaatttgtgtatattggacccattcgtactgatttggtccatgattgaaacaaccaagtgccagtaaaactactaactgtcaggctatatgccagggatgctctaagcatcaagggcagttaattgccacggatacaactatctgccgggaatactctagtgattctagggcagttaattgccaggaaaaaattatctgccgggaattctcttttgctacaggactttatagggcagtttttaagtgccgggaatagttttcccggcagatgaattgccattcaatgcacttatctagggcagttgcaatgaagggaatactaggtcatggtgtagtgtttaggctgcctacctcgggaataaatagagagagaaaggatgtagcctcccggtatcatttttgagagagtggagtttagagaaaagttaggctttcgagtttagtcgagatttttgtgaggagtactgttgtcgcactttgtaagcaccgagagaagtaataaaattccaatctacttagggacatcttccatttgtgtttctccgggtttcggtggtcacaccagtgagtgcatgaattgcaccattgcagttagactggcggcggcgacagtaggaggaggagacgctagcagttggactgggtgatctataccgatcagactgacggcagaggcgcgatcagactagcagatcaactccgattagatcgaccaccatcgaattagagggtaacttttaattccactaaaagttacggttttcgggtaacacaaccattcaccccctggttggcttagttattgctattcgatcctacaaacagcacatcttcgatcgaaaggtgtaaaatgagagttttattgcccttgatatttgcactcattcaacaattttacagtaataactactaatatttgttggaccgaatagaaataaccaagcaaatcagtgaaggatgaagggtagattacgtctacaaaagttaaataacgaaactttgatgatcataatgctaatgatcgatgaaattattttcaaaaggaggagaaaagatacaaaatgtgcatatcttaagttgtggggacatttctttcttttcaaaagtgagacaaatttccttttgaaattttgagcacttgatgctttttaccacttctttgtttttatttttccaaacaccaaaacaacatttttgataagtttgctaatatgtttattaaggggaaattgtaaaatgaaagtatgtttgatcgataggcatgcgagataattacttttgatatttggatattatttggcaaagtggtttgtagatatgtgtgttttttcagatgatggacaggattttgttgactgtttggtccggtcatgatcaggccagcatgtgttgcgcagtcggactagctagcccgacggtctgacctagcggctctgtgtcagttttggtttcaagttgcttatttggatactcttgattaattcatgtttatgacttatagatggatactatatgtatgtaatactactgtatgctaattttgagtcaagttgcagagatatggtttcgttgtttattcatttgtaggtgagtctatgcgttgggacagcgttgctggtgatagatagggattcaacttggaagaagatgacaactggacgattagcatattatgcgggatgcttcggctaatgatcaatgcatatgattggtgaaaattccttatggcatatatacgatggagatattgtgtagatgcaaagtcaaatttggaaaaagtccaaattcgatatgattaaagtttgtcaagtttatttcttgtaagagattgtttcctaggggttgggacttcttgtgcaagttcgagttgtgtatttaggctgtctaccttgggtatatattgaaagagggaggatgaggtcttccggtatcgattgtgtgagacttgagtttatagaaaagttaaggttttgagtttagtcgaggttttcgagaggagtgctattgtggaactttctaaacacgaatagaggtaataaagtttcattatattttaataaatcatcgatttgtgtttgctcgagttcgacgatcacatcggtcagtgcacgacggtcagatcagtggcggcgacgacatgaggaggcaacgcgactcgatcagatcggttgcacagacgtggtcagaccggcaaaagacttgtggtgagaccgagcttcatcgatttgagaataacttttagtttcgctaaaaattttggtttttgggtacttcgaccattcatccccttggttagtttagtttctgctgcgcaatcctacactattagtagtcaccaatgattaaataagggaacgccaaacaagaatctcgtattatcatgttttaattatttcatatttagaaaaatgaatttaagtaacttgtttataaaaatttcgctcaaaatacatggtttagtagattaaaaggggaacgactctcggtcgggcgcccgatcgggagtggtaaaatcgagcactgacgtcattctatttacgtgcaaaattactttaaactgatttttctcttaaattacttatccaaatcataattcgattgcaccattaaattcgttgtaattaaatcttcaaaacaagaccacatatggatatattccgacgaaaaaaaatttagcttattattgaattatttttaaatgttgcacgatgttccaccaggtatgtcggaattgtttcactaagtagatcgaaaatgtttcactcatttaaatcgggtgttgtttcaccttatataaaaataatgtttcagcaaatagcgaaagaatgtttcagttcactgtaacattagatctatacatagtgaaacattgtgagtacactaggttttttagtgaaataaaaaaataaactaaatttccttaatagggggtttccaaaatatgtgggttttttttgttgcaatggaatgtttcgttcactgtaacattaaatctatacatagtgaaacattatgaccacactaagtgaaatatttttgctggaaaaaaaaaccaaatacccttaacagagtttctaaaatatgtattgtggttaatttgttgcatgtggggacaagcactgtgatgggtccagcggcatgcaggggcaggggcgggggagccgcccgatttttgctcccccgcctggccgaccgattcgtatcattatccgattaaaaggtgccctaacgaaacccaatgaaaaatctgtcttaccttaaaaaggaacgggaccttaaataggttattttttttaataaactcatccttaccacagttacttttagttttatagctttaggaacacagctcccagtttcttttctttctgaatcacacatatctaccactccagagcaactcgtttttagtggtaaataggatgcataattcataccagttaagaacacagcactattagaacacaacttattcatacacagaatagtagcacatacatatttttccatgatcatagccacagttcatactaagattttatctatttggcccatttcatggaaggttcagacctgcagagttcttcagaggaatatactgaagttcatgctcagaagaactgggcattcactcatccttgatgtcatcagagcgcagcgacgttggatacaagagcttctttccaccagcctcagccatcttcttgctcggcgcatcagcttggctaccaccatggcggtgcatgtacaggaggcggtagcagaactcgacgacctccggtgcgaataccctccacaggtacattgtgctgaaccatggtggcacggtgagacaacgcttcccttgccgaaccgcttgtaccatggcttttgcgcaattcttcgcgtactccacgggaaataaaccaatttgagcctgaaaatatatatatattgtaaaatatttcattccagctgaactaagggtgtgtttgaggagaaggggattggggagattggaaagatacgcaaaacgaggtgagccattagcacatgattaattgaatattaactattttaaacttcaaaaatggattaatatgattttttaaagcaactttcctatagaatttttttgtaaaaaacgcaccgtttagcagtttggtaagcgtgcgcacggaaaacgagatgcttttctctctcaatcccccagattgcccaggaacgaatgaagcctaagtttagatttctttgtatgcccccttatagtctagaactttgtatgaaaaaatgttcaaagcagtggtactgaagtctgaatcttatgttgtgatcaaggagcctagtgtgatttcagaaggacttgtgaaattgacaagtgggtgttcttacatctcgcatttcttgatcgacctccatttcaccatgatccttgagaaatttcccttttgacatctcagactcgatccacccaggtgttacaattgtgattccaacttggctaccaagctctgtccgcagcgtctcgtagaagtttatcagtgcagcattggcagcctaagcagaggagcaaaagacaaacatcagtctcaatactgtcacatatgcattttcactaagactgcaggacattaatttacattgtagaaggtcattcttggaacaggattccatccggttgccgacgcagtaacaacgattcttcctcggctccttttcagatgagggagagcttcaaaagttgactgaactgaaccccagaagttcacatcctgaaaatgaagtagttcataccagtggttaatttacggatcttgaataaactacacactgaactgataagaactcatcaagaattatgttgctcttacaaattgagagctgtagttagtaacatctggaatctcctgaaacgcgccaacacttgcgatgccagcgttgcacacaagatggtccactgaaaaacaagtgtaaagctcaatgaagtactgaaatgatacttttgctgaagaaatttactgaacaaatcagtgatattggagacttgcatcgcccgtagtgatcgattgcggtctgaacaaatcttttgcagtcttcaggattcgcaacgtcgcccggaagaatgatcacatcaggtgctccaagctcgaacgcttgatcggcaactttacgcaggctccattctcttcttgcaacaaggaccaatgatgcccggttcagagcatagttgtatgctaattgctgcaaaaatcatcacgtgacatacgcaaataaatcttcatctcggcatacagaaataaacagagaattacaacaacctaaagttgaactatgcacaaacatatggtggtactatatatccttcgaacttttacaaattgtacgcaacgcgcctaatttgggatcttcaaagtaacaacatgctcaaactattttactctgaaactgtcagacagttatcatagttttggaaaaaaataatagaacaaagatgcgatactacaaagcaggcacacgaacacaatggcaaaacatgaccaaacacacaaaaatcagagcaattaattcaaagaaaaacagtcagcctgcaaaaagctgatacacagagcagagcccgtggccgtcagtcgcctcacgtcgccgatgcaggagaaggggccggtgatgagcacgaccttgcgggcgaagtcntcngngaaaggtangagggaaagagtggacngtcttgaaaggtagtagggcgggtagaagagcagcagcctgtccaccatggccggcgtcgtcacccagttgagcacgccgttcaccaaatgcaccatcgtcgccttcttccttgcttccttccttgctcctctgcaacctcgaccgatcttctcttcgatcgttttcagcttcagacacgtatcagagcagagcagggtcgcaagaacacaagtttggcagagagagagcaaagatttgcattgccgctctagtattttgcatggataggaggttgctcggcttggggacacgtaggggtggtgcgtgctgagacgtggagggcagcgggagcgctttggttggcttgctccacgcatgaagccggcttaatttgtcctcatcctttgcatctgaggccctgtatagattccacctaaaatttttcgccatatcacatcgaacgtttaaatacctatataaaatattaaatatagatttaaaaaataactaattatataggtttagactaatttgcgagacgaatcttttaaagtctaattgctccatgattttaatgtgacacgctaaaactttacactatgatctaaacaccccctgaacttgtaaattacaacctccgtcccaaaatatagcaacctaggagggaatgtgacccttctaagttgatgtatgtggactgtcattccttcctaggttgctatattttgggacggagggagtaggcgtaagcgaagagagagaacgtatatgttggcagatctcacactcacggcttgtttggcaacttgagggaagaggattgggagtttacacgagggaattgacggtgagattaagatgggaatttgatttttcatcccagtctcttgtttggtagaggtgatagaaattgatagggagtttagttggagattagatcattaaagaaaacggatggctgagatttgtttacgcgaagtaaaggaggaattccctcccaattacctgcccctacccagatattgaaaaggagggagttcattcctcaattccccatcctcatcccaccaaaattcctatgtcccccatctaaacaaaacagttaatagccacatccctctagactctaaatccctcctaaaaactccgtccaacaaacagaccgtcagctcacttattactgactaccttcgccggttgggccctctgcacagggccggctcatctacctgggccgatttgctgtctcgaccggtcatgcaatgggtccaataacatttcagcgtacaaaatgtaaaagggtgagcttaatttctatatatttttagtcaaaagtgtttaaggattataagaagtatttttgaaaaaaaaaactcatgggccttaacccattatcatccctagccataccctgccccagcagtcgcatgggctgcttggcaggagggctgcttgctagtgcatatgcgctgtgacagcaagtagtgcagcccacatgaaaccattactgacgtgcacaactgcatcacgacagcgcgtcacccctgacactaagcatcacgtttgatttgagagttttttttcgatgcgtctctatcgtggtgaaacctttcaactccgattacagaactttcgattcaattctgcaactttgaatttagaaatctcaaaacatcaaaccaaaagttacaaaaaaaaaattggattcataatctaaaactttgtactcatgttctgaaattttcaattcgaattgtaaaactttgaatccaaaatataagacttttaactgatagactaaaactttctacgtatacactaaaaatttcaacttgaatcacacaactttcgattcaaaatctaaaactttctgctaagaattccgaaacttcataccaaaatccctaaacttccatatcatagtatccaaaaactttaactcaaaaattcaaaacttcccacacaaataggtacaagttttctagatttgaatttgtcaataagaagccgataactcaccgatgtctcactagggcggaggaagagcagcagttggagcagcattcgacagaggtggaggaaaagatgatcccaacctcgctgggttcttgtcgaaggagaaggaagaagcatcgtcagctagagaaacggataaaagtgagaggatgttaatgggccttatgggtctagtgttcgctactttgctaactagcacgtgtgcgcgaatttgcattccaagcctcggcgcacctcttcgactctcgcgtgcgtacaaatgtacaaatgctgagtttgtgaacacgaactatttggtgattagcaacttagccttgcatgagttcagttacgtacggctccaaattcccatgacatggcaaacgaaaacaaatgccatatcaatgtatctcgcacaataacttacttttcttactacggattgaagtctgattattttgacttatagcagttgcattgattttctttaatgaggttattaataaattacgttctttttttagataatggaaatggattacatcttctaacttctgtcataagacaaacaaccatacgtttaatagtaataaaaaggtaagataaaagtaaatcaaaatgagaaataaggtgatgggacaaatccccaactcccctaaaattacggtctactagcagaatttgatgtggataccatgcgttatctttaactactttaaatttaaaatcaaagccatcttcattcctcccttcaacaaaaaaaaaaaaccgctagctccatcaaaaaccacccatctttaattaaaaaaaacaactccaaaatagaaaaagaaatcctacccattataaatcggcataaaaagaaagtaagttatatttgcaataatatcaaaagatatggcaaattggcccactaagaacctatttgatatggctctagctctagctctttctcttctggagttagagctcaaccaacactactacagaaaccaacactactacagaaacataaatagatatataccggttgagaatcccacataaactggcaccatgcatgaggcacacatgaggaggaatcaaaggtgccggtttaagaaccgtcacctttgaggtttcactaatccgatgccttgcgccaagaactgaatcccagaaacaacagtatgagatttcaacaatataaaaaacatcccgaacaagccacaaccgaatcttaaaatcaaccatacccccaccccagggaagaaatcaagaactcaggaggggagaaggcacagtgccagtggtgtcggcgtgggaagctaatggagaggttgtgtagccatcgctcgcgaatgaggatgcccgccgccgttggatccacccaaaggagggcatccgccaccgctggatccgcacgcgagtcaatgctgccaagagagaatcagtcgagagggagggccagggaaggagaagggtcgagggcgcccgccgtcatcattggatccacgtgcgcgagccttcatcaccaccgtgtctgcacgcgtggaccctcagccgcgcgtcactaagggtcgagtccaccgtaaaaggaagtgcagctggcaggagtgctctcataaaatgaaccataaaggtggatgtgggtttaggctgttccacaactttactccagacccaactcttgaagttaaatttaggagttagaaccctaccgaacgggccctaagcttaatatgttggcccatcaaatatcataaggctaatgaaaatggttagaccaaaaccatgataaagtatatcagtaacatagccaacattgtcctctatgtctacgcaagagccacgtttttatcttgcctcccacccatcacgtgcacgaaatactagatttcaggtgaatcaccttcaacctagcaccccgctttggaggcagtcaagagagaggcaggataggcagcttcccaacgatgacggcgtcatttccagcgatggcaagctcctcctcttctctagtgacagtgacacatccagctccaatagagaacatacggattgaggcttggggtttagatcagggtaggaggtggtacttggtacaagagaagaaggaggtttttctggcacatagaggaatgaccattggtggcggtgtgaacgaggcagcgcagcattgtagctgtgggacgggaagctggcgatgggcaaggttaggggcaacaataatggttaaagatacagtggtggtggaagcagatggcacaagctgccagagatgaggaaggaccagcggggataggagcttgatgttgccggacttgaagaagaaaaatgttgtaggacggaggaagatagaggagtacaggcttatgtaggtgttgtgtgagtaatgggaggagggaagaatatataatgttgattactgtagcacataagtcttgagcaatctaagccatccaaacttccctgatctttcttatttttaattttaggaactaacaattagacagccccatcgcatgcacatgatcgaccactccatgtccctgaaaaacggcccaaaacccttgtccttcatcgggaaaacaatacaattgataacaatagtgcacatactataatgtatctgttgacataaaattctaccttctatctttcgaataatggaccgttagatatactttaagattcatgtagaaccctctttacctagggtaaaagcggttctgcatgaatcttaaagtatatctaacgttcctctcgcgcattccgcccttccgcccgcctcgacgtctaaccagaaggtgtcaacgaagccagcgagccccctaccccctggccggcccttgctcccctcccccctcatagacgcaccgccgtcttccctgtctctgacaacagggcaccaccactaaccacctcctcctaacagcccttctgctttgcccccgccgcctacaacagcccaccgccagcttccgatcctacagctttggcgttgtcgtcgccgtctctccgcccatccgattcgctgcccactgctgcgctgccaccttccatggccatccctctaaagctagagaactctcccgtcttctccctcccccaccccacccctcccatcctcaccttaattatcctgcgaccctaacccgtagggtcctctgctggagtctagggtctcgccggcgtcaaagaagaataggaggtcgctgaaattggagaaggcttggagcacgaatctcgaagttcatccagtggcccaaaatctgtaagattggaagatagattttctattgacaaaaggatagcaattccgtactacttccttcgtttctaaatatttaacaccgttgactttgtagcacatgtttgaccgttcgttttattaaaaacttttgtgaaatatgtacaactatatgtttacgtgtaaatatatttaacaataaatcaaatgataggaaaataattaataattacttaaattttttaatataagccgaacggtcaaacatatttaaaaatgtcaacggcgccaaatatttagaaacggagggagtataattgagcacacgcatgttaatttggtgttgcttgcgagttgcgacttccggtaatcccacgtttctcacaaaatcatggagatatcgaaggaacccaactggaaacaccaatctcgtacggcaggaacacaccgttaggcccatcacggaactcgctgaagtcctcgccgagcgcacggaccgccatcgtccgccggtccagcaagcagagcgtccccctgagccggagcaccacggcgccgctcgcctcgccggaccacacgaacacctcgtccgactccggcaccggcagcggcggggagcatggactccggtgcactcccgtcgtcgtcaagtcgacgaccctcgtgcacgacaccgacaagagacgcggggccgacctggcgctggcgccgcagccgccgccgaagttcatcgcccagatctccacctgcgtcctccggccgacgagcagcgccaacgacttcctgtcgccgccgccgcacgacgacggcggcaccagcaggagctgccccggcgagacgtctgcctcgcccgtgcacgacgatagcagccggagttcggtcggcaaccgcgtgatcgtcgccggagatgttgcactcccgatctcggtttcgccggagacgtcgacgcagaggatgaagtagtcgtagggcaactggcggcgctggtattggaggtcgaagacaagcgatgggtggccgccgaggaagtaggcgacgccgtcgacgacggcgggcgtgcggatcagcaaggcgcgcgggctgccgtactcgccgccgccggcgatctcgacagggatcgcggtggttgggccccacgagccagcgtccggggataaggcctccatctctacgtgaatccgccgccgctcgcgccccgtcccggtcaggtgaaggctcacggagagaagccggtacgggtggagctcggaggtgactccggcgtcgtcgccggtgagcaggaggtaggacccggacgaccacggcctcggcatgtcgatgcagcgcacgtagcccgtcatagggttgcacactttgccggaggagtcgccggtccggaggacgacgaagccaccgcgcgccgccacgggttcgatgcgccaatggatagaaccatacacgtggtcggagctggacacgaaggaccgtatctgatcggcgccaccgccgccgccgacgatggcatggccagccgcgacgaaacgtagcggctggtagtcggggtcgggggaggggcggcgagtctgaagaaaaaaaccgcggaggaggccagggacgaacccgtcggcgttgcgaaggcggaggttgcgggaaaagccggcggcgccgcagatgacgcggcggaggtgcctgcacgcggcggcgcagcggaggagcgtgatggggtcggagcgctcggcgatctccacgaccatgtcgagcggcagagccggcgatgacaacgaggacggcggctcctccatctcgatctgatgatctctgtctatcggcggatgcacgtaagatgaatagtactctatgatatgtagtaacgggccggtgtaactttattcatatcatatgtaacgctggctaaagaaaaaaaaacacagacatcagagaccgaatcaaataagaaaataagagctagatttaaatataccgtgatcggttgtaagaaactaagaattctatttggattgcccccgagccccaccagctgcaaataaaaaggtgaaaaggcgtcgagaagaggtgacgaaccagtagcaaaaccagacatcggcttcaattgcttcatctcaggtcagagaattaattttcgtaatttaatgtgattgtttataggctaaagcaatatggtcttgaattagaacttcaatattgtggtatcatagcttaactttagcctactcaattacttattcacatcatcctagtgattagaagcagtcggagccatcttgattcgacatgaacaattttgaattaaataagtttaatataatctagtttaatctaatctatttagattcttatctttactgcttagtgaagattttctcttgttcaagttcaatttaagttaataagattgagtttgagttcattatgcacttctatgtttagacttattttaagtttcaagttttacgtccaattaaccttcacttagcagtggaattaagaaattgaagggaaggaaataatgagatcaatcggtttcaattttgccgaaatccccaaattgaatagaaccctgagctgcaaaatccaaatcaaatccaaatctatatctatatttatatctatatctatatacctatatatatacctaattaaaaaatatgtaatgattccagtatttttttgtccgtcactttttttgcgtttttttcttttttttttggctattttcgccctttttttctttttttccattcctcctcatttttccgttttctttcctttgaatcaaaatctaagcgaatctataaaactcgggatacaaacattgacttttaaatagagattagattccataaattaaagcagaattgaaaggaaaaaaacattgagaaaaatgatggagtagtagtggagaatcgatttttcaatcaattggaggacggaacgcattaggcatgtgtttggttgggaggatatcccgggatgggatgggatcatcccatttttatggctgtttggttgagggactaggagggataggatggttccaaaagagaatattccttcaatattcgggacaaccccatccggaaaaaagtggcggaagaaacgatcccacctcgcacctgtgacttgcgacacgcgggcggt

SEQ ID NO: 29120 - DNA, 2278 bp, Oryza sativa
ggcgcgcgagcagtacacggcggcgctggacctcatcaccttcaattcgaagtgttcgtagccaccaactgcagatcggggttcccaatctccacggtaaaaagaccctaaaccttggatgaggatttcgttttcagatctgtgcatatctgtttttgttgaagaatgtgtgaaatccctttatcaattgcttgacagtagatgttgtccatgtgtttttttttgttgtattgtagatggacaagaggaccaagcttttagtttgtattgcagctacaaatttattgttgtcgatgatggccatgattattaggtctagaaaaagaaagaggtgttcaaggagagaaggtattagatatggcccaatggttgaaagggatagaaaaagaattgagtacctagaaacgaatatttggtggaacgatacaacttgtatcaacatgcttagacttagaagggcaagtttctttcgtttttgtaagctttttagggatcgtggtttacttgaagataccattcacatgtgtattgaggaacaagtggctatgtttttgcatacagtggggcataaccttagaaatagattagttcgtactaattttgataggtctggagaaacagttagccgttatttcaacaaagtccttcatgcaatcggtgagctacgagatgaactaatcaggcccccctcattggacactccaactaaaatagcaggaaaccctagatgggatccttactttaaggtctgagattcatccctatctaaatttatctttatgtgaacattgatatatggtccctaatttttaatgttgttgaacacaaaataggattgtattggagctattgatggcacacatattagagcctcggttcgtaagaatgtggagtcttcttttcgtggtaggaagtcccatgccactcaaaatgtaatggcagccgtagattttgatcttcggtttacttatgtcttggctggttgggaggggacagcacatgatgctgtagttttaagagatgctttggaacgtgaaaatggcctccgtgtcccacaaggtaatagattacaaggtaatagtttatcaaattatccatgacaaatgttgatatttaggaatgtgaccaacttgtcgatcatataataggcaaatactatctagttgatgctggatatggagccaaacaaggattcttgcctccttttcgtgctgttcggtaccatctaaatgaatgggggaataatccggtacaaaatgagaaggagttgttcaaccttagacactcatccctccgtgtgacggttgaacgtgcatttgggtcactaaagaggaggttcaaagtgcttgatgatgccactccattcttcccatttcgaactcaagtagatattgttgtagcttgttgtattattcataattgggtcgtaaatgacggaattgatgagcttatagctccgcctgattggtcaagtgaggacattgatgaatcgttaaccggccaagcaaatgaccatgcattgatggttcagttcaggcagggcttagctgatcagatgtgggctgaccgtaatagccatcatggaatgtaatatgtagctgggctacttgtatttctaccttatttacaatatttcattagtcaatgaacatttttatgtatttcatttgtatggacagcttgttgtagtccatttgctaaattgcatttgtatggataaatctattgttgtatgctgaattatggtttgatgaatgctgagttggttgacatattgttgaatggtcatttcattggttgatagttgaatgctgaatttttttgggttgatttattgctgaatggtgaatttctgggttaacatattgctgaatggacaatttctgtttactatattgctgaatggacaatttctgtttactatattggtgaatggtcaatttctgtttactatattgctgaatggacactttctaggtttacatattgctaaatggatattttctggttcatttgacagcaggtagaaaatggacaacaatagtggcaagggaggaagcacccatgcttcatggacctcagctatgtcatctttcatgctcaaacaccttgccaatcttgtggccggaggcacaaggacctcatctggcttcaaggcagtgcatctcaatgcatgtgctagggctgtgaatgaaaggtttaacagcactctcacgggtgagcaaattaagaatcatttgaagacatggcaaagaaagtttacaaagataaataggct
